United States Patent Application Publication US 2006/0134663 A1 - sequence listing, part 34

SEQ ID NO: 59424 - DNA, 141540 bp, Homo Sapiens
gaattcggctgtgaattcatctggtcctggactttttttggttggtaggctattcattattgcctcaatttcagaacctgttattggtctattcagagattcaacttcttcctgctttagtcttgggagggtgtatgtgtccaggaatctatccatttcttccaggttttctagtttatttgtgtagaagtgtttgtagtattctccaatggtagtttctatttctgtcttcgcctacttttcaacattttgtgtaatgttttgcataagcatttgttgaaatgaactgaattagtttaggatcccctcagcctgcccaaaaactggcccctttgctgactcccatacctaaatgttctaccaaactgcaagatacctacacactccagtggagtctacatcttcctgtagtctaacctgcaccactaggggttcatgggtcccgagctgtggtccacagcacacctgttgtcctgggcttataatgttgctgtgaagaaacaccaggataaatgttcggttttcctcaggacatagttttggtgctcacttttattaaccctgtcatgtccagcagagagagaagaaacatggcctgggaagactgaagggacctatgaagtacatcatgcgtagttgttcctggtctctgttgtggagaatggagatgctggccacgtgcaggagtgctttagagagcaagggctcccgagggcacctggaatcccaatttagtcactttataagctctctgtgctcctcaggacagtggggatgatacacacacctatgcctggggcttgtcacaaggactaaaggtgctcatacacataaagcccttcaaacagatcctgacatttagaaaatcctcctaaaaataccaacaattaaggagctggtagggggtgggtgggggtttgggaaggaacacagaatatccatcggaagaatggtaactaagtaagaacaatagctactggtttttgaataccaactatgtgccaggcactgtgctaagcaatttatatataatgcatttctaaaaaacaacgaactttgcttggtggaaattctggagattaaaagtattatcccagaaatacgtgaatgatgcgtaatcttacacccatccgtgttttcattactgaaggcagacccagatttcatagtccccaagttgactcctcaagttgttctccttctacccaacctttataaaaagacatgtctttgtgttcttttaaggtcttttacagcttttgaaattctccttgggcattcccactgcttcttgttcagtatctttttttatgagactcctatgttcctggtgattgaagcttacttttttctcattttccctctgaaaaactatcaagctcaaaaatgaggatagctcttgttgacactagtctaaaacctgccttaccttctttagaaaacaaacacactactatttacatattcacttttcagcattcaagttccaaaatgcacatttgtcagaaagtcatcattctaagctaaagatgcaaggtgatgcagtattgtttggcgactctaacttagtgaaatttcccttttctctgatttttatatgcaaatcaagatttttaagaagagaagaaagaacttttttcacatgcaaagaaaattgtgtttcattccttttgcgaaaaatgtggtttctggacgactaactcctggtttgcctctttcctacatacaaagctctctcaccgacagcccaggaacacacagctagtgaaacagaacaatggacaggaagcctcctacttagccagttcagcacatagtccttgatgaccaggcaggcccagtgtcactcaagaaagtggaagattgaacgcccacaggggaaatttgggtctaatcagccatcttggctccctcctgtaagatcatggtactcggaacaataatctctgcctaagttatctgaactggctgcttgtgctatcccataaatctatggagtgattaaattgcacaaccttcctcctctcttttaggccagataaacatcttaggagaaatcgttcacttagttaatttggagagtagtcagctgaaataaacaaagcttctagctgagatgtgcagtatggtgaaagttgtctgagatttgggatctggattttctctgtctttattttgcaagtggtggcagtgacatgaattagtaatgtgctcagcaagctcagaggaatacctttcatgagagctgcttctttcccaccatatttgggctgctttgcggcttcacctttctgataccagcactatctcatcttcctggttccttagtgatgcccctgctatgaatctctatcccatattccgtgcaacctgtttataccaagaacgtcactatcttcttcattcatctcagatgccatggaagcccagtagctactgctctgtccctgacaccttttcctcaccctgaaatgaccttgacataccacgacaggggccagagtctggttcttgtcacatggcctgtgtttcagccactgtaagttgtcatcgctgtcagagtctccaccctctttgccagttacataagaggctacatagacatctgcttcctagcacaagcttttattaaccagaggcagcgtgagaggccaagtaagcaagaggtccattccggagccctgtcctcagggagggtgaggggctgtcgtcaggtcaggtcgtggctcctggggcaattcagctcagctctgagcctgtttgcagccttcagtacaggggatgacatgtgatgttgtcagcctgaaggggcaaaaaaaagcagcagcctttcaaaatcagaatgcccctgctgtttgtttccttttggaacacaataagaacagactggggacatgactctaggctgtcaacgcttcctaccagcttccacagcacctttcatatgccagaagaaaaaaaacaagttgcttaagttaaacaaggactcaatgaatagtcaaaataattgtttagcttggatataaggccttaggtaaatagatgattgcctgagaccctgggccaggaaaagcagctaggcaggacaccgcttgttctgtccctcagaaaacagcccagtagcctctgctcctctgaggactgttgttactgaattaattctctcttcccaccagcgtattaaagcaatttaatatcagaacaggctccttaaagcagggagaaggaaagaaaactttctatattagaaatataccattaacacataaatcttactacatgagcgcttccattaaatagaatgcttcagattgggaatgtctggtgtgtttgtattgaactgttttcatgttgtgaaatttctcagatgcattgttagcatacttacaattgtcctgcctcctgccttactggtattcttaacatgatttcatccttttgaaaatgattatttactacaccaaaggggcattgttaggtttatgaggaatcagcttctcaaagtgcagtgtagttatggacagtgtcagcactgaaatggaatcttccaggtatggtttccttatttgttgttattgccgatttgtttgggtttgtttgcttgtttaggtatctttgctctcacctagctccattgttacttgtctcttcttcccaaagtagggtgcagtgtgaaaatttgttgccagctaatttcagttctgctgaagaatatttttaataattgctttcttacttaaaagtaatagattccttgttgatccaggacaggatttggttgtcttgcttgtacagcccatttccactgaaatgctctttgattgaaccgtgaactcatcaagggagtgggattctcctggtattctttttccacaaatcatcatgactgtacatttggtttatcagcaaacagcaatcaaagcatacattacgtaagaaaaagttaatgctgacctgtttaaccaatttttcatcttgataatataggaaagtggttaagaacatgaggtttcaagtcggttctgagtttaagcataagctctgcacttactagctctatgagtctgaacaaattatcaaatttccattagctttgcttcctcatctgtaaagctgtcaaataataataataacagctactttgggttgttgggttgatgatgtgagataatacatgtaaaatcctcagcacagtataagtattcaatgaatgttatctaccatattattttcacataccttataatttccttacaacaactctgtgatgtagataaaattgctatgatttatgcaatttaaatattagacaactggacttcagagtgattactgattcatccagggttacccaagatggcaaaatgttcgtcctgtcagtacaggagcccccaagttcccagtgtattgccctcccttcatccatttggccacagggtactcttcctcagtttccctaaatctaaaactttacgtaataatgggcctccgctgccctagattgtcaggtgaagaccaggaagaaatcctgtcacaggcattaaaaacttcatcaatattacacagtgatttccaaaaggtgagcgtgaaagtgctggaaggagcccatgagattacagcaacaggtcaacaaatccacaagcccagccagctttgtagataaaatctatacagttcctctttggtaatactgagaagaaaatactaatggagaagtgatttccaaaaggtgagcgtgaaagtgctggaaggagcccatgagattacagcaacaggtcaacaaatccacaagcccagccagctttgtagataaaatctatacagtctcctccatgcatcatttttactgtatatgtctcccttcttaccattataaaacataaatttatttaaagtcagtgagtctatcattttaacatgctgtattttctcaattgatattaaaactacaactacttttatgtgaggatctaagattttcatttcttttttcattttaaaaaccaggtctacacactccctaaggtgtgtgtttctaatcataaggttagaaaacaacggtattgtagaaagagctcttcctatgaagtctaacagcctagatttaagtgctaccccactgactataagctgaaagcaccataaacttaggcagctcaattaaagtccataaatatttactatatcaggactttaaggggcttgtgcccttaactgggactacagagcgaatagtagtccttcacaaccattcttctctgagcctctattttcttacttataaagtaaagagaataaaggtgtctctcctcacagggttattatgaaggtccaatgagaaaaaacaagaagataaatatactgtcatgttgtgaaagtgctttgtaaacatagggtgttcaagacaactgccgaggagagaaaaacacttcaacttttcttggtagctttcctttattgaccagccaccccatattaaagtacataagtacattttttttaaagctaacagctttaccctcattgatgtaagtttatattcagacctataaaagtacttttccatctattcctcttcctctcactttggtttataacatttatccataaattacaatattctttcatatcaatatggcaatgtaatatcacattatacaaagcattgaagaaggcaccaatgtaaaattcaaagcagagaacagcccaagagctcatggcttgcactttacaaccccaagtacactcaaggcccatctatgagggacattttaagcatatcagttgcatgagttgcagctgatggggatctcacccaggccctgagttcctccaggaattaggaaaggaaggagagaggactgttcttcctttcagctcccaggctggggccccagtgccaccttacttcgggaaaaaggtgatttatgggagtgtacccattactactggaattgaaaccttccctgattcagttcttccagagatacattatgtctcacatatttctacctctcctctgattccatattatatataataactggtgaatttggtctttatttctactcttgtcaacagagaacattcacttagaatccactaagtaccagacagcattcaaagtgctattatggagaaatgtaaataacatgatatgcatgatccctgctttgcaggagtttagaaggaagcaaaccagcatttattgccaggcagtgagtattattttagcttctctgacaaggacacttcgaagtgggtcttaactttattttataaatgaggcgtctgaggctcagagaaataaatctgccaagatcacacaagtagcaagcgtctgggccagatttctccaaggcctaccgtgttctaaagtccatgctctttccactctactccattacctcccctgatgagaaaggcaggacacatactaaaaaggaaaacgaacacagatattaaatattaaaggaaaccagccaggcgtggtggctcatgcctgtaatcccagaactttgggaggccgaggtgggtggatcacaaggtcaaaagatcaagaccatcctggccaacatggtgataccctgtctctactaaaaatacaaaaattagctaggcatagtggcgtgtgcctgtagtcccagctactcgggaggctaaggcaggagaatcgcttgaactcgggagtcagaggttgcagtgagccaagatcgtgccactgcactccaacctggcaacaaagcgagactccatgtcaaaaaaaaaaaaaaaaaagaaagaaatatatatatacatataaagggaacctacaaataaataagtactagaaactcgacagactgtcctgtgtgcaagagtggccaagtgcctggagcaaggctagcctgtgagccgattctaaagcacattaatgatacaatctggaaaaaagaaaggtggatgccagtcagaaaacaattgtgttggaacaaagaaaaattatagtctgggtgattaacacttttaagaacgaaagctacaatgcaacacccatttgtctttctggattcagagtctttgtctctgtggccctgggaagcataaaaagacttttgtctttttatggaaatttgtaagttgctgtgattttcacagacccatcttctaagcacatacaagagacctgtgttccttgttagtgtattgccaacctcattacactcagtattaaatattcctttccacatagcactcttcagtatggtgaatgggaaccatttttctcctgacatctggggttggtttcattgaggatttacaggggaaaagtgaatgcacgtggcaatgttttcaagcctttgtttggattttctgttttctaggagatatacgactaaggggtcagacgggggttcgtgctgaacgccgtggctcctacccattcattgacttccgcctacttaacagtgagtaatcaagtgtacctggaaaggaacaaacgttttcttcaaaaagaaaaaaaaaaatcctcatttccctctgaacttcgaaaccttctggggtctgccttccttcctgaatctctcttctgccaactagaacttaaccctttgtctttgagtttcctcacaagtgaagtaattctggccctgcactgcctctcagagctccactgagggtcaaatgagatcaggtcagctttaaaagtataaatctctggccaggcatggtggctcacgcctgtaatcccagcacttcgggaggccaaggtgggaggattgcttcagcccaggagttgggcaacagagtgagaccttatctctacaaaaaatcaaaaaattagctgggtatggtggcacagcctgtagtcccagctacttaattgggggctgaggtgagagaatagcttgatcccaggaggtcaaggctgcagtgagccaggattgcaccactgccttccagcatgtctcaaaaagaataaaattttttgtataaaaagtgtaagtctcaaaaactgtgatgccctatacagggaagctactattttcattttccagcacattctctctaccttcagccagagctagactaggtgagattccattttgtttttaaaaccccacagggaaacctcttctacagttgcccttagtaacctacctgttatggaattctcacttctttgtctaatataaatccttgaggtctattcttgccttcctggtaaaactcttcaccagggcaaaatccaaagcacttgctgctttctcccttgaatcttacaagttcattgacttctaccttcccctccctaaactgctcctcatcagtagttttgctcaacctttggtccacaattttcttaatcttaggtttctttgcaaacccaaaccagtgaccagtcatccctccagatttcatgccttataacgatcataatcatccttcactgtagacttgtgggggaggtggaagagcaagtggataaatttcacaatttgctccaaggttttcagtgtttggttctcatatcacttcccatctataaatttcaaagtgctagattatacccaaagaatattactttcctttgacataaataagctcagctaaagaggcaatttgatttacttcaacccctggaaattactaggagaaattagaacctgttatttctgatccttcgatccttgagaggccaatagtaggtggcatgtttgtatttctcctggcttgttaatctcccatatcaatgtgcaatgtctgttttttttagcactttcagggacacagagacttggagtaattctttccacactagagataaccttccctacccagaccctcaaaaatgctttttggaagaccgaattgagccattagaccaatgcaatatgggatacagcctgcgggagctctattggtctctctgacctttccttataccctgaatgggctgttccagctacccacggaagttacacctttgacagtctctagactgagtggatttccaggtcctaggcatgtggtttctccaagcaggacaaggatgagcaaggggttccatttcactgtttcatatagaccagaacgctccaacggcatcccattttgaaagtcggagggagaaaacaaccgaaaggcctcttttcaatagtagatgagtgttagttcatggtttctaatatgaaccacaaaggaattaggaaaataaggggatatttctgtttataattccaaagtttcattattttaaaaccttaatcccagtgttaataagcaactttactgctaatggtggttatgtttgcaggtgggacagtggaatatttaattatctacatcataggattctgcaacatttttttttttttttttttttacaatttgcctcttttacttttgtaatctgaaaaacaactgcaaaaataaataacatttaaagagaaactcattgcagataataattcagtgtcatattgttcaccacgtaagagatcatctgccagcagctgctatcctgtcttccctttgctggagatcctccaggacttctgagcacctgggctcaaccccagcctcatttccctggccctggatgctgcctgcccctctacccccatttcaccccacctggtactcacaatcctccactcatcgagtgacagtgctggccatccacccggaaattccctttagggtctcctcagcattccattccggataactctttcacccatgtctcttactctgtaacatattgcagatgcaatattaattttcctttagcatattttcctttataggtggtctccagtttttttaatgtatcaaagacaccccaaaaagactataagatcctaaagacagtcttctctttatccctaaatagactatcagatcctaaagacaatcaattgctattgatcatttactaactatagttaactgaccaattattaaagggtctcctcgaaaacattatattaaataactatgaatgtaaatcatcccctgtgtttaactgaacaacacgggtaggaatgaaggcctctaagattttcctttgtgatacgatttacctcttggtataatgcaccaaagaccccattggtgagttgaaactagaacagataacattactgtggtcgccctccacggttcctaacttagtttgcaattacaacagcttgtcaccatggagcagagatgtatgaacatctgtgttatgcacagtcacataaggtatatatggcatatctcctactacttcatatactgtctatttaattctctttaatatcattcacgtccttgttgtggtttgcctgagttgttagtgtgtgctttatgcctaaagggaaacatcttgggacatttggggattttctcgtagaacttttctttttaccagctcattcttattctacactgtaagagctgaactagtttaaagtgattctttagatcacttaccttaattttgagtcaagtttttcccagtgtgggcacagaccccaaacttcattttccttgggtgcttgcagttttgttctctctcccacagtaaaatctaatctaggatttttttaaaccatttataggaaaaaccaaatcaccatagctgtcactccccagctctgcatccctgcagccttccttccaaaatgttagtgaaacccacacaactgccatcccctttccaaagtgtcgctgggtgggtgtccctcccccacccacctcagtatatgcattgaatcactggagcacgcaagagcagaaatgtatactaaatagtgaggcccatgcatttccccattggtcccattagtcacagccccagtttgtcacaggagggcagaggacatcagaattaaaatctaaaattacttgtcttcaaccagaacaaagtttctaggcgttaaaatggataactagaacagaagtggacaaatgactgtccacacaccaaatctgtcccctcctcctgcctgttttggtaaataaaattttactgggatattgctatgcccatttgtttatatgacatctatgactgctgtcactgaaacagtggcaaagtagttgcacagaaaccgtgtggtctacaaaccgccccccacaaaccccaaaatactcaccctatggccctttacagaacaaggttgccaatccttaacttagatttttttaaacagatttaagagagctttttgacaaagccacaagcacattcagtccagtgtgtttatctttgttaatgtctttttttttttctgttcagtttccactgccatcactttactttcaagaatggactcacattgactaaatttttatgaacagaagaataaacagagagggaacctctgttattgatgcagattttaaattccaatttaaaattataatttctacttgcacattcttctggaagagattatttttgcggggaggggaagcacatgtttggggcagagggaaacacagtactaccaatttcatgtacctgttttctgcatataaggtgactcttggtttgcctggcatagtcctagtttgcacctgttgttcaggagtatttattaatagtgccatttttcattcccagagtgtcctgatttggacactaaattacaaggccaactgcttatataggttttcccaaaaaagagtatttaaatttaatgtttctcaaagatcacatgcaggaataagcttaaaagatctattgtataatattgtgactatagttaataacaaacgtatatttgaaaattgctaacagagtaggttttaaatgatctcatcacaaaaaataagtacgtgaggtaatgcataagttatttagctttacttagccattccacaatgtgtgtgtgtatatatacatatagatcttgaaatatgttgtataccataaatatgtacaattttgttaaaaataataataccatatcatatgcattccaggaataaagattagaaaatcattttcataagagattcatctagatcaatagaaatacataacactcattaaaagctaatttcgttccctgtttctattttacacaatttagaagagagtcatctctatgaacttcttgaagcttctctggataaatagcaggaaactgtggcctcagcactgtttgtgtgggacataggaaagatagatctttaaagactgttatctttacacctaagcatagagagccagaacagagagaaaagggggaaaattgtttttattccagatgatgtcctaacacagagaactggagggacggaaaagtaacggctgtattctcccaatgtcgatttcctatagatttatttcatttactaattctgtttgtaggggggaaacaaaggaggaaaaaatgtagagaagagtgttctgagacttgtggacccagaggggagagttgcagaagcaattacaaccttctgcagagcaggcggctccagcagccccgtctacagctctgtctcctgatttaatataatcagcagcctgagtagataatgactaggttgagatgttcccgtggcaaccatctcagagcaacacaaagtgatttccacaccggctcagcagaggaagtgacatacaaagaaaacgtgctcagggactgtggagcttgaggaaaagaaacagcttcagcctgaggttttagggcaccaagtatccactgctacagagaacccagagctccagaccagcccctgggctttgcagtagtaggttaattggctatttggcttttcctgactgttaatttgctaatcttgatctttaaagctctattccttcagacttgactctcctgtcagggtcatcttaactgcacaagcatgaggtcattttagtagagctacaaaaatatttccctttacttattatttcccaaatggaaccaatatatacaaacatatatattttttaacctttctatgaagaagtgacccagagactcaaatatttttttaaagctgccatctaaaacatattataccctgcagccattctttctttgacatataaaacacactctctttgacatataaaacacactctcgatgaaggactgttgaacaaaagccactcagtatgctggaaatcatctggccctaagtgatagccccatcttaaagatggagggacagtttccttccagactccatttcctatgagagaattcttggcagacagttacagccttttagtaaccttacagataccttttcctgtcacctataagaactacacaaaatgcaaagaatctgaactaaaatgtcattggatgatttgaattcagtcatgctgagaagatgctatcccacccccagccctgtgttccccaagcggagaagggaggtgtccgctgggacttgttcagacttctcctcacacttgtgagtgccaaggtaacaccctacaatttcaaagttcaatatttaccttcctctagaagaaaggcaaggcactggctgtggtagtggtgctttctggctcagctggatcttgctccatgatggtgcactcagggcttctggctgcaagctcccagcacttcagctgcggaagtgccagggcagcaggatggttaaccactgaaatgcccactagcttgcagaagacagagttggcgatgtcccgactctccctattactacccctcgacggagcacctcctatggtaggcattgtaccagtgctggagatacaaagatgaatgagacatggccactgcccttgagggatttacagtagcataagctactgtatctacaatttatttacaaatacattttgatgtggtgtgatacaccaaataatacatgcctgtataataacagcatacataatatgagaaatatatgcatctacgggattcagaggagttcgagaagggaataattaactctgtcttggaaattaaggaagtcttcctgggagaagttaaaacacaagcagattatggaagcaacagtgaaataaaagagggctgtatgctaaggtcaactattagggccattataaaatacgctttaagacttaagaaaccaggaaaacattgtcaacaagtttgctcaactagataaaagtgttattgaaagacaaagtattctagtgggatccaagcagagaagtcaggaaaaattatacaacatatgtctgagaaaaaacatattcaaaaagaaaccattttcaccttctacatctaaaagtgaaaacagccattgccttctgttaacctgtctgacatcatttaatggattactttttatctgaaggatgaaaaatagaaaattgagttagggagtccagtacttcctctgggttttcattcatttattcagtcaacaaacagcacctactctatgccaagaaggccatgaaacccaggtgctctgagccacaccaaccgccacaggactgagatagccttttgtatgatggctaccttctgtctcagacagcagtgggactggggtctaccagagacaccaaacaaaaatatctgaacaattccttttaagtcaacaaggaccggggagatgggggagaaacctgctatatgctatatctgggcagaaaattctgagggctagaaaggaaactatgagatattctgctaccctcaaagagcaaacaatctcattacatagacaaggaaaataaacattacaccaagtaccatacaacaaagtaaatgatctaattctaaaataagtaacaataatcagagacaagagaaggcagagattactgaagtaacctgagcagaagaaggctttatggtcttgtgctaaacactgaaagataagacagtgttgactgattaaggagttgcctataagggagactgacctacatatgaggacataacgtcattaagtaggaagaaggtccaaaaagtagcaaataaagttcattaactagagagaaaggcttggaatgccaagataaagaattcaaacttgtctcattaagaagaggatctctagagaattttgcaaaaaaggtgaaccgtataaaacactgtttgagaaaattaactaacatccatatgtaggagacacagtttcaatgaatccaaagaaatgtaatcaggctgcagactgtgatggctgtagagatgatagtgtaaatccacagatttcatataaaagaagacataaaactggaggatactgaatattgggagagccagagttggtctggccatctgaaaaattggagctgagatcaacagtcagaaaagttagaggatgagttaggggaaagatggtaagctccactgggacaggttgagtttgcaggagaatcgagtggaaatgtccggaagaaagctagaaataatggactaaagtgcagaggagaggtctattttgggaattccacttgggaatcataatcattcatgagccatctggccagaacaggcgtcatgaagtcaaccaactacttttgttcaggggcccctgtatttttagtttataataagcttgattttgaaaagcattacaagactgtccatgagaaatcccacaaagaaattagtttcctttagtgagaaactctaaatttttctctgtgagaaactatttagacataagagttcaggcaccacctcactccctcatgatggattctattgagtacaaaagtgacttgtgtcagatcccagcggatttgctaactcacctgaacacagcacagagaaatggccattttctactacagcacttccttgagcgaaactctaacccactcaaagtattttcagcatagtggcttctttggatttctggagacattaaaatatagagggaagcagaagtaaattaagttttttttactgaagttacctatgagtcactgagctaaaatgacttgtttgttcaataaaattaaattcaacctcctacccagaaacaggcagagcctatctctgtgacctcattaataaaccaaatgcagggctatttttttcattgccatcccaccttcaacgtttcagaatatctaagggattcactgtggtccccattctactgtatgtatgaaaaaccagaacatggccccatccttaatatcttttgtatgttttcaaactgagatctcagggttcacacacaagatcaaaaagacctttttttctttctaactagcagaccaaattgccttggggcatctgggtcctttattacttttaagtaagctggggaagaagggcagaagttatggaggaaagtcccaagaagaaggtggccaatgccactatatctaacaacagccaccataacagctctagtctgagaggtgcttaaccccaggcacaggatgtacaaggccaggtgtgcacccctcttaggcaaggtccccaggctataggtctcttggaagcctggaagcacaggaggattgctgtgaatactaaaaataaaaatgagtcccttcacaaccaaaccacggctgcctctctgcctcttctaccatggttgccccacccagagctccaagctcactaagtcatcatcaatagaggagcccacagaaagaccatgagctttgaagttagacctgggtttgaatcctacttatactgtgagcttgaaaaagatgcccaaactacttaatgttcacatacatgcaagattttaatttgattgggttgtggtgaggagtaaatgagataaatgtgtccagaagcctgccttgcttataataggtccataataaatacagttgagttttggatgtcccttctctctctgctgagtacatccctctccagccacctcttctcctaggaagcatctgttcacccttcaagccctggccccatcattatgtcctttgtgaagccttcttcaatcctcccaaaggagtgaactcatcattctctctgcactcccactacatctcccagaaagcattatcacattgtaactgcgaagtcattgaacctgaatttctggaggtagagcccaggatattttcaaaacagcctcaggcaacctgaagcaacaagcctggctctgggccttccaggaatatttgggaaccactatatatgtcaattatggcatacaaattatatctatgctttgcacagttagactcatttaatccccataaacaccctataaagtagccactactattacagatgaggaaactgagactgaaagaggagaaataactcaaccaaggtcacccagcttgtaagccagaatttaaaccccaaatatataatcgcagagcacaagcttttaaccatagtaaagtataatcctttttatatatgaattttaatattcaaaggcaatatatgatgcagtatactccttttacaatgaacatatatatgccaattattccttttaaatattttttataaattatgaaaattttctttttatagtacatttagattatttccttttggtattaaatgacttcagtatcattgaacaaatattcctataactgaatgagaaaatatgagattaaacatctaaaaaatcagattttgcaatatttctactgtattttctaatattcctgccactctggtggaagacgccaaatgacagactgcacatttcatcgcctgaccttgtgttctttgataagaaagaaaagggcgtggtggtgacaactgaggatacttgtaagctgcccccaaagaagaaggaaatggaatcgctattgtgacaaattaaagtcagatttgtagctgccaccagttgctttaatttttctcaagggggagttggttatttcctgtcgtgcaaaccatgaatcgctgaaagaaacaatttctcaaaatgtttataacatattagataaaaagcagaatagaaaagtctatatccaaaaagaagatctcagttatgtttattaaaatatgccaaaatccgaacaagggttctttctagatgattattgttcttctggttttctatttttttcctactggaagcatgtattccttttataatcagaaaaaaatgagattttatttttaaaaatttcaatgtccgccagaaaaagaacctttatttttcttccaaaggaatatcaagatgcagaaaatgaaattgcagccataggccagaaaacattatttaacaggcctaaattggaaaattggttggaaattgtgaagttgggtgtttctcaaaagctatgtaagctactttgcttgtcattttaaagtgaaatttattccaaagagcacaaaatcaaagttcttattcacatttgaacagcactttagactttgcaaagcttttaaatgaagacactcaaaaaatcattgagcccagtttttcattttataagcaaacaaaaacaaaaaacaggccaagtgattcaagcaaagctatgaaagagttaaccagggttgggctcttcttacattctgtctttccactcaaccatataaggcttccttatataagccttaccttcaagatataaaataacttttaccacttgcaaaaagagaaaataaaacaccaggattccccttgaaggtggttggtgttggctccagagccggctgcctgggtttagattccagtagcagttgctacaggactttgatctactgacccctggtcctctgattcctccgggctagaaaagacgattcacaagtgcacatctcatgggttattgtgggaagtagtgagtaagcgtgcttagagtgctagtgtaatacctgccatggtatcaattattttattattacagatattagtattcccatttaagaagggcataggacacataacaatataaagtacttgacttatagtgaagtagagaatggcctattaacccttttcagttttccattctatagttttatcttttttctgacaggtatttactgagctccccctacaatgcctgcagcattgctttccaacatgtggttgttaataaattggtagagagactgatggctggaaaagtgaggctagggaaggttgttttgttttgtttttcacaagacattgaagcaagctgaaatcatggtgagaaggatctagttgagaaagaaccatggaatagaccagaaaaatcataactgagaataaagtgtcctgagaagatgggaggggatgactggcctgagaaaaggaggcaactctcctaacagcaggtgggaagaaggaaagaagggatgcaacgcagggggtttggtaggtttcatagcagaaaagtaaggaatttcccatctaacaacttctcgtttctccatgaagtagcaagccaggtagagaacagtagagatggggcagcccgaggggccaccagagcttggtggtcttgcttttgtggcactatatgtcagtatagcccagagagatagttctgtgctccacctggccaccagcagtcaatgtcatcaaaagcatcacagggaaattccatcagcagtgtggtcgcctggctcagccttggtcatctaagtctttaccattgttttcagctttcccctcctcagtttgggctagtatagacaagcctaccactattcccaccctcccctacatgtccacatctcccttagcaatgcacactgaaaaacaagaaaaattataaccttgtgtctgactcccctctccttcctgaactcatttgtgctctgtgggtaatatcatctataaggaaggtctagcagtggaaacaagttttccctgtccctcggtgtctgggccctggcacacccaccccatccacatgatcatccactactggtcactcatcacctgaagccagctgtgactgcagctagttcacttctaggcaggggttgggagatgtcccctccttgctttcctgtgattctggatcctataatgctaatcttttctcccaagagatgccaagaaattaggcaagtagaagcccagtatccccttccctctcctacctaccatttttcgacaattctttatgtgtaaggaaaagaattccccatctcccatcttcttttcccattctttcatttcatgttctaccacattagctttattttctgttttggagagaattcttggaaaagaccagaaagctaaaaatgtatttttagaaagtcctccttggaagacctaagatcatccctttttaaaaaaaggagaaagggtaaactagattacactattcacatttattgagcaactactgtgtaccaggccataagtgctaaaagaaataaaggatgaacaaaacattttgggaaagggctgatacagaactcactagaacaccagctaaattggcaagtgtcacgaggttctaatggagaaagcactggacattctagtgaaggaccttgtggaaaggttggcattggcatttggacaatgactggatttttgtaagtagaagtttttttaaagtgcattcaaaaaaagaccaggtatgggaaaatgctgaatacgtttaaagggtgagcacctcagattctgcggtgaatgtgtagtgctgaaagggtattgcatagttggagggacggtaatcagaattgatgtaaaattaggctgaaacccttactaaatgttaagggttggttagaaccagaccagtgatggtcttgaatgccaatttataatcttttttttttttgagacggagtcttgctgtgtcacccaggctggagcgcagtggtgtgatcttggctcactgcaagctccgcctcccgggttcacgccactctcctgcctcagcctcctgagtagctgggactccaggcgcccaccaccacgcccggctaattttttgtatttttagtagagatggggtttcaccgtgttagccaggatggtctggatctcctgaccccatgatccgcctgtctcggcctcccaaagtgctgggattacaggcgtgagccaccacgcccagctataatttaatcttttttaaatggagatttcacttagggcttgtgagtatagacaaacgcattttctttccctcatatcttatatagcaagtggttgctcctgcttaatattaaaactaagttacaaagaaagagtcagtttttcctgggtatacagtgaaaacacattccctcttcaatcccctaacccaaccttctatgcctaagatcaagagtgcttttacaatatgctttataaaaacctcaaaaactcatctcagtattcaattatatttcaaaattgttgcctggaaagcccaggatctcaatccattattggtgtacaatctataattgtatattggaattctaaaattagctggtatctattgaaagtgttctatgtgctaagcactttatatgtataacattatttattcctctcaaaaatgtgtagattctgtaaattattatcctcaagtgacacaaggggcaacagaagcactaaggaagtagagaggttcagtagctgtatgggagcatagtcaggttgcaaagcttcatggaagactctagagatcatcctctgtatctctctgcaggcagctcccatcaccctccctgctgagatggatgctcttcaggcaagcctccagacacactaagactgctgggatattcttattcattcatttattcactccattcgtatttactgagcacctatgtgtcaggcgctcttctaattgcttagctcttacagtggaaagtgaacaaagttctttcatttgaaaggcctcttctccatctaggtgcggtggctaatcccgcactttgggaggctgaagcaagaggatcacttgaggccaggagttcaaaaccagtctgggcaacatagcaagactctatctctacaaaaaataaaaataaaacaattagctgggtgtgtgatgacgcgtgcctgtagtcctagctactcggggggctgatgtgggagcatttgagcccaggagttcaaggctgtgatgagctggaagataccaactctataaagtaaaagacctcttattttctctatcacaattatgcctcttgattataacaataattattcttttagaggaaatattaggtctccaaaatgtcaacagtgttcttcatatcactgccaaactatctcaacgttcacatagaaaatcatttttacaggcaaatagattataacatctcagaaggaaatgtcttcaaagataagtgctgcctaatatattaaaggacaagcaagttctagttggtcaaatggtctcttcgctgggaattgccaaacaaggataacctgttttgaaagaattatagcataatcaaaaactcctaacacaaaagctatttgaggcataacttaactcttccccagtgactcatgacttctcagaatcttagaatgtttcagagtcaattaatttaaacagcaattattaactggaacttcaaaacaatctttgtgaagagtttagctttcttattgttgcaatttccatttgctgaaccaattaaggccagtggtaccacctgagattttgaaaataaatcagtgggtttttatttcagctgtttggaaatgactaatagagtaatacaatagattaattttatctaacattaatagctggatgtataagaaacacccactctctagaaattaagacatgtcaccatagtcttatgacaagagtgagtctcttatttttgaactttctattgaacagttctcaccatcttaaatcaccctttgttatgagtttttaagtgtcttaagtagagaaggttaagaaaatgaatacttatactcctttaaatactaattaagaggccctggtaaccatttatcagtaatattaatggcatgaaaattgaaaaagtatgactcaaaggtgaattcagggcaatttaaattatatataaaaaataaaaacttaggtggaagaatttaaaaattttaaaattctgcccaaattgtggagtgcaattttatacactgggaagaaaaatgacagcaataaaaattttaaaaagatgaaaaatattttttaaaaaattgtgcaacccaattttaaatgggactgagaaatataagcaaagcatcgacaaaatagtatattgttagaaaagctatgcaaatgaaagaacattaaaatcactttgctatataaaacaatgtcaaatgacagtatcaagtgtccacatcccctgaggccaagtttcagtcatctagtccatatggagagtaatgctgtgccctcagctatttccttcttaggactaatggaaatcaaattagctcccttttcatattatgtgaataaaatataagttccacaaggaaaaggactttattttgttcattgctatatcctagtccccagaacaatgctttttttcacatagcaggatcttgacagatatttgttgaattaataaatattgaaggcatttattcaaaatgacttgttgctatggatggcgtattttatttttactaaagttaaattatatataacatgctgacaacagcagctggagagtttgccctattgtgtgaagtttttccaagaagagtttagcaaacagcatatttgtgaagattatcaatatgtggaatgggtgtgatattacatacatatcaaattatttgtatttgtgataaaacaaatatttaaagtacaatattgaggattttagtaaaaggagaatttgtcttttctaaacaaagaaaattatagggtgtgactagatcatcctttatccttaagtcatattttccaaatctttaatcctttatagcaccatttcccaaagcgtggtatgggaacacaggcgatatttttgttacagaaacaaccttttatcttttactataatcgttacatgtatattttaacatgtactagagaaaatgtaattagcacgtcaaatctgttttttattgatactaattttatataagttatatgtaagtaagggcccgggcatggtcactcacactcgtgaattagcactgtgggaggccaaggcaggaggatcgcttgagggcaggagtttgagatcagcctgggaaaagacatctcttaaaaaaattaaaaaattagtcaggcatggtggtgcacacatgtagttccagctactcaggaggctgaggtgggaagatcacttaaatccaggaggtcaaggctacagtgagctatgatacaattgctccagtgcactccaacctggagacagggcaaagatcctgtccctaaaaaaaataaataaataaagaatacatatatatatataggtaaaaatgaatttatttgattttttaaaaaagatattatgtaagtagtggtataggcagatatggtaaaaaccctactaaaggcaagagcatgactgaaattgaggaaactctgaccttagtttctacttggagcagtgagactcagagcaaatactccattcttcttgtaaaggtgttcccaggcttcagacaggaacccattacacaacagccttcccggggcgtttttacccagcagaaagacttctaaccctctcagacccaatgcctcctttttatagcacattttataatctttactaccttgatagatcctttaccctcttgaaaggaaatctacagcctacttattctcataagttaaaaaaaaatcataataaggccctagcttttaatacacaagaaatacaagaaaagcaacttatgacaaataatgttttcaataagtaaatacttgggcataatcacccttgaaggcctacggatatggtctatattgcacccacatgcagaatccctgtgaatgtgacagtccagtgcagatcgatacaggtgtattatgttggaaatgcagtcaactatcataagcagtcttgccactggtaatttcctaagaaggcgaacaacttctgggaaagtcatgtccaccactccctcctctcacccacaaccccccaaaaacaacattctttccttagtttgcatagtagttacatttctgaaaagggaatacttgtattaaaactgtacaagagaacaaccactatggaaaacagtgtggagattccttaaagaactaaaagtagaatgaccatttgatccagcaatcccactcctgggtatctacccagaggaaaagaagttattatatgaaaaagatacttgcacgtgtatgtttatagtagcaccatttgcaactgcaaaaatgtggaaccaacccaaatgcccatcaattgatgaatggataaagaaactgtggtatatataaatgatggaataccactcagccataaaaaggaatgaattaatggcatttgcagcaaactggatgggattggaggcaattattctaagtgaagttactcaggaatggaaaaccaaacatcgtatgttctcactcataagtgagagctaagctatgaggatgcaaaggcgtaagaatgccacagtggactctggggactcggggaaaggatgggaagaggttgagggataaaagattacaaattgagttcaatgtatactgctcaggagatgggtgccaaaatctcccaaatcgccactaaagaaattactcatgtaaccaaataccacctgttccccaataacctatggaaataaaaatttttttaaaaattatacaaaagaatactttgtgatctccatgaatatatacatacctactatgtacccacaaaaattaatgattttaaagaaaacaaaactttgagcttacctatcagagaaatggggttaggttctaggttcagatcattataaacaggcttttcacccatatgaatacctgaccagccattgaaaaattgaaggtgatacaggacaatcctctgttgtgtagaagagccccatatactttgcgacatcccacatccctggctcccttccattaaattctgttctggccatttctatcatttgacagccaagaatgcccccccaacatttccccaatgcctcctaggaggtaatgcctcccacattgaactcataaatcccaatagcactcaaggatttatttttattttaagctatccattactatctgacatgtagtcattaagtccctttgggctttttatttatcagtgatagcttttggttccaaagtgtcttaaacgtaagagatgatggcttctaaggctattatcagtaatattctactattattacagaagtgttattgtttatggcttgttattaaccacaaagtttctcttttggcttaaagttggtaaaaataaatattgttaaaataaatttcagaaagtttggttgctcttaagaaaaacactcaagagttaggggctcctgaaaagtctgaaattcgatataattagaaatctggttactgaaaaccagatactttaaaaattaagcctctcagggctgcaaattttaacagcacagttttaaaagcagattcttggcataatgttgagggggttttgaccaagtcatgctgagaaatttgcaactgcagcattcactggggtgaacgcaaaagagaaaaaaacacattaatgaaaactttccaggatgaaagaccttaaacttagcttaacttctgaactttttgctctgctgtgatctttctgacactttgaagaatgattctggatgggctccaaatagcacactcctcactcctcattcttaaacagtgtgaaatctgtcaacccaatcaggtcatcaagagggcagactgccacttgtcattactgagaggggtgttctctaggacactgaaaatgtcgggcaggtcttgctttttaccaagagctagggcctggcattttgagaaagacacttatttccactcattgggaaagctagcttagcacccgtgtgcaaatcaagtatgccctattcaatttaccagagtgatgctttgacatcattccccttaacagaaagctgacaatcaacaatagcccacagggctttatttgcaaagatggaaagctcaaaacagttgcctcagctcaagatggaatctaattttttaaattaattctaatgcatgagacaaagaaacaatatcagttaatgagaagcatgggaactgtttgaatgcctgttcttctacttgttacacgtgttttactgagtgtcttaatcttttggtactctctttctctgcttataaacctggaataatgataggtattattagctctggttattttgttgtgagaactgggacccccccacccctgggcaaaattaccaagtggattaagttttcctttgacttttaccccttccttactcacaccattgagctaagcactagggattataggtaaataaggcataggccctgccctcaaggaactaacagtttagtgggtgagaaagacaagtaaatatgataacgcatatatggctgaagaactgctttgctgaatataattagggtggggttgctttggagcccagcacaaaacactagccaccatggggaaaagactaggaagactttccacccaatcaccttctttctcctctctctgtccctttgtcccacctttctgctccccccaaagccaccaccccatgacttcccttctgagatagaaccccaagctttagactgttccttctgcccccttccatcagaacttatccatccagcattgcctacctaattgcaaactaattcaagctaaggcattcattgattcattaactctttctgagtgatatttgcattctgactggagctgtccttacacactctaccaatctgtattgggcatataccatgtagattcatttcaatcttttacctaaaagactgataagtggaagaaccaatccttgaacctcattctaggccaagtatccttttctcagaaatagtttcttattccatttcatcacagtctgcaggctctgcctagcttgtcagcacctgtagcagagactccgtgtacagcaataggatggtgctaagtctcatctatgtggagatgagacatataccagagagaatggagaatactgtcatggcaccatagctgctcctggaggtcccaaccccatgagggcactgcttagttatccagccacactacttgcccactagaagggcagctggaagtcccaggagagggcagagatttcctccaaccacacccctccccactccccacccgaaggccactgtttttggctcttgctgctatggaaggacaggagtgagctcccgctcttgacaggaaactctccaggagcagaagctgtaacttcctcatctttgcatcatcagcacccagcccagtgtctgagccaaagtaaaccctcagttaatgtttggagaaggggaaggaaaggaagggaagggtgagctgttgagacaatcgaggatagttcttctctttggccattctaaaagtactcagctaaatttattctaaaatgctaggtctccaccttctgcttctctctgtcccctccttcagacacagcaattaaactcttcattctgagcaatccagtgttaacctaggatgagagaaggcaagagaaacctcagtgccaacagtgcacatccttttttgtgcatttctatgccccctcactttcatcccctgccagttgcatctccacaggtcccacctgagtgggtttctctgtggctttagcacggtatgtgtatattcatattttttccaatataggtgtatgtaagcttgttctcagagctctatagtttccatagtcgtaagaataaaaacatttttctgaccgaccactccatccctgccatgatgctttacctcatctggaagggtgtgcaggacccagtccattaccagaaaggatacagtctcatagagcgcaactctcaagcccatatgggattcagagggtggcgccaaaaacttcttacatttcctctcagactacctttcactggtacagaaacctcctccgatgggtgcttgaatgtctcttctctcttgatctcccttcctcattccttttctactgctctgtctcctcacctctctacctgaccacaccccctacatatataccaggtgccatcttgcctctatgccatgtggaaagaaaggcttctgactccatcaagtgtgagcggcaaagtagagcatcactttcttgagagcagagcacccgctagacaaatgatctttctttttcttgctcatattttttgctttatacagtattttaatttctaggcacttttatactaaaaccttccttacctgccacagctgaagtggaaacataagtagtgaaggggataaagagccaatcccatcaccttcctctgggtagttgaggacagaaacactcacttaaatcttcttgtatgagtccgttttcatgctactgataaagacatacccgagactgggtaatttataaagaaaaagaggtttaatggactcagttctacatggctggggagacctcacaatcatggtgggagatgaaaggcatgtcttacatggcagtggcaaaagagaagtgagagccaagtgaaaggggttcccccttatcagaccatcagatctcatgagacttatttattaccatgagaacagtatggggaaaaccaccccatgattcaattatctcccaccgggtccctcccacaacatgtgggaattatgggagctacaattcaagatgagatttgggtgaggacacagccaaaccatatccattctgtatattcaggtaccacaatgccttgcacagagcaggtgttcaatggatatttattggtggaggcttcccagtgttcatcagactacaaaaaacaaatagccaattcattcctcacctgcttccagttcatttgacaactaccaaaaaatattatatattatagccattcctaattaaaacattatgcaaaattatcaatgtaggtagagatatttagaaaacacataaaagacatatgtgttttctagagggaaggtaagaagaaaacaatgcccatgggccatgttaagcagcaaggaaaggttttggattatgccctgacaccatgactctatcaacagatgtcccttcaggtaaaatttcaggagactataaggcttggctccaaagggttaaacacaaggcctgtatgcatccctgtgcatcctggcaggtttttttttttttttttttttttttgagccgcctgtttgcccaagtaactcccactctttcccttccccacaagctgctgctccactctatgtacacaacaaaaatatttgtcttttccaaagctgggggcactaaccaatgtctgtgaatttctttgtataataacataataatcaaatcacattaagtcagtgtcaagtgagacatgtgttttcaattttaaaacccacaagtgattatttattccttaatacttcatttgtacatttagtgagagaaataggaaagtcacacatacatagaatcgcttccaacctttgctatgaagttatttctctaggtgttttctagttattttacaagttgtctttcactattagcattacagtatttctcactctcttgttcactgataccaagtttaattttcagcctttacaactttattgatttttaaacactcgtatttatgaattacacggttagaaagaatgaataagaaatgtcctcttattggttttgttttactatactttttatgtggtaaataactcataatatgagatctaccatcttagcaaatttttaagtatatagtacagtcttgttaactgtaagtacaatgttgtacagccgacctctacaattttttcatcttgcatgactgaaactccataccccttgaacagtgatttcccatttccacttcccccagcccctagcaaccaccattctactttctgcatctatgagtttggctactttactataccttttttttaaagtaccaaaactttaaatcctttgggtgctgatacatcattttggatccctataccccagagaaaatagggtcctctgctagactgccttatgtctccactctttgccctttcctgtaaagagcaggatataatgagcagagcatcatcttcaaggtcagaaagacccaggttccatccctgctctgttacttatccattgcatgactttgggtaaattattaaacctttccaaactcatttcttcatctgtaagatgtacctattttaatatcaacttcacaatacctacttttatgaaaatcaattggatcacaaatgtaaattacctagtaggtgctcaatattttgattccatcaccccagctgcaaaccctagcctcgtatggattgaatacatggaataggagacccagtgtgtttgttctagatgaaatacatgagatatgtctttgggatccattcagacatgcaggtggacactgcagtagtcatctaaaacaattctttcttctctctgaactagttcaatgtgaaaatatatagctttccatgccctgttaatgtcttaatgaaacctgcttccttaagagtgtcctgcaccaagaatacagacatgattagtcctaaggtgccactacaatccatagagcgccgtgggcactaagagagaaatctcaatgcacaggtaaatttctcaagttctctgaggaactaaggatatttacacttaaagagttatattccaaccacatataaaaaacacataattaaatcacagaatccactccagtgaaatataattcaagcagcctttgtaacctataaagaaaaaggaattagcttccagtgctttccctttctaaagcataaagcataaagcagcatggcacatgtatacatatgtaactaacctgcacattgtgcacatgtaccctaaaacttaaagtataataataataatattaataataataaaacaagaaggggctgccaaaaaaaaaaagcataaaggttttctttctggaagtttttagagatcaaagtttctatctaggcctctaccaatgagtaaagttagtactaatctaccatcattctaaagatgcacttataatcatttaggaaaatccaacaaattcagaaaagaaatagaggttcaagttcttctacacaggggatcatccctgttatctgatgtgttagatgagtgaatcttgcttgttctggacaattacttcaattcaacaattacatggtagcacctatcatgagccagataatgtactacaatagacagaagaacagcttacacttcaataaatagtcatctcattccttcattccttctttcagtaaacaccttttcggtaagctaggcaccataataataataggtaagacatggtcctagcctaacagggtttacagcagcgtgcagcatctgccacatagcaagtgagctaagttactgcaatactaggaggagagctgaatgcctctgaccaggagcccaggaggaaatacttgaggtgggctgccgaaggacagatggcatttcaacaggtggggagaatattcaattgagaaggaatgtgggaatccagatagaaacagaaaactctgggggatgtggcataaaaacagcaaaagcagagatctgtttatctgcagggtacttttgggagataaaaatggaaaagtaagttggcctcatattgtggagggccacgaatgtcagaataaataatataaattaaggagacattgtgggggccattgaaggacttggagcagggggctgacatggtaggagttgtgcctgaggaacgaatccgttggtggtaggtgagatagattgaaagggatgactaaaggccctcagaggggttaatccaatatcctgggacagggagtaaactagcagagacactgaaaggagagaagcagttgtagtacgttatggcacacatctggaacttttgcagtcaaatttgacagtccaaacatatctcccagataaaagaccacacttgctttaaatgtatgctgagaactacagagttaatgcagcagtttttaacctctggagacttagaatcaactcaaagtttggtcacttcaatttgctcaccacaaaccgttgccctcaaaactctggatttgctgtaacatttcaaactctgagaagcggagggttcaataaaaccacattgcgcctggcatgtatttcttctttaggactgaggaaacttgatctgcttcttactaattcatttaaatttcattcaaactgggattttgaaaaacgtttcgattgcccagagaagcttaagagcttacttttaaagccttttttcccctccttacaaaaaggaaacaatagttttccaaccaaccctgaaccccggatgtcagagattcaacccattcgttgggatggagtttatggtaggcaaaaaaaaaaaaaaaaaaaaaaattgactaaaaccagcagattttgccaaaaatccgtgtgttgcatggttaaggagacaagcatttgctcctcttgaacacctacaagcgatgcagcaggggtgcagacagtcagctaggaaggagctcattctattccatgactcaaatcagccatgttggttttcccttcactgtcaagaacataaaggaaaaatggcaattgaaaaaaaaaataagcatgttaaaaaggagagtgagagaaacaatttcactctgccttaaagaagactttcctattcctccccctgctcctcccacttggtggcaatgttgaaacaaagctcttcttctagtgacagccatcaagaagtcgtgagtattttttgtacacagaagagctaatgacataaggctttaatacattctattcaagacctgagtttggagaacttaaaataacttttgagttcctttaagctcaaacagattttccaacttcaaattaaattttaagatgatggtttgctttattttggtttaggttttttctccctttcttacttttttcctctttttggtggttttattattgttgtagatgttttgttgtatgtgtttttgttttctaatagttacaactcatcttcttttctattaaaaactaagcctagcaaatgccctaaatgttaagaaatttgtttttatcttaaattgctcagaatttcaaagtcatttataatgactttgtcttaaaaatatgtccacccatgtgaggaaatctccacacttgatgatgttaagggccaaataatatatttggttgtcatcagtttctacccatcattttctgaccactgagaatagacacagtaagaaataaacaaatatggcctcttatgaccactggtgatttctgaaagactgggggagtcatagtattttattttaaaaggttttctggcagctattttatgaataaatgaaactttaatgtctagagatgctaaactgtgaaagggatgatttgaatactgaagtcattacaaccaagtctaagttattaaatttgctaaaagcacgtgaaagtgaatcgaagtgtttaatacattgaagggagcactggtctcatccagagaatgacatccttagcacctcgtcaaagtccgtactgtaagttctggaaatgactcaatattgttttctacacacaacctctttaaatttttttaatttcttaaagtagtctatataaaaattatttttacagggcaactgcatcttaggctaggttacttcaatcttaaaatcctcatgtatgctttcaagaaaactgtcatcctagacaacactaaccttttaattttacagggatcctgaaccctgaactagtagaatgtgtgaaagagtgaaagagctgtgctgtaaatctgctacttctgcttcaggacactgtcaaactaattaacagtttctcctgttttttaaagctgcatattgaaaactagaatttcaccctgctttctccagagttccgcattcttgaacttagatgagagcacacacatcaggaaagtaatttaattccatcaacatgtatttcacacctacaacctgcaggactttgtggaaattcaaagaaaatttaacagaaatctggtctccaaaaccttacagcataataagaaagtcagatatgtgaataagagtgaactttgcaaccacacgaggcacaactgagtgttacagcaaaagtcaaaacaagcaaaggacaaagagggtgactagggtcaataataattgtacattgaaaaaataactaaaagagtataactggattctttgtaacagaaaggatgaatggttgaaggtatggataccccattttccatgatgtcatattacacattgcatgcccgttatcaaaacacctcatgtaccccataaatatgtatatacctactatgtacccacaaaaattaaaaataaaacaattataagaagtgaaaataaaataaataatgaaaaaaaaaaaaagcaaaggacagtggcagtggcaagagggcctggaccctggaactccattttgaggttgactcagaaaatgattacaatgtgtatgtataagttttagcatctccacttaacaaattggcttattgttcaaaaagagcatttaacagtgatatttctgtaaatgaagagaatttattccaatttaatcaacaaattttttactgtttccattacatgtaagattattatacactagataccaggggtcagaaaggctgattaaatggtttctgactttggggtgtaatagttgttcaccaataactgtagtacaagacatatgaaaaatcctgtaacagttgggtgtagtggtacatatgtataatcccagctaccctggaggctgaggcaggaggactgtttttagggcaggagtttgaggttgtagtacactatgattgcacacctgtgaacagccaccacactccagcctgggcagcatagcaagactgtcacttaaaaaaaaaattcctataaaaggaagataaacaaagcctatgaatagccactaaccaagcaagaaattttattagaattactagctcaataattatcaaagtagggcttaataacacattattaagaggttcagttggactgatgctcgaaagtgctaatattaggtttatgtagttggatctccacgggtgcttaacagtcagctctgctcacttaaacacaaaggctttctttgttctcagtatcaccctagctacttctgcaccagttagtcactactcgacttctggaaacagttgacatagacctatttcagggaaccagatatacagttgacagaaacagccttataatatggatatatttacagctttcttaaatctcagatatttattctagatttaaggtttctcctggtaccaaaattaatcagcccctatacagagactattccataaagaaggtactcaaaaatgaaaataatttttattaacatatttttgcatttaagccaaccccaacttgtaaaatttaacaattactgtaccagcagtgccaatacaaactttgtattcctaaaattagcaccaaagtagtgcaaaaatgtgttaatatgtagatatctgtgatatttacaaaagaaaagtgaaaagaaaatgaatttcacagttcgggtcaatgctcacatggattaggcaatgaaacattctggaacacctttttataactattccaaatgagaatttggaaaccataaaacaataaaatccaaacaaaggtgcattaggataactgtaaatgcctttaagtaatgatttgtaaaattgtataagggtcttaaataaacctagcattttattaccaggcacactgttaacattccccagatttttacaagaggaatttagcgagctatctgtaagatttagcttagctaatcatttacgtttctacccagaaatacatatcaatacattatcaaagtaaatatggtagctatgcactgggagtccttttggaaacaaatatatcagatctttatcaataattgattaacacatttaaatacttcaaaaaccaggaccttgtactattatacagagggtgctttattcagattgttatatgaatttttttcctcccatcttcagcttcttatatcttcgtttttctttatctcacaaaacacaaattgctccctaaataacactcgataagttattaatgttagtttaaataaacttattttttcttggattgttgcacgttcttcccctttagaaagctaccttgaggattttttttctggttagctttatgtatgtcctcaaataagaaagttaagtgctattgttttcgcaaatggctatgtagcattggttctgaatcatttgcttgttaattaaaggataacccagatagaagttaaacggagtagtcatggcctgccttgctattttagaaaatattggccaccagttaacactgcaacttgtcagatatctacttgcccatctgagagggcaggtttgaaagtacacaaataaagaatacacatcatgatgaccaattcattcaaaaactttgaacatttttagggggaaagacattatatgctacatgttttaacctacaaggcatcatagaaaattaactatgaaaagatttgttggctagctttatttaattactggatttttttgttgttttttattatactttaagttttagggtacatgtgcacgatgtgcaggtttgttacatatgtatacatgtgccatgttggtgtgctgcacccattaactcatcatttaacattaggcatatctcctaatgctatccctcccccttcccccgacgccacaacaggccccagtgtgtgatgttcgccctcctgtgtccatgtgttctcattgttcaattcccacctatgagtgagaacatgcagtgtttggtcttttgtccttgcaatagtttgctgagaatgatggtttccagcttcatccatgtccctacaaaggacatgaactcatcactttttatggctgcatagtattccgtggtgtatatgtgccacattttcttaatccagtctatcattgttggacatttgggttggttccaagtctttgctattgtgaatagtgcctcagtaaacatacgtgtgcatgtgtctttagagcagcatgatttataatcctttgggtatatacccggtaatgggatggctgggtcaaatggtatttctagttctagatccttgaggaatcgccacactgacttccacaatggttgaactagtttacagtcccaccaacagtgtaaaagtgttcctatttctccacatcctctccagtacctgttgtttcctgactttttaactatcgccattctaactggtgtgagatggtatctcattgtggttttgatttgcatttctctgatggccagtgatgacgagcattttttcacgtgtcttttggctgcataaatgtcttcttttgagaagtgtctgttcatatccttcgcccacttgttgatggggttgtttgtttttttcttgtaaatttgttggagttcattgtagattctggatattagccctttgtcagatgagtagattgcaaaaattttctcccattctgtaggttgcctgttcactctgatggtagtttcttttgttgtgcagaagctctttagtttaattagatcccattggtcaattttggcttttgttgccattgcttttggtgttttagacatgaagttcttgcccatgcctatgtcctgaatggtaatgcctaggttttcttctagggtttttatggttttaggtctaacatttaagtctttaatccatcttgaattgatttttgtataaggtgtaaggaagggatccagtttcagctttctacatatggctagccagttttcccagtagcatttattaaatagggaatcgtttccccatttcttgtttttgtcaggtttgtcaaagaccagagagttgtagatacgcagcattatttctgagggctctgttctgttccattggtctgtatctctgttttggtaccagtaccatgctgttttggttactgtagccttgcagtatagtttgaagtcaggtagcatgatgcctccagctttgttcttttggcttaggattgacttggtaatgcaggctcttttttggttccatatgaactttaaagtagttttttccaattctatgaagaaagtcattggtagcttgatggcaatggcattgaatctataaattaccttggcagtatggccattttcacgatattgattcctcctacccttgagcatggaatgttcttccattgtttgtatcctcttttatttcattgagcagtggtttgtagttctccttgaagaggtccttcacatcccttgtaagttggattcctaggtattttgttctctttgaagcaattgtgaatgggagttcactcatgatttggctgtttgtctgttattggtgtataagaatgcttgtgatttttgctcattgattttgtatcctgagactttgctgaagttgcctatcagcttaaggagactttgggctgagacaatggggttttctagatatacaatcatgtcgtctgcaaacagggacaatttgacttcctcttttcctgattgaataccctttatttccttctcctgcctgattgtcctggccagaacttccaacactatgttgaataggagtggtgagagagggcatccctgtattgtgccagttttcaaagggaatgcttccagtttttgcccattcagtatgatattagctgtgggtttgtcatagatagctcttattattttgagatacgtcccatcagtacctaatttattgagagtttttagcatgaagggttgttgaattttgtcaaaggccttttctgcgtctattgagataatcatgtagtttttgtctttggttctgtttatatgctggattacctttattgatttgcgtatgttgaaccagccttgcatcccagggatgaagcccacttgatcatggtggataagctttttgatgtgctgctggattgggtttgccagtattttattgaggatacttgcattgatgttcatcaggaatattggtctaaaattctccttttttgttgtgtctctgccaggctttggtatcaggatgatgctggcctcataaaatgagttagggaggattccctctttttctattgattggaatagtttcagaaggaatggtaccagctcctccttgtacctgtggtagaatttggctgtgaatccatctggtcctggactttttttggtttgtaagctattaattattgcctcaatttcagatcctgttattggtctattcagagattcaacttcttcctggtttagtcttgagagggtgtatgtgtcgaggaatttatccatttcttctagattttctagtttatttgcgtacaggtgtttagtattctctgatggtagtttgtatttctgtgggatcggtgctgatatcccctttatcattttttgattgcgtctatttgattcttctctcttattcgtcttgcgagcagtctatcaattttgttgatcttttcaaaaaaccagcttctggattcattgattttttgaagggttttttgtatctgtttccttcagttctgctctgatcttagttatttcttgccttctgctagcttttgcgtgtgtttgctcttgcttctctagttcttttaattgtgatgttagggtatcagttttagatctttcctgctttctcttgtgggcatttagtgctataaatttccctctacacactgctttgactgtgtcccagagattctggtatgttgtgtctttgttctcactggtttcaaagaacatctttatttctgccttcatttcgttatgtacccagtagtcattcaggagcaggttgttcagtttccatgtagttgagcagtttggagtgagtttcttaatcctgagttctagtttgattgcactgtggtctgagagacagtttgttataatttctgttcttttacatttgctgaggagtgctttacttccaagtatgtggtgaattttggaataggtgtggtgtggtgctgagaagaatgtatattctgttgatttggggtggagagttctgtagatgtctattaggtcctcttggtgcagagctgagttcagttcctggatatccttgttaactttctgtctcgctgatctaatgttgacagtggggtgttaaagtctcccattattattgtgtgggagcctaagtctctttgtaggtcactaaggacttgctttatgaatctgggtgctcctgtattgggtgcatatatatttaggatagttagctcttcttgttgaattgatccctttaccattatgtaatggctttctttgtctcttttgatctttgctggtttaaagtcttttttatcagagactaggattgcaacccctgcctttttttgttttccattttcttggtagatcttcctccatccctttattttgagcctatgtgtgtctctgcacatgaatgggtttcctgaatacagcacactgataggtcttgactctttatccaatttgccagtctgtgtcttttaattggagcatttagcctatttacatttaaggttaatattgttatgtgtgaatttgatcctgtcattatgatgttagctggttattttgcccgttagttgatgcagtttcttcctaccctcaatgatctttacaatttggcatgtttttgcagtggctggtactggttgttcctttccatgtttagtgcttccttcaggagctcttttagggcaggcctggtggtgacaaaatctctcagcatttgcttgtctgtaaagtatttaattactggggttttttaaacaccatctgagtttatgtttcaaagactggcccaatatggtagctcacacttataatcccagtatttatggtaggcctaggcaggaggatcacttaagcccaggatcatcagccctggcaacacagtgatacccccatgtctattatattttttttatttaaaaaaaaaatgcaagacaggctagagtcaggggaatgaggcactagccttacttaaaatttaggggaataccaaataacttggtgatcacagtgtatcatatcttaatgtaatatttttaaaaatcaaaattaaaaccaaaaaaagtcatgagaaacaatatatcaaaaatttaaataaagatccaaagaggtctgcattctgtcatgttgctgaactaatgttactattattcatttgactctaggtgaagaaaaataggtaaggaatcatgctgttttcttctttgttgtaaagataaaaacagatctaaacttaatatctccagctcatggcatcattagtttagtaatattttagtcaaagttagtgaatagtaaccattatttcctatcatctacacttaggatatgtcacttaatttcaatgtcattatcttaactatgaatcttcctaaagtactacactacttggaaaactaaagggaagtttaagaagtaatccatcatttcaatttgctacatttgtggcatatttccatcattcagggctattttacttgcttctgagtttattatataaatataggtatactctcagctacataagacattttcttttagtattttgagatgggggaattttaaagaatatgaaaaaaaggaaaagatcatctatattttcttttagattttccttatacgtaacataggaataatttatttattgaataattgatttcattctatatagagctatcactacatttctttactttcctatgtagcaaaactccttaaaagagtggtctacacttgatattgtttcaaacttcttcttcacattttttctcttcttaaattttttatcataaaataacttcaatttatcaaaaatctgcaagaatactcatatactctttctctatatgcaccatttgttatattttgcaatctttgccttactgcacacatttttgcttaacactttattgtacatatgctactttatcactaaatatttcagcatgtattttctaagaatgaaggcattcttttgtaaccacacttcaattatcagacattcaaataatgtgtttggggtatttctggacaatcactgtgatgtcaacattcaagttttgaaaggcacatgtgaaatgagtattaaaatatttataaatactgtctcatgcataaatccatatccaaaattgtgctaataatgtcatttatgacattttttctgatacagaatccagttaagggtcatgcattgcatttagtgcactgtctctggtattcattattatgaaacaatacctaaggctgtctttgtctttcatgatattgacattttttaagagagcacaggctgattgttttgtgaagtgtccttcaacaattttttctaatgtttcctctttattagaatcagatgtgcatttggggcaggaacacaatatgtgtgaggttgtatcctcagtgcattacattaggaagagcatgatgtcagtttctggtggcattaactagggttacttagggaagatgatgccccctccacatttttccactaaaaactacccatttttttcttctccaattaataagtcttctgtgggtaaatgctttgatattgggtaattaccccattgctttttaaactttcatttaataattttagtatccattaatgattctggcctgaatcagtcattaccatatcggctgcaaaatggtaattttccagctctattatttcttctacatttatcagttggcacattctacaaggaagagatttcacttttccttatttatttacttatttaccttatcacctgtatgaactcattggttcttacttcagccaatggtttacaatccattctttcgttattcattttgagactcaaatttcccgtattttctcagagagatcccttgatgttgtcacttctgtcatttttaaatgattccatcattttttgagctcccccttattctctagtataacaaggtgctacagttcatctgatacattttccatccctgccctagaattggccatttcaccaagataaatctggttcctattagcaaaaagtcatatttaaaaaccagaatctgggtgctagaagtgctcgttgctacttctaggcacttctagagtgttgctgcttctaggcacacaatacaatgtgctcaagtactgtgaatagttcatggccaactctcagtcttcatggtacctgacccattagcagcatttaattttaatgatcgcatcttcctcccagcaatacaatcttcatgaagcttctaggaaatgatgctctcttggctttcctctgtccttatggaatacttcccagtcctctttaattttccctacttttctctaaacccatctaaagtcaaggtagagtctagaactcaggactttttgatccttttctcatctgtatctatacttactccctaggtaatgtcatctgacaactttcaagtttttatctcaagcccagtcttctccctcaagctctggattttatatccatttatttctacttagcaccttcacctgaatctctgatagatgtctaaatacaacatgtgtaaaactgaaccactccagacctggtccacctatagcctgcccttgaattatgcctttgcaagcataatgcagcctaaataacaaactgattttggtcactcactgccatcagggagcacccattgtttcctctgcctctgccatctgttgtgatttttgagttccacagaggaaagggggagatgggagaaggtaggacagaagcccaaattactttacatatgagccgtacatttcctactagactgttaaactgactctacattcaaaattggcagcagacgtcactaatgtggccttagagtgattcatataatttcagctgagataagaaatatcttgacagacattcaaataatgtgtttggggtatttctggacaatcactgtgatgtcaacactcaagttttgaaaggcacatgtgaaatgagtattaaaatatctctactggcaagattagatttttatggcaaccagtaagagagaatacaccattagaaagtaaacactctctgcttcttctcaggggcatccaggtcactttttgtgcaagattattgattcctttgccaattatgttcctggaatattagaaaccatttcctcatgtgtaaactggtgtatttacaaccctcctaattcaggtggaaaaattcatcatacaagtaacagtgtgggatgagaacttggcctaaatgtttgagtctcaattctgctgtagtagaaaaagaataactgctcatttcaaatgcaggcagaagtgtgtgaatttcacttagcataccagcatcattaacaagaaaatgaaattcttaattcatatatttcatggccttccaaaattacattctgaaacaccttgacattttagtaaatgtaatatataagaaatactagttaggccgggtgcagtggctctctcctataatcccagcactttgggaggctcaagacgagcctgggcaacatggcaaaaacttgtctccacaaaaaatataaatattagctaggcatggtggcacatgcctgtagtagcatctactcaggagggtgaggcgggaggatcgcttgagcccaggaggcagaggttgaagtgagccaagattgcaccactgcactccagactggatgacagtgtgagacccagtctcaaaaaataaataagtaaaaattaaaaaaaaaacaaatatcaggtatgttcatgaaacatttcaaatgtagagttcaatagaccatatttttaaaagtatagaaagcatcttttaaatttctcttcttttaatgcatttatttttacagagtggagaaaattggctctcttttaaatatataaatttcttgacttgatgactttccacaggtacaacatactcaggggagattggcaccaagaaaaaggtgaaaagactattaagctttcaaagatacttccatgcatcaaggctgcttcgtggaattataccacaagcccctctgcacctgctggatgaagactaccttggacaagcaagggtaagctgactgccccatctcctcacagcaggccagtggccaagagcatgtgcctcagctgatagcactggtgttggagtcctactctgcctctgaggagctctgtgaccctgagctcattattccatacatctggacttgttcctctaatagaaaatgaaattaacagaaacatcccccttatgaggtgcacgaagtaaaccatgtttatgtgctgaatatacccatgcctaacacatactagccattttcatttttataaaggtacaaaacatatttgcacgatactaagtaaagcaaaattttggactggcagattactaatgagggaataactaatttttttaatttattaaattagctcatcgtaacagctacactaaaaataacccaatcactatcaactcttaattctactttaggctattgatgcactgcattttccttttcataatttttaattcatttgaataaattttaataactctacaattactttagtaatacattgatctgactgagggtggaaattaatgtgtgaccatctgaaaaaagtgttcaggttatgtctaccccaaactgccaaaggaatttaaatttcagcaataaatgccccagtttaaacagaagtcgaagatagattttacagcttgcatgctaagtgatattatactatttatatactattatgaaatatataccactggcaaagcacagtgcctcatgcctgtaaatcccagtactttgagaggctgaggcagcaggattgcttaagctcaggaggttgaggctgcagtgaggtatgatgatgctactgtactccagcctggggtacagagtgagaccaggtctcaaaaagaaagaaggaaagaaaagaaaagaaagaaggaaaggaaagaaagaaggaaaggaaaaagaaggaaaggaaagggagagaggagggtgggagggagggagggaaggaaggaaggcaggcaggcaggcaggcaggcaggcaactaatatatgccgttagaaaatgaacagcaagtaatgtcaaaagagctaattcccaatattaggcctccaaaaggataaaaaaatcattcctaacagcttaaggtctgagattgggaaatttttgaatgtttgcttgtttgttgagaggagaacaagccttaacttccccagccctggaatgtcactgacagagcactcttggcggtgtctctcctctaagcagccacctctcaagaaaggtggtgtgagatgtggaaaggacagagggctggaagtccagctatcacaggccaagtcctagggctgtctttaatattgtgtgagttaggtaaaagtctcacgcaatctaaacctcaaaaataacctaatatcccttcatttttctgacgtgttgtgacggtctttttgtgtcacgctgaggcatttggattttattgtaggacatagggaaaccattcatttgcactagatggtagtatgctaggattttcaactttttaattgtttaatccactatatcccaaagtaaatgtttgagtctccagtgtgattcatttgcgtgctgttttttgtttgccttttcagcatatgctctccaaagtgggaatgtgggattttgacattttcttgtttgatcgcttgacaaatggtaagttacccaaaagaattctcactaaaatatacaccataaagtgggattaatttcatgaaaaacaaaatttatttttaaacactgctattcctttttccttctttccccattttcataaacctacagctactgaagaaggaccggggtaagggaaaatcaactcagatgaaaaataaggactgaatttgaccttagaatcttaggacagtttccttgtgaccttgatcatcccagaggaatttagaaaccacagattagattcttttcttgcagaatattttggccacatccagaagtaaggagttcattgttagttgatgaaaactagaaacaaaagcacatctgatcagccctgacttttacagggcagggtgcttatgcagttttattaagtgagctaaatctgccctgttgcgggtattgctcaaatgtgtttgacatcatcagaagaaaacaattgccgaggaaagaatataaaagcttaggctgcagccaaagggaaaagcaaacatcttcactggtgtcacttcttaagtttttgtgcctataaagaccttccttaagaaaataataaaaaacctattatatttttatctggccattaaacaaatgctgatgagctttgagagccaatgaaagacatcacatttaatgctgatgttgataggtctcttttaagtcattatatatggttttctcatcattctattacttggcaaacaatatgcagttgagagaaatatagcctaagaccacgaaatggacctttacagtgtggaaagaaaactagatcatggagagaagaatcccataattttgcatgtcattttgttcaaatcaactgagaaacgggtactggtaaactaagttacctgtgaacaaaagaacttgttcaatggtatttgtttaaaagagaatataatcatgaccctcatagacatatgaaatgaccacatgacagagattttctttaactcaattaattagagatccagtaagatgctacaactagttcaaaggagaagtcaaagagcctcacaagtatatgaagtatataccacacatatctaagaaatgctgaaattgatttataagtagccgcaaaatcgacagggggaaataaattgtatttccacctaactgatttcatttcctgtatgttttcttccagtagtttcatagtttcaggtctcatgtgtaagtcttaaattcatttagtgttgatttttgtatatggtgagagatgagggtctaatttaattcttctgcatgtggatatcccactttcccagcaccatttattgaagagactatcctttccccaatgtgtttttggtgcctttgtcaaacattagttggctgcagaagcatgaatttatttctgggttctctattctgttccattggcctcattgtctgtgcttttaaaattcaaaatcattattcctaaataaacagtatttcttgaatgcttacaagtcattacagcttcaattttgcatctctgctgacttgaattctaaaatagctcatagtcagatctcctcttgagtgattttccataggaagaagaataggctgtgactatcaagcaatatggtggtttagatacacctgtaaatggaatagtcaattggaagtgacttaaggaacatttcaagtggccataagctctgtctttaaaaaaatacacatatacacatgtgtgtgtgtgtgtatgtgtatgtatccctgacacctcagtaggcagattctttctaactcttaatgtcttcattgtctttggtgaagggagaaggtctgagctaattttacttgtacaataagaaaaaacctaggatcagatcatagtaataatatgctctatccttgaataatttcacttctaaaggggaaaaaatattctatcacagaaactttattacagagactttaggtcttattgtcaatcttgatattttagtggtgatcaaaattagttaaaggaagtgactgttttcctgcaggaaacagcctggtaacactgttgtgccacctcttcaatacccatggactcattcaccatttcaagttagatatggtgaccttacaccgatttttaggtaagtcctttttttcacatttctagccccattctcttgaataatggcaatgcataatactctttaatataaagtggtaagatccataggatgatagatgcatacctccaattaatcttaaatggtctcatcttacttttaaaatatggcttgttcatcctaaatcatttaaaaattgtttacttgattacagttgatcccaaacaacttgggggttaggggtgctaaccccctgtgtagtcaaaaaatctgtgtatagcttttgactctcaaaaacctaactactaatagcttactactgttgactggaagccttaccaataataaacagttaattaacacatactttttatgttctttgtattatgtattgtattcttataataaagtaagatagagaaaagaaaatgttcttttaaaaattacagggaatcctagcactttgggaggcgggcgtatcacaaggtcaggagttcgagaccagcctggccagcacagtgaaaccctgtctctactaaaaatacaaaaaaaaaattagccaggcttgttggcaggtgcctgtaatcccagctacttgggaggctgaggcagggagaatcacttgaacccgggaggtggaggttgcagtgagccgagattgcgccactgcactccagcctgggcgacagtgcaagactctgtcttaaaaataaataaataaataaataaatgacagggaagagaaaatgtatttcctattcatcaagtggatgtggatcatcataaagctcttcatccttgtcatcttcacactgagtaggctgaggaagaagaggaagaggaggggttggtcttcctgtctcagggtggccaaggcagaaagaatctgagtacaagtggactcacgtggtttaaacccatgttctcaagggtcaagtgtagttatgtttataataaattatatataaagaaaaccatcaggaacataccgttttcaaagaagatactggtctgctgacatattaacaaacctccagcagcatgcgcctcaaataattttaatcaggacatgagttgttgaaaattttcaataggctttttaaaaaataataataactaccatttatgtagtgcccactatgagcagagtacttttggcaagttatttctaaccatttaaacaaatctgcaagtaggatattattatcaccatttgtcccatagtttaggagaggtacaaagaggtttcattacttgcccaaggccaacagctagtaagtggcagaatatgagcccaagcctagctctgtcgacttgggagtccaccatctttccactgaactccatcattactctgtatcaaaaggcagcctcagttcttatttaaatgtgtgcatattcttatttatctgccagtgaatttttcaggggacatttctaatcaccaaatgactttcctctgccatttacatgtttctggcttctttttgacttgccacatggctgtactttgattttggaggctgacttaatgccatcagaagaaaataacaggcgtgacaataataatgggagccacaaccaggtttctatggtgcttacatctgctggaagctcttccaaggacctgcatatattaataaacacatttaatccttactccactttgagctcagagctattgctatccccattttacagaggaggaaactgagggaacttgcagttaagtaacttgcccaatacagacattaaagtgatagagggtttaaatataattgtcaaatatacctgctgaataaaaagtatgtgcaacacaacagaaatatttgaaaccagccacaacatggctaatttccagaaatccaaataacctcaagctgattgtatttcaattgattgagcaaagaaatggccatgcatagggccaaataattttgatttgtctgaaaagggagatacagatatagatactttggacacgtgtatctacccagaaaatatataaagaatacaaagacttgacaacagaattaacactgtaatccagagccagattcatagcaatgggctgagagaatctggccacacttgcaaatcaggacagtctatacacactgaatatattgcatcctaagcatcgccttggttatgagctgaagcaggttagcgtcttccataaaaagcaaaccaaaatcgccttgcctgtgtctctacttggttccaagagtactctaagccttacattagactgcaggagcatgaaagatgatactctaacttgaataaggtagaaataaatccaagaagtccacagttggatcaaggcaataccctgaatctctgccctaagaggcccggatttgctttcattggtatttgttattcaagtgttaaaccagtctttggatatcagtattctgatgctacttgggctctttgaaggaaacctcatttgtggcatattatttataaacagcagaaactcaattaaactatagtgtgagataaagttgtgcttttcctacatatttatttttcctatgaatgacagcctttatgaatgtcagaaaggggggatttatgaaggaggtgagaaatcccaacgcttcacaaatccttttggcctttctcccctctgctgtccatctctgctctctgctaaaaacagcctagcagaactgccaagcttgcaaaccacgtttatttttaaagcatctctatgctgcacattttggaggcactgatatttttaagcaaaaagcacccacagtaagtctaagctagtataccactcctatttgggttttagttgattgagttatctgtttacctcccagtcatggttcaagaagattaccacagccaaaacccgtatcacaatgctgttcacgcagccgacgtcacccaggccatgcactgctacctgaaagagccaaaggtaagacaagacccagctgcctcctcagccacctggaaatgccaaggaaactacctgctaggcccaagttacccaacatatctgagtaactatgttatgtgtcattaacaatgtgaacacaaattattgatattaaggttccagtatcagctctgaaaatcttacaatgttcacgaaaaaggatgagactcatctgaggttttctttcatattttgtatatttttgaggctgtatttggacaaaaaaaaaaaaaaaaacttcctctctatggcaatctacatcttagataccttcaacagtccatagaactagctccgtgccttagatctttgccacaaacagcaccagcattgaactttgttgggaaaagtctcctactgcatgagttttgatcaacaaatggaatcaaagctcctcaagtctgatgttctatttcctactgaaccaactggatatcccgattcagggcccaagaaaacttgtgaatgtcaaagacctcttagcaagcatgttctgatgcaataaaccaacccaaagttaaaaattaaaaacattgtaataatgctcaatactcaacattcaggcagtccttagactgaaagtctgttggtacaaggtacaggatgagttttcttaaggtttctggaaaattatattctaagactgttgagttcaatctgtttttaacatccccctacatatgcggatgctttgacagcaacaactaaatattcagatgtcaaacaggcactctcagggcaaagctgggtgggtgcctcatccctgcaacatatcccaaggacattaatggctctgttttttaatttccaagtagtctaaacattgtactatgtcatacagttgtatttttaaagttagtattggattcccgtgtctctgcttattttcctagctaaccagaaaatcacagattctcatacattctcccactatttattacacattgaaaaaaatgcagatcttgcaagtcggcccacttctttcaaagtggcaaagatatattagacagttgaaatacacaaatgatttttaagtaggtccatcatgtgaccaacttttttcttcatttacacatttctctaggagcaaggctgatttcaggccctgtcttctacctatccacccaacagcactgttgccaaccagcaatgccatcacaacaacaaaacaaaacagagtggaataggaagaaggggataccagaataatctacacaatttgagtttacccaatattttccacacagtcctttcctttttgcctgtgatttcatgtgactatcacctcatttaatgcttcaaagggtaaaggtctggctgataggcttaaacaatgccatgatgattcattgtgtttgatttagccaaaatgattatgagcctatttgtgaaaatacaccaatcaatctcccaatttgtttttttaacagcttgccagcttcctcacgcctctggacatcatgcttggactgctggctgcagcagcacacgatgtggaccacccaggggtgaaccagccatttttgataaaaactaaccaccatcttgcaaacctatatcaggtaagggagcccaacctggagccagccacagtatggtcaatcgccttaggcccggtgctcaagcctgaatcttgcccatggagaaagccttgttttagggtcctagaagttcaaagacgaatgaaacacaatctctgccctcaaaaatttgttcaaactcagatgctcaaaatgagcaaaatccaagcaaacttaatcccagtttgaaagaggtttgaggaattagctcatgtcgatacaattgttttttaaaatctctaaagagtaaatacttgtgctgttctttgtatccaaagaccttactagaataaagtgagccgctgtttttcttttcccatcagtaaatttattctctaattctctggccttgtccctgtaaggaaagagaagagagaatgatccaagtgtgtgtgtgtgtgtgtgtgtgtgtgtgtgtgtgtgtgttttcagaaacagggtcttgctttctcacccaggctggagtgcaatagtgcaatcatagctcactgcagcctggaattcctgagctcaaacaatccctccacctcagcctccctagtagctcagactacaggcacgtgccgccacacctgactaattctgtttttcatagggacaaggtctcactatgttgcccaggctagtctcgaactcctggcctcaagtgatcatcccacctcagcctaccaaaacactaggattactggcatgagccacctgggactacaggcatgagctaccatgcccgaccgagaaggatctctttgattatgactagggagaaattggggtataggtctagggaccacattcaggatactacctatatcagtcacctgttcaactggtcttaggatctcttggaggctatagatccatgtcttttaagatttagggacaaagttgaaggcaaagcaatatcacatagtaccatacagatatcttcagtgtcctatagctggctagaaaaaaagctgaaacttttcttagccaaattggtgcttgtcaatactgaaaataaaaattgtttaaaaggacttgaaaataataggaaacttcaattttgtcaaaaaattgtgatccctttatttttggctatataccatcactattaactatactaaggaacatcaaaaagatgaaaaaaatttcttttaaaaagttcagttcaacaaactgtttaactaacctttattcaacacttactatgacccaaacactgtgccaaatgcctttgatgtagtatattattaatcttcacaatagcccagtgaggtgagtactattatcatacctattttccacagaaagaagaattgatacttgggaaatttaagtgtttttcctgaaaataaacagataattaatagaactggaattagaactcaactttttggtttccagagccaaagtgcctaagaactatgcatcctgcctctgaaattcatattgatcacctaccgtgtaccagaaactaacagctctcctacaatgctcctattgtagtaaggcagacaagagggttctagaaagtgatcgaggcctggtgcagtggttcacacctgtaatctcagcactttgggaggctgaggcaggcggatcacttgaggtcagtagttggacagcctggccaacacggtgaaaccccgtctctactaaaaatacaaaaattagctgggcatcgtggcacatgcttgtaatcccagctacttgggaggctgagacaggagaatcacttgaaccctggaggcagaggttgaagtgagccaagatggcgccactgcactccagcctgggcaacagagggagactccgtctcaaagaaaaagcaaaggaaagaaaagataagtgatctaaagtgtgagaggcttgatagatactttaaagtatttagctacaaacaaatgtgatgggaagatgggggaaggagaaactgattctgcagatagttgcagcgggaaaaaaaagaacatagaaaaagaatgctataaactgggccttaaagtgtgagtaacattaatagctgagatgaaaagagggcattagagtcaggatgagctgatgtacttttgggattaaattccacaactccagaataactgaaaatggaatgtccggtggcctttagctgagtatggtcctgccatctacagctccgtctctgatcagtgtgttgtgcatatcatgattcagtgcatacgctctcttttgtagtaacttcagattagttgtacaggacatgacctggatcaagaaatctttactctgcattaagttatagatgaggaactggcagaaatcttcaagttttcagtatcaaaggaaaaaatcacgttacataatatataagctgagcaaacccattaacgacacatggtatttaaaaatctttggaaatgtagccttttagcctctcaagggcccgtttgctgagacacaaatgggctttcagggagctatttgcaaattttcataggatgtttgcatgcacattttcctagggagagggtctataagttactcttatcaaattttaaaataagttgcagattctgaaaatgttaagaaccatggtaatgaatgaaaaaaatatatgtacatatacgcacaaaaattatgcatgcgcacatgcacatttggtcaacaagaataccgtagagaggatgtgccaggaattatgtggcttggggaacaccctgtgcgtgactttgccacaatccagacttactataaatgagataaaatggaagagggcttcctctccctccttctgttggctgtgctcttttagttctaataaataagaggatcattgcataacatccagcctgttattctaccctgagataaagagagagcagggcagctggagtgaaggccaggtcagagggctccctcccatggtctgttctctgggccggactcactcgctgaactgccaaccaagttcaatatgaaggcactgaaggcacttctacttggcacctctctcatcagactggaagcagtccaggtgtccagggtggactgggaggaaaaacagcatgtgagaaatagaaccaagaatttactttctgttccttcaccctccaaccccacacatacaaatttaatggtgggcttagcaactgtgcaaagtaagcattaagttacatacaacgttggtgattataaattgtaaaggaataactttcagttcaattttaaattcaactcctttcaatagagtccaacaacatggactctatcatttactcatgacacagcatccttaaaataatgactttaaaaaattgtcccataaacatttattacactctataatgtcttgcagaagtttataatcagctttcttagtcatttatcacaagcacttagaggggggtcagcattttgaaccacttgttattcttaatgagtctgaatcacaaacatgaagttgacccagccaggaggaatattccttccacgtggtcctatgaccccaccccgtcctcaaacaaacatctgcaaagactaacataagctcacaatttctacagtatgaaaggtgtttttggaaagtagtgctaaaattataaaaggagcctcaaatttgactttctgttccataaagtttctgccatccccaatctgaaccccagccttccctgcagacagcaattggcatccccgctcccttctctcagctatcttaggcagatgcagaacaaacaagagaaagacatcttcaaacaggcattaaacaaggcagtgctatcgtttcttcaagggccaaggtcttgtttagggctcaaggagcttctattccactgagacctcctaggctggggctctcatagtgttaccaaggagaccattggcttgttagggaagaactcagcagcctccattatctcctaaagtcttgcaccttgtttcatgagcaattaaaaatgaaaacacagacaatgttcctgttgtttttctttctgtatcctccggatttaaaatgttcaattaactctggttcctggtaccccagattcagtttatcatcatcatttgaagtattttaatcaaagaaagtgtccaacaaatagaggaaaaaaacagtttaaatctgccttgtatgatagcaactctgctctgccagattctgtttgccaaataccctcttgacttaatttgaaaacctgtgttggtggtgtattaaagaccaggtgtgctattagcaaacaaagggattgttttgtttttagggtgaaaaatacttgataattcaggcacaaagggaaacgaaggttttgccttagaagttggaagggttttgtttttttcaaattaaagttctaataggttttgttgtcacaaaggtagatgcttactccttcaactttaagatgaagattactcttaaaactgcaagtaggaagggtttgagccactagaacacattgtcatcaggataatgtgaaattactgaaccgatacttcttaaagatagacagacatagtacctgatgtggtattctagaaccggttagggtttcaaaggatattaaatggtatcctctcaccacatgtttagatctccatgaccatttctgatgcttttcttctttttctcagtctacctttggttgatacgagtcactgagcctctgtgaaagatgagtctgtaggagtagagctgctttttgctagggaggatacagcattcttatctctggcaagtcactaagaaaccccagtgtatgcaagcctgctcgccaccctttgcctctcccctaggttcagggcacaccagcatcatcctctcatccacctactctcagccttgcctggtttcagccctttttccactatgaagacagaaagagtttcctgaaactcaaatctgaccacatcgattcctgcttaaaaccctaccatgcctcaggattgagtccaaatgacttaacacaatttaccatccccgttctgatctgacccctgccagtccttccagcctcacttcccaccattcccctcccaggcttctatgcattgaggctgaacttccagtttcccaaacatatcactcaattctttatccattcagcagatacatacggagtgctgaatacatgctaggtgcaggagtatagaagatgaacaaaacaaataaaaaagtctgcttttttctaagggaaacagaaaataagtaaaatatgtcctctattagaaagtgataattcatagataaaaacaaaacaagataaagatataaagtatccctcttgcttacagatcttcacacccatgctcttccttctgcctatttgaataaaatgtagtattccatggtatattttactcaaatataatatacaatagagtatgttgtctgtactctctaattcctctcttacttgctcatccttttgatctaaatttggacatatttccctcctgaaagtcttctttttctctaaaaatccatcttacaagcccctcctatgagattttccagtactctcttacttcccttatcacagtatgtgtcactcgaatcgctattgcctgattagatgtccacttcccagacagatagtacatttttggtcacctaactcattcactgtgatatcctcaataccgagaacagttctgatgtccagggaatatttaatagcttctcctgcttattattgcagtcttactaagaatacacagagagtacaccatgcagaaggagtagcaatgattaaaaattcttggaatgatcttctcattgcatcttggaattgacaaatgcaagctgatacatgttatttcttgagtcctttacctaatcttggttgtctgcaaatgagtagtgggagggaacccattgcagtaataattttaaaatttctttggattttacctaagtctaaggatttcactacacaagatcctaaatctggcttctatcagatattgaccaaaaattcaaataggactctttttcttttaacagttcttttaacttttgtagctactgaactttggggtttggggtatcaattactcagtacccattcaacaaatatttacctatttaagtggcactgtgccccataccatggcacaaagatgaatacaatacgctccctgccctcaatagcagtcacgtagggccacagttttcacacagggtatgtgtgcccatggggatatgtgaagactttccaaggggtacacaggcataaatagtgttaacagaatccatttttaggtccttaaactgacttgcctggaatgtgcttgcggggcagtgaagccagttccacttttccacttaactttcacagtcaccctgtttccactttacaaaagacagacacatgtctgactcattctaagttatatttcatactgacctaggtataaaaatagcaagcaactatattagtccatactcaacgctgctataaggacacatctgagactgggtaatttaaaaaggagagaggtttaattgactcacagttctgcagggctggggaggcctcaggaagcttacaatcatagcagaaggggaagcaaacacgtccttcttcacatggtgacaggaaggagaagtgctgagcaaaagggaaaaaaaacccttataaaaccatcagatgtaatgagaactcatgcactatcatgagaacagcatgggggaccacccccatgattcagttacctcccatcaggcccctcccatcacatgtagggcttatgggaactacaattcaagttgagaattggataggaacacagccacatatcattctgcccccagcccctcccaaatctcatgtcctcacatttcaaaacacagtcatgcctttccaacattccccaaagttttaactcattccagcattaacccaaaagtccaagtccatagtctcatctgagataaagcaagtcccttttacctaggagcctgtaaaataaaagcaagttagttacttcctagatacaatggggtcacaggcattgggtaaatacacccattccaaatgggagaaattggccaaaacaaaagggttacaggccccatgcaagtccaaaatccaatagggcagtcattaaaccttcaagttccaaaatgatctcctttgactctgtgtctcacatctaggtcacacctgatgctgggctcccatgccttgggcagctccattcctgtggccttgcagggtacaacccccttcccagctgctttcatgggatggcattgagtgtctgtggcttttccaggtacacaggtgcaagctataggtggatctaccattctggggtctggaagacagtggccctcttctcacagctccactagacagtgtaccagtggggactctgtgtgggagctccaatcctacatttctcttctgcactgccctagcagaggttttccatgagggttctgcccctacagaaactcatgcctggacatacaggcatttctgtacatcctttgaaatctaggtggaggttctcaaacctcaattcttgacttctgtgcacccacaaactcaacaccatgtggaagtcactaaggcttggggttgcaccttctgaagcaatggcctgagctacactttggccccttttagccacggctggagctgaaacagctgggatgcagggcgccatgtcccaaggctgcacagagctgggggccctaggccctggcccaggaaaccatttttacctccctaggcctccaggcctgtgatggttcgggctgccatggaggtcttagacatgccttggagacatttaccccattgtcttggtgattaacatttggcttgttacttatgcaaatttctgcagctggcttgaatttctccccagaaaatgggtttttcttttctattacatcatcagcctacacattttccaaacttttttgctctgcttccctttgaatgctttgccatttaggaatttcttctatcagataccctaaatcatctctctcaagttcaaagttccactgatctctagaacaggggcaaaatgccaccagtctctttgctaaagcatagcaagagtcacttttattccagttcccaacaagttcttcatctccatatgagagcacctaagcctagactttattgtccatatcactatcagcattttgggcaaagccatacaacaagtctctaggaagttccaaactttcccacatttcctgtcttcttctgagccctccaaactgttctaacatctgcctgttccccagttccaaagtcacttccacattttcaggtatctgtatggcagcacccaaatctcagtactgtattagtccattctcatgttgctataaggacataccccagactgggtaatttataaaggaaagaggtttaattgactcacagttctacagtgctggggaggcctcaggaaacttaccatcatagcagaaggagaggcaaacacatccttcttcacatggtggcaggaaggagaagtgccaagccaaggggataaagccccttataaagccatcagatctcatgagaactcactcactatcatgagaacaggttgggggaccaccaccatgattcaattacctctcaccgggtccctcctgtcacatgtatggattataggaactacaattcaagatgagatttggatggggacacagccaaaccatatcaagagcaattaaaaatattaaaggaagtctcctgtaactgagatatgataactcccccatccatctcataaacagacacacggccaataaattattattcttgagcataattattctttccaaatttgcaataaacatgtgttttgaccaatgagtttctggtaaggattatactataaactcaagctggaaaagtatttagtacttagagcctgatgttaggaaatttttttaaaatcaaatttcaatttagactttcattgcagagaaatatgataggatgacaataaaagattttcacatataaaattatattacattaaaataaaaatctacagagaaatagaatgaaaatacaaactctagagggaaaagaatttaatatttctgacttaaataataagttaaattattcatgtggatttttttcaatgggtgctgaatgggcattaaatgccattgttattaggttcccttagacacatttaatacccagaagagtgatatagtaagtttatattaaactaccaacattcactaatacactggacattacatcttttgtaaccacttatatttatgatttttgaaagtttagatatcaactctgaaaagtgtgaggaaagtatagtttttcaaaattcactgaatgagcagaccactgacatgtgggagcaaggccagtgaacaaagttgttataaggtgttgtagacactaggatagaagtttcctgtgggtgtagaaggtctggaagaggaagctgtcagttctgttgagagaaccaagaaaggctttccaagcagatcaatgatttgtctcagaaataagtagataaggtcgtgtgtgtgtgtatgtgtgtttccaactttattaaggagattctcctcactcttttttggagttatgtaatcctttattatcatttcctatgcccaaaccaagccttattataaatcaagacattgaaaaggccctctctcattagctctttcaggatgacatgggagacaaattaactttaaatcaacttggtgtatttgtgatttaaacaagatagaagtttattcctaaccttcataaaagttgggcagttggaagtccaaggaaggcacaatagctccacaaaacattagagacccaggattcttttagttctacaatctgtcatctcttggtagggcacttgtcctcctcacccaaggtatctgctggaggtcaaaccattcctgctgcattccagtgagaagatagaatggggaaaagcaaaagaaacctctctcagatgactccacctttggtttaaacaaccttcctggaaatcccacgcaacacttctgctaacatttagtagatcagaacttcatcaaatgatcccacctagttataaaggaggctgagaaatgctgtctttcttctgaatagccataagcccatttaaaaactgaggttctgtgagtaaggaagaaaggaaatcagaaaaatgggatgaacaaacaggagtctctgtcatacgtgatgcttaatcttaaacctaaggccatcaaaatgatgacttggtgtgatccttccctttatgtaacattcttcctctaacccaccaattactacagcacttacatgaccattgtgttttccttttattgttgttactgcttaggttatttgatatccccactgtgctgccatgtgtctaatggcacctcaaactccacatgtcccacactgaactctacacctgctccactgcagctttcccgtcacgattaatgggcactccatccttctgtgctcataccagaaacaatggaatcatcctgcagacccagaaatcaaccacctctgatgctacctcccccatccacatctccatcacctcttacctggatgagtgctattgtcccaaacagccttccacttgtatattagttccttctcacattgctataaagaaatacctgcaactggataatttataaagaggtttaattggcttattgttccacaagatgtacaggaagcatgatgctggcatctgcttggcttctggggagaccttaggaaatttacagtcatggcagatggcaaagagagtaggcacctcacacggctagagcaggagcaagagagagagtgagggcaaggtgctacacacttttaaacaagcagatctcataagaactcactaccacaagaacagcatcaaggggatggtgccaaatcattcatgagaaaccacactcataatccaatcccctcccaccaggcctcacctccactattggggattacaattgaacatgagatttggctggggacacagatacaaaccatttcaacctgtttctccccttacccctaccaaagtctgttgtcaacatacaccaaaagtggccttatttcaatgtaagtcataattttactcctcccaaacccttgcagtggctccttatttctctcaaagtaaaaaccaaaatgtttgtaattgccagaaggctgtgcctggtctggtgtctcatgacctcactgacttcatgtcttcatacttcccctctctcgctgtgcattgacctcacagctgttagctcctcccttgaggcctttgctccagctgttctctttagaatgctcttccccaggcaggaatgactaactccctcctgccttcaagcttttgctcaaatctcacatttccccatgactaccttaccagccctgactatatctgaaagtggggactctcagatgcccactattctgctcttctctccatgcatttactatcttctaacatgctatccaactctttccagcatgaaagtatttattatgtttattgtttattgcctgtctctccccatctgatatggtttggctgtgtccccacccaaatctcatcttaaattctgtgtcatgggggggaacagtgggaggtaactgaatcatgggggcaggtctttcccatgcccttcttgtgataataagtctcacaagatctgatggtttcataaaggggaggtttcctgcacaagctctctctcttcacctgctaccatccatgtaagatgtgacttgctcctccttgccttccaccatgattgtaaggcttccccagccatgtggaactgtaagtccattgaacctctttctttggtaaattgcccagtcttgggtatgtctttatcagtagcatgaaaacggactaatataccatctctaccaccactagtttcttgtctgttttgttcactgatgtattccaagcacatatcacagtgcctagaacatagtaagtgctcaatatatttgttgaatgaaatcaagtaatttgttctcttacttagcaaatttatagaaactctgtgtgaggcatagatttgagtggatacaaaaggaacaaggtcggctgcctactcatacctagcttataatgtagtaaaagataaagaactctaatagacatcaatgggactgagtttaataggacacaggacttccggaatgccagagaaaaattcaaaatgagtataagactcagaagaaagcacatttgcctttgcctggaatgattgcagatggccttgtggagtatttgaagtgaactttgaaagacaggggctggtttgataagtgaacatagagaaagaggtgtttgcagataataaaccaccttggaaggtattagggttagcaaaaggaaaggacaccatcatatattaataatttaatatttatgtaagttatagtcttgctaacatgatatttatttggactataagagctttgttggaaaggagaggtaaaggtattgagttatctcaaacatttaggaacaaagtgatatttgggacaatttcataaagcattgaacgtcaagctaaggaatttgacttaatttgtcttacagggatccgttgtggggtttggaacagggaactggggcaggtggatagcatgatcataccagaggccagcaagctccttgagagcagagattttgtcttatttatccttggatccccagtgcacaccacagaacctggcatattagtgggtgattgataaatatttttgtttcaaccagtgattagggagaatgtaaaaaattttgtcaaataaacaggtcacattctggcagctgtaaggaggatgacttgaagaaaaacaatgaaaaaggatggtaaaactctgaaatagggtggcttctatgaaaggaatgattgggcacaagtgacactatgtaggaaaaaccaaaaggattcagacactgattgcagatgagggttgagagtgaacaatgagttctcccccaagacgacctaaatctactcaatcattattcaaaccacaagatttttagcaatagaaccagattcagaggtaaatgcaagaattccaatgtgggtttagaaactaacatctaattagaacaatcaaccttagttttttttgagcaacaactataggtaattttggcaaattcagtataattccaggtatttatcagcttgtaaatttcaggcttctgatgcttggatgtggtagcacagagaaaattcttgggaggcagcaagggctgtatgcagagcttaggtttgagtctgcaggcataagtgaggccttcctcagctactcactagctctgtggcctccctaagaaacctgagttttttatgacctatgaattcatgatcaaaatagtggaggggtatgtgagatttagatgagggcatggaaagtgcctggcacagagttggtgtttgataaatgttagtctctcctctctatgctgttcttcttttcttagtctctggaatccaccatggtgcccctatttccaccgcggttctggccaaaacatgctttcatgcataatgactcttccacaaaggctgtgtttgcaatcatctactctattgtcttttaatctgtaccagcttccaagctaacccaattttctagcatttccctggtgctcatctccaaatacagtttcaccagcaaatttcctaagtatccttttattctgtcttcaggaagattattaatgaagatgttaagtcaggctggcatacatcaccatgcttaaggccatcttccagacatttttgttccactacatggggatatggtgtcatttatcattagatcttgttacagctttctggcccttgaaaaactcatgggagggcactcatgtccacatctacttgaattagtcttgcaagtgaacacgtgagcgactgaattaaatgtcatcacaggattgaacatctgttacatcacactaatctatcactcttctctcctaaatcttttcaatcaaaacaaattagtctagcatgtgattttcaatcagccttctcttttgttgtgtgtagctcatgcccaaaaggaaataatagaccagttgataaaagtaacaaaatttcattactgcttcaaacatggtcaagtggtaaataaagaataatgactccttggcaattagtgaaatgaatagcaataggacagactctacagaagatggatatgagactcagtcagcctcatgaaacttacctcataacaaagccttggagataaatgagtgtgtggttttagaatcaagaatagttttagaatcaagaatagttgcagctttcctgacttgtgttttcctaatggagcattgattgtgtcactaacaagagattctccttcctcatttgctgaaaaagttgaacatcgtatgggtggctcagatacagtaggggcataatataatgggatggtttttagccgcacttctgactccatttcgtcaccaaattattttccttgcttcttttcccttactttttgtttaattgtggtaaaatacatgtaatataaaatttaccatcctaaccattttgaagtgtacaattcagtggtattaagcacattcataatgtgcaatcatcaccactacccaactctagaactcttttcatcttgtaaaactaaaccctgtgcccattaaacaataattccctgttcctccctccccttagtccctggcaaccacccattctactttctgtctctaagactgtggctactctaggtacctcatacacatgaaattatacagtgtctctcactttttattgaatgttattgtcttagtccattttctgttgcttataacagaatacctgaaactgagtaatttacaaggaagcaaaatttatttcttacagttatggaagctatgaaagtcaagatagagggggctgtaccttggtgagagtcttcttactagcggaaactctgtacggagtcctgaggcatctcatggcatcagagagggggctgagcatgcacaagtgttagctcttctctcttcctctcttataaagctaccagtttatcttccatgataacccattaatccattaatccattaatagattactccacaatccaatcacctcttaaaggccccacctctcaatactgtcacattgtggattaagtttcaacgtgtgttttggaggggacattcaaaccatagcaactatccttttatatgttttgtaagattataactactcttgaaaccaaatggagactgaataaacaaaatattgcctgaggtcaagaggagttctattctgtatctatgaagtcaatggtacagacataatgtttcctaattagaacaaaacacaattgagtataagaaatattcatcatttaaatggttaattgttcagataaaaagcatattcaaaataacaggtcaagggagagattgaatataacacaggttccctcaaggacaggaatgttaagataattgagcaaggaagcaattgtagattccaactcacagatttaatcagctaaatgccaaggtgctggtcacaaagattaccggcagagctgcctgcaaggtaatggttctcaaaccttagtgtacatatgaatttattaccacaagcctatcaaatcagaaccataatgactgcgactcaggagtctgaatgtgtcaccagctaccctggtggtttgggcttaggaggttcttatcagcgttgagaaatgatggtcagtgcagtagattagaccagagattgtgaggcttgcctccattcagtttgctagtataatcttggattatgttatgactatagtgacatggtatccattactacctatttcactgcttcactttttttttattattattatactttaagttttagggtacatgtgcacaatgtgcaggttagttacatatgtatacatgtgccatgctggtgtgctgcacccattaactcgtcacttagcattaggtatatctcctaaagctatccctcccccctcccccgaccccacaacaggccctggtgtgtgatgttccccttcctgtgtccatgtgttctcattgttcaattcccacctatgagtgagaatatgcagtgtttggttttttgttcttgcgatagtttactgagaatgatgatttccaatttcacccatgtccctacaaaggacatgaactcatcattttttatggctgcatagtattccatggtgtatatgtgccacattttcttaatccagtctatcattgttggacatttgggttggttccaagtctttgctattgtgaatagtgctgctataaacatacgtgtgcatgtgtctttatagcagcatgatttgtagtcctttgggtacatacccagtaatgggatggctgtgtcaaatggtatttctagttctagatccttgaggaatcgccacactgacttccacaagggttgaactagtttacagtcccaccaacagtgtaaaagtgttcctatttctccacaccctctccagcacctgttgtttcctgactttttaatgattgccattctaactggtgtgagatggtatctcactgtggttttgatttgcatttctctgatggccagtgatggtgagcatttattcatgtgttttttggctgcataaatgtcttcctttgagacatgtctgttcatgtccttcgcccactttttaatggggttatttttttcttgtaaatttgtttgagttcattgtagattctggatattagccctttgtcagatgagtaggttttgaaaattttctcccattttgtaggttgcctgttcactctgatggtagtttcttttgctgtgcagaagctctttagtttaattagatcccatttgtcaattttggcttttgttgccattgcttttggtgttttagacatgaagtccttgcccatgcctatgtcctgaatggtattgcctaggttttcttctagggtttttatggttttaggtctaacgtttaagtctttaatccatcttgaattaatttttgtataaggtgtaaggaagggaaaaatcacaagcattcttatacaccaataacagacaaacagagagccaaatcttgagtgaactcccattcacaattgcttcaaagagaataaaatacctaggaatccaacttacaagggacgtgaaggacctcttcaaggagaactacaaaccactgctcaatgaaataaaagaggatacaaacaaatggaagaacattccatgctcatgggtaggaagaatcaatatcatgaaaatggccatactgcccaaggtaatttatagattcaatgccatccccatcaaactaccaatgactttcttcacagaattggaaaaaactactttaaagttcatatcgaaccaaaaagagcccgcattgccaagtcaatcctaagccaaaagaacaaagctggaggcatcatgctacctgacttcaaaatatactacaaggctacagtaaccaaaacagcatggtactggtaccaaaacagagatatagatcaatggaacagaacagagccctcagaaataacgccacatatctacaactatctgatctttgacaaacctgagaaaaacaagcaatggggaaaggattccctatttaataaatggtgctgggaaaactggctagccgtatgtagaaagctgtcactgcttcactttctttcttacatttagcgtggcctgactgagctattggaagaggggcagaggcaggagtgaatgatgctggaaatagatcctcattcaaccctgcagcagagggtgagccgcaggccctgctgttctcccatcatcatcacagccttgagactagacctcatggttgttttatcttttgggtttttttttcctggtctgcctctgggtcatcaagtacaaactggagggaaaatgctagcgtccgtggagctgtgttcagcatgaaagatcagtatctggcttccctctcatttataactcttattttctttctttctagaatatgtctgtgctggagaatcatcactggcgatctacaattggcatgcttcgagaatcaaggcttcttgctcatttgccaaaggaaatgacgtaagtgctgccgagatgaaacatactgatgtgcatgcagtaaagataagccactttctctagggcaggcttgggaccttttgcgtgaatggcagagagccccccggctgtacttcctgcctgcactgagctgtctatcagaggagatttggtgtcagttacagcaacccagaaaccaaaatctctctgtgtgctttgaaagggccttgcagagtcaatgacctacagtcaggaaaagggataataaacagctctcagttttcacacgcttcagtatcagtgctcgactttgccaaattcccgacctttagtttagcaaaattgtccttccatgtagctccaaatagtaaatatttatcaagaaggaacccaggcattctaaagctagagttcaaaaaagtatattttgtaattgctagtctcagcaaaaatagaagtcagaaattcttttctaaaatgtcttttgctaagtaattgaaatggccctagcatttttttcaccaattaatttaccttacgtctcttgcactttaaacagaaggggagacactcattttctggttcactatttgatagccatggtatgtaggctgagtcccactaaatctgaggccattgtttcattttcctggtggccccaagttagctgctaatactgtcttccaaggccaccattaattctgatctgtttaatgaacacgtgcagaacccaagaaacctaggtgaaaagagtacatagattgctgtacccttcttcaagacaagcacataacttgaggtcaaggaccaagtgctgtctcccaactgaacaagcagtatactctgggttgtggattgattcctggccctctgatttgatctcatgctgtttcctagcacccagaggaatgtgaaatttgcaggaggaatttcagttctgataaatttttactccctggaactaaataaaaccagttctcgtgcatggaataaaaacttatgcctcttactagaataataaattgcaaagattgaaagaattaaatgcaaaaagaactaaaaactagagcaaaagatcaagtgagaagaagaaaagaggaggtaaggagagagacaaggaagaaagaaggagaaggaaaggaagaatagtgaggacaggaaagaagaaaatgcaagggaaatgggaaaggactctggggtgaccagacttctcctggtcagtacctgcattcatcctgtttgttactcaatatttctttcctaaaatattcatttcacatctatggattccaatgaaaaatatatttttatgtgtctttgtggaacacagtgttataaattgtttttgccagaagaataattgttatacaataatatatgtgaaaactttattacaaaagccattatcataatcattattattccttctatcacaggtaaatgctttaatgtcatttttctgattttaaaagtagggcaggttaattgtagaaagtaaggaaaattcaggaaagtgttagtttgaactatgtgaagttgctctttttaagggccaaaaacaggagacttttagcactttcatatgtttcagcttgatatgaaagagaaaactgaaactgctagtaatcctgccatccaggtatagttcatgttaacctggctagtttattttcttttagtcttttttcaatacaaacttattttaacaaaatatgattatatttggggaacttattttacagtttacgtcctgaaattttttatttacaataaagacttttttccaaatcattaaacctgttaaattaaaatgattttgtcagccgtatggcattattgtataccactactgcctttcatttggaattcaaatggtttccaatatcccaaactttgatactctgttttctcaggaagtatttgtagataaaaattattggtcagaaaggtctgaacttttaagtttcttgtatattatccagttgttcttctaaaaggctgtatctacctgtattccaactgatggattgtaagaaaatgtaccaatgtaccatcaccaaaattgagtttatttttatctttttaaaatatttgcaaatttgacatatatgtatgtatatacacaaatatatatgtaaagtggttttcattaaattagtatgcatcctttacttacaaccaagattgaaatttttcgtatatttgctgatcattgctatttctttagagaacacatttttatatttggtctcttcctattttcctatcagtgttattcatttgttagaactctttgtatattaactacagtaaccatttgttatatgtggtaaatattacttgaagtttttagtttgccttttgattcatgaaacatttcacctaattaaaataattttattttccaattataaattcagtaagtattcatatcttcaaagaattcatataattttgagaagtataaataaaatatcaaccataatcccattatagatcttttcagtttattttctgtgaccatagagatcatgctttacatgctttgcattttgtttgtagcattaaaaagatgacatttttcaatgtcaattactatagctgtacattgtacttcataattgcacaatatgaatgtaccatggtttatttaactaatctcataaatttttgtgatttttttcccccacggaatgcttcattattgtaaataacaatagaatacgcatccttgtaacatatctttactaattatatctttactaacatgttaatgttaatttgtagatggactgttggtcagattatttatgttcatcaaatgctttttccactaattcctaaattaccctccagaaacattgtactaatttatactccctaacaaagaatgaggggaaccatttttctcgtactattgatagcattgggtattacaatctttcaataattcagcaaattacttagcagttacttttaatcctcaccaataaaaatgggagaaataatatcacattgtggttttaatttgctttctgctatactaagaatatttaatatcactttattttttgagatattttgtatttctcttgtgaattttctgttttatataattttttatgttcagaactggattaaagatgtagtatggcttaaaaacaaaaatgtttgtggtgaaactataaagcttttagaatatgatgtagggaaattttcatcagagttgggaaaagtttcttaaagaggaaaaaaaaaactagccataaataaaaagatttatagattaagctacattaaaaattaagacttcctggtggcactgtggttcatgcctgtaatcctagcactttgggaggtggagatgggaggatcacttgaggccaggagttcgagaccagcctggtcaacatagtgaaacccccatctctatttataaatttaaaaataaaattaaaatgataaaaattgagacttcatcaatagacatcataaagacagctaaaagacaaaccacagacacaatatttgcaacacgtagctgacaaaggaccagtatttaaaatatgcaaagaacctcagaaacaataagaaaaagacaacttaatagagtagacaaaaactagagtagaaacttcacaaaagaagtacaaatggccaataaagacatgaaaatatgtctagcctcattagtaaacaaaattcatattaaaactacagtgagttgcatgacatgcccatcaaactagcaaaaaatgtaaagggtaagaatgtagaacaatgagaatctcatctgctactgctgggagcaaaaatttataccatcattttgaaaataattggcattatctagtaaattgaagataaacataccctgtcatccaattattgcattcccaaatatagaccccagggagacttctgcacatgcgtaactagaggtatataagaatatttactgtggcttttttcatagtagccaaacactagaaaaaactcaagtgaccatgaaaagtagaatggataatggaatggatttcattatcaatggaattttatacagtggcatacactgtaacaaaaaaggatcaactatagcctacacatcatgaaggaatttcaaaaacataatgtttagctaaagaagtcagtcactgatacataccatataacttaaagttcaaaagcagttaaaattaagttgcgtggtttatagatgcactcacaggtggtaaaatcataagtaacaagaaaattgttaaaacaaagagcaagaaagtggttacttccaggcttgaaaggaaaggggatgtgatgagacaggcaacatgacctctggggtactggcaggcagtgttcttgacctgagtggtggttacaaggtgttcattttctatttattcattaaattatgtatgtattccctatgcattctacttaaatatatttcatttttaaaggtaaattttacaaatatttatggattgttcctttattactttttatatgtgagggaaagctccaacttgctttacctttctaagatatcccattttctctataccatttgttgactaatatatctcttgcccactggtttgtaacagtgccttaattagtttttgtgtttgaagttccagaatctcttcctggcctatgtattgtgttccgttgatggatctttccatcccatggtaccctttactattattgtcttcatttttattactattgttatgcccttttctctctccgtgcacatcttcatgtttgaactctaaaaacacaccgccaatctcatgattctacaagtcttttgtgtcctccctaaaacatgcatttctatttggctttcagattttttcacccatagaaatgtctacactaccacaactttgtttttcaaggtttcaatcactttatacagttcttggcatgcttcctgtccaaggacgcaactggtgggtgggagacttgctctcaggcagtgaaggactggcacattgtgtaataaacagaatcaaaggcagaaattagattacaagccacctgatgatgataaaatcaatcaccctcatcaaagggatttgctttgtgtgtgtttttctctttcattcttgtggatgcagacaggatattgaacagcagctgggctccttgatcttggcaacagacatcaacaggcagaatgaatttttgaccagattgaaagctcacctccacaataaagacttaagactggaggatgcacaggacaggcactttatgcttcaggtaaacgaaacaataaaagccattctttttgctgagtgaaaacactcagctgggctgggtgtggtggctcacatctgtagtcccagctacttgggaggctgaggcatggggatcacttgagtccatgagttcaaggctacagtgagctatgattgcaccactgcactccagcctgggtgacagagtgagatcctgtctctaaaaaaacacaaaacaacaacaacaaaaatccactcagggccatgatcaataattttagcacatttgagaaggagttatctccgatggtatgagttagagcagtgacctattttagtaaaggctttgaaatgcatgaaagttataagtggttcccaactaagcaaaatctgggttttaggtcaacaagttgataaagctcatttttcttgttcagtaactgatttatcacagagtaatcccgctggatgcagtaaaggtctaccgcatttggtggcttggtataaaatcagctactgcaatacccacacattttaaaagactgtttctgaaacacaaaagcatattatattaactatagtacatacaaaaattggaaaacaagtgacctccctttaccttaaacctatttaacctgctttatttccttttactacctaaacttctattttcatctgagtcttaaacatttttatctggtcttatttttaggcagcaaaaaataaaattgaactgaattgaattacattggatcaagtccattcctttctgttttactccacggcaagaagccatttgtgacatgacaaattacatcagggcagagtggatgtcacaaataaaaatgtgacctggtatccaaaccagaaccttctttcttgatcttccattttctcttgtcttccttcttttcttttggtgcaaaaaaacatagtgaatggacctagactcatctagatagatgagatggagctacacctggagattgaatggtgcagtcttttttgttccaggctttcatgctaccctttgtagctgtccaaagtgctccatctttgccaggaaataccctactcccagcagtagaactatgactccttccttatttctttccaaactaggcttctagtccctgaatgccacaaggatcaaccaggtgtctgatttgagtgactaaagccaagttgtgaatagctgaaagatttggccttgaacacttgcatttcgaaagaaagccttgctaactcaaatgcattccttaaggcagaggctggaggaggcttctctgacacttacctctacttcaacatgtactggtacccccactaaccaggaaataaatataaacaactaaatttgcaagttgatatgatccaagggtcttccagaccccaacattgctatctgttctgtgatgccaaggaattgggtcaaaccaatggacactgctggtctcttggtagcaggtggtggttaaaagagaatctgcttctctgggaattcaaggtaaccctcatagggtcatcattactgacaaaaagctggcatctcagatccagaccagtgtgaggcaagtcaagaaggccctaatttagctgtgcaaacaaagcattcctgggtttgatacgacttcattccctgactggcagtctgagcttacacatgcagacataaatgccaacacacataatttaagtgatgtatggggtttgtcagtgtggctactgtgagagtgaggtccagatgacctcacttgagcctggccagggaccatgcaacctccctgcatgcaggaggtggagctacagaaggagccaggccatggctttccttggcctgcccacccaagtctcttccagcaagctccatgtccttggactgtggctcttctctcctcactgctataaagccagcattctcaatgcaggctttgtatcatggtgaataagtgcagtttcctgaagaggcatgtcagggaggtactctgtaaatatgggcctggtactgtgagcagactgaacagcttgatagcctctttggcttggggtgcttttgcaactgaaagaacatcctctcacaatttctccccgccctgtcatttctcagatcgccttgaagtgtgctgacatttgcaatccttgtagaatctgggagatgagcaagcagtggagtgaaagggtctgtgaagaattctacaggcaaggttagtagtgatccaacagctgagatttcattgccctgtcttcttttaggcatttatcctaataaaacaggaaatggctgatctatcatgacatttgttctctcatcaactcttgttatcctaacctttctcttttactctcttggaactcatccaaccctttttcggaaaaagttaaaaataaataacattgacgtattgacttactacagaaacaggtagtaatgaggcaaaataaaaatgagcaaaagtgggacattgattataaatggctctcctctgtggatataagaatgtgtgggatagtttgattttgactttgaccttcattttaatgagctgagtgcagcctaaaggctaaatgtcatttgaggtcaatgttttccactctgacagaaggacttagactccttttgtattccttctccttgctttcttaaaaaaaaaaaaataatgaaattggacacagctgaccaaaaagtgagttcttcctttcaaatatagtttcaacagtgaggtagaaggattttgctgtgaaaagacaaatggccctgaattagggtataatttttaaaagattaacctcattcagaaataaagcaatgaattagcaagcaggatcttgatgttgggtggggtatcaacctttaaatacagccttgtttcttcaggctgggtttcaatgtgcaggatgtttgttcaggcatcaacagtgccctcatgctagtgacagaatcaggtttgagaggctgagaacaaataaagcttgaagtgtcccacataccagctctgtggggaggtcaaatagcaacagtgagccttttggagaaggcaccattgaaagatgtgtcaatgacatcgtgatggccccaaagacagaagaattgattgagctcatgtggggccagaagtctctactcactgtatctttctctcagaataaaagtgctcatgtaactcctacaattctgtatataatttcacttgaattgagtaaaagtggttagaaatcaaaatctcagctctagttgcccctaaataaaatctccaaggaaggtaagacaaaaggaaacatgatgaaattggagctagggggctttaaattagatataatcaatattttctttactgtttgatatgttgaatattgaaatagcatagtgagagaggggctaagatctctgtccttgcaaatcaaacaatgaaacagaggaaagagtctactctagcccacttggttttgactcaatcatgcccagcatgattaaagtacacaagtcagcatcgactgcagtgtaaaccttttattttctcatcttgcaccttatttggattctgagcaccttggggcaggaccatgtcacttatgtagatagtaaggcccatagtgccagtaaatcaaagttgtcaactaagtacagtaaatggtatcaaccaagaaatgtaacctataagatctcttttcttgggcctggtgcagtggctcatgcctgtaatcccagcactttgggaggcttaggcaggtggatcacctgaggtcaggaacttgaaaccagcctggccaaatggtgaaactcagtctctaatcaaaatacaaaaatcagccgggcgtggcggcacaacctgtagtcccagctactcgggaggctgaagcaaaagaattgcttgaacccaggaggcggaggttgcagtgagccaagatggtgccactacactccagcctgggcaacagagcaagactccgtctccaaaaaaaaaaaaaaaaaaacccttttctcaaaactgcttattgtcctagtaatatatgcatgcattataagatggaaaaacctagaacatttgtaacactgatctctaaaggcaggcttccatgtaccttcctctggcatgtttcctggcagaggaagaatagaaagtatatctagtcctttttatttaatagccttatggtctagtagaaattctgcttgttttaagagaagattataggctgggcatggtggctcacgcctgtaatcccaagactttgggaggccaaggcgggcggatcatgaggtcaggagatagagatcatcccggctaacacggtgaaaccccgtctctactaaaaatacaaaaaaaaattagccgggcatggtggcgggcacctgtagtcccagttacttgggaggctgaggcaggagaatggcatgaacccgggaggcagagcttgcagtgagccaaggtcacgccactgcactccagcctgggtgacagagcgagactctgtctcaaaaaaaaaaaaaaaaagaaaaagaaaaaaaaaagagtagattccctggtcatccaaactgcctgtcctccctactgaattattatttttttaattctataaggatgacttgtgtcattttgatttatctttcagtttaagatttggactcatctcagctcattccagcctgctcctggcaggcaggcttccacagactactaactgtcctggacaaagtacctttaatgtgattcatgatgttaagcaaaggaaaacccttaaaatcaaggttgaggacacagggggaaaggaaaacaagaacccatgaattagaaaaactgtttcattctcagaacagagattaggactccaaataccatatatctccctcctctccccgaaaaaaccttaaaaaattagactttgtcctcttgtaactacagattgatatcatctcaacctagtttcctagaacattttattgaacatctgcttccagccttgtctaatcctcaacaaaactgattatcctatgtgcaaagccccattggagatattatgaagaatgcaaagaactacaggtagtctatgctttgtactctcaaagtactaattagtatagtttccagaggaaagaaactatgcaaatttcccctttatattctctacattggttagcaaagtgtctgaaacataaacgtgttgaataagtgaatgaataaatgatctaattggaaaacctctaatgatagtggtcacaggagaagatccagtaccttgaaaggtagaatctgagctcagttttgagtgatgtgcattgttctatactttccaatatggtaacaagacacatgtgactggttaaatttaaattaaaagttaataaataaaaaatagagttcctcagtcttgatcatatttcaaggggctgccacagtgggcaacgtagagaacatctccatcattgcagcaaatcccattagagagcgctggtctagatagaatggaatggaaaccactgaggccgggatgcaccctgccttgtagaccagctcagtctcatagaagataagaacgagaggattgtggaggcccctgggcaccaggctacagtagagaacatgacaatgggagttatctcagaaagtgcatttagggcaatatatacagttgaagtggaagaagaattggaggaagaaaactagctaagaagcaacaactaagaataaattatcaacacaccagaccaggttaaagcagagtgaaagggggcaaaaaaagttcttctaagagggagaaacaggatgtgaaacaagatttaagaggaagaaacaagcagggacccttgcagggtccccagccaggctcagatgagatggagggtgaagggaagggagaagtcaaagacaactcctccaaagtgtcacacttgactgaaaaatcactattaacagaattacggaggtgaggagtgaaactggctgtaggagagtttgtcttaatattatatggtgttctggcctgccctcagaaggctatgatcatctggagttgaagagttagggtggccagactgccctgaaccactcaggttaagcccgaatgatttcctcacttcagccttgaggattaccaggcacaagagaccccaggaggcagactacagtcttaaaatgacagaactgcagcctctgtagggcttcagctcaatggttaagtgcagacactttgaagccaaacttcctatgctggaatccaggctccccactttactagtggtgtgacctactagcaacatactgggtcagcatttaaccctccctgtgtctcagtttcttcatctgtaaaatggggattataataaggttgttatttggattaaattaattaacatatgcctgggaggagggctcacacctgtaatcccaatgctttgggaggctgaagcaggaggattgcttgaagccaggagtttgagaccagcctaggcaacgtagagatcctatctctatttaaaaaaaaaatgaacaaaacaatattagccaagagtggtggtacatgcctgtagtcccagctactcaggaggctgaagcaggaggatcccttgagctcaagcgttcaagggtgcagtgagctatgatgacaccactgcactctagcctgggtgacagagtaagagcctgcctcttacaaaaaacaatgacaattttttattaacatatgtaaaatgcttagaacgtgcctggcacacggtagtcactatataaatgttgtgtttttatctcttctactttagcagagtagattcataactgaaccttccactcattaaccagattgttttttccaacacaaaaattactcaatttgttatgctcaggaaggactgatgaagtatttcaataaagttttgtacaatacatttctcctttgatcttctattaggttggtgcaaatgtaattgtgggttttgccacggaaagtaagggcaaaaaaaacacaattacatttgcaccagcctgatagctgaccaaggcattaaaaaaaaacattttgagctgggtgcagaggctcacacctgcaatcccaacagtttggaagatggaggcaggaggatagcttgagctcagaagattaagactagtctggacaacatagcgagacctcatctctactaaaaataaaaatttaaaaatatacattagccgggcatggtggtgcatgcctgtagtccaagctacttgggaggctaaagcagaagggttgtttgagcctaggagtttgaggctgcagtgagccaagatcatgccactgcactcaagcctgggtgacagaatgagactctgtctcaaaaagaaaaaaagaaataccattctgacctttatactttttttcaccttcagttgcattaggtaaaattctaaggaatcagaatgggagattctgattaattttgtggttacagagtgaggtgctactcagatgagatctttctagtccttctacctcatttcctacctacttactgttcctggttgtcctcaggtgaaacaagactagggtcaggcagcgtgaaagtagaggagggagaaggaaggacaaaacctgttttcttaacctgtcacttaaagccataacttttatttcatgtgaggaaatttctcatttgttttcttgtttttgtaggtcttgttcaaaagtttattctagtcccagagcacacctactagcaataagccattatgaacggtcattggcactgtggtattttaaatttttacggaaactactgaagtaaggcagagcaagtcggtgctgaagggtccctaagggataacaagtcaggaaacagtaattcccagaataacttcttccgacgaggtcattaaaattattaatactcattttataagttctagattaccaatgtgtttttttctttctttctttcttcttaggtgaacttgaacagaaatttgaactggaaatcagtcctctttgtaatcaacagaaagattccatccctagtatacaaattggtgagttgaattcagtgttaattccaaataaatacctttggcacatctcacaaaagtgacaaagaaaagatctaaacacagctttcaaaagatcagcactggaggtttaatcaacatccttttgaatggctgagtccaaattaatactttaatcatgactaatctactagctaattatctattgagaacttatgaaacctaggatcgaagctttgttataggcccttaactaacttgtattattttaatttggtagtttagaatagaatcaaaaccaaaaagagtagaagaaaagtaacaggaatcaactattcatactctctgcagggcttgaaggtgggaatcagcagaatctgcctttaggacccttccaatctgggtcgctacccctcatccctaatgctcgctcccaagaacccaatctctaggcctagagcttgtgagccatgctatcccgccgcatcctgggattcccagtttcactagtccttccttcaaaacttattttcaggttattctcctaaaaccacactctctttcaagtgtcactggtgggaaactgttgaagtatgatgccaatgcatccaaaataattattgctttatctaattaagttatgcattagaccaagaagcaaatcaaactgtggaaattttaggcactttagcggaggaaatatttttgcttcggtaagactttctatcacaccttaagacactccatcacgtccacccacctttaaagcaagtctttcttttccttgcagttcccttccattgaatccgaactcagaactttaactcttttccttataaactctgaccctgacatgtaccagttcatgttttatacctgttcctatagacttcagacagctgaacgcattcacagtgctacagacctttgcaaggctcaaagtttaatgctttgacattggtagggaagggggtatctgaaaacataagctgaaaattaagaaaaccagggtaagttagaattacataatatcactgaaggtcaaatctaatccaccgtcccacagtggagtcataaaatcatcctcaggaaataaggacaaaataaatctagctataaagatttcaatggaatatacaactattaaaataggtatgttcgattattgagcatttttttttttcaaattgtccttaatattgttatgtagttttcacaatcaaaccaattcctccaccccaaagctgggagctggggatggtggcatagaaaaaatacaacccagaaaagataatacagagttgctgggtggcttgcaagggaatatcagcaacagaaatgcagcctcagcctcctgggaggcaattctctcctatcaattgccttagccatggaggttctgcagacgtgattcaaaattagatgctaaccaaagtcctaatcctgaggctccctgtgttaagctccagctggaaagaaatttaccaggcaactgtcaatgacattttgaaccccccaaacaaaaggactcacgtggttcagcacacaacctggatttgtgagacagacctgatttcagagattctgtcctgttgttgtcatgagaacacacttattttgtcagatcatatgtcctgattttcagctcaggaaaatgtggttaccatagatacctcttttaaaaaggggctgggggttgagtgaatagggaaatcctatggatgctacaccagcacaccaataataaagagaaagggaaggtgattataaaacaatccttagtacatagatctttctctgcctttgctccacatctgccagctcgtagaggttgagggttgggaagtggggtggcagggacagatcaggctaagccagaaaaatccaaagagataaatggaacttggtggatgctacaggctctagcccccaagacaacaatttttccagtgggtcttcagtaatgcagctatttcctctgtccttattcctctctgactgaaatgttcccctgtttttcctgcctcaatccaaaatgagaattttctgagatctactctcaggcttagatctgatttttctttttaagtaatttatatctacccaagtggaactagggcttaatatctcctccccaactccacgcttccctctctctaccaaattctacattttaaaaggaagatattagccaggcggggtgactcatgcctataatcccagcactttgggaggttgaggcgggcaaatcccttgaggccaggaattcaagaccagcctggacaacaaggcaaaaccccatctccacaaaaaatacaaaaaaataaaattagctgggtgtggtggcatgtgcctgtagtcccagctactcagaaggctgaggcaggaggatcacctgagcccaaggggtcaaggctgcagtgagccatgatcatgctactgcactccagcctgggcgacagggtgagaccccatctgttaaaaaattaattaattaaaacaaaaaaaggtattaaatcaaatgaagctctaattggtgaaatctatagaaggctaaagagaaagaggttttccttcaatccttgtctactctgaggctaccattcctccctactcccccttcctccccgcaaccccccgtcaccccaccatccctccaggaggacaacagcccagcaatgtcagctcatcccttgagaaaagggaggttggcagaacacactgatggaacaggtttccaaatctgataatgtggaagccttccttaatttgaaaaactgcctcttggtgtctattcagactttaaaatcagtttcctacctagcataagaagtctttatatctgaaagtataaatacagatatagtgccagggtcacttaagaaaatgaggcttttctttttttcgagttggattttaaaatgttggatatttaacttttttatactgagataaacttgataaatattcacactttgaacttcagaatagtataattttgcaaagcgtctttttagatatctaatatctcatctctttgaaggtgaatgatattagaaattaaatatggagattgtggaggaggtaaagaaaattcaagaacagcaagcaaaacgtgaaatcctcatctgctgacaccctgtacaaccttaccaaaattccaaatacagacatcaagtcactggtttaactttccccctccagttcaggttctctactatgatctcacaatctttaaatcatatttcacataagatgagacaatgcagaaatgtacaataacagtgtgtattgctgcatccctcttccatctctatggcattctcaaaggccaagtgtctgctgtttgtccaacagaaagataatcaaacctatccttgtaattcacatgcctgtaaacatacaggattagtgttggaaatttttgttaggctgaaaaacatttgcctttctccccacagctacacatcaaggaaatacaacaaaacctaaataagtccaagtttgtgatgattccaacagttcttagactgaaagctatcttttcataataaacaagtcatgtttattatgaaaagcacattaacgcggcaaaacgcgattagaaagtaacaaatcttaaatatgtaagagaacagacatgcaaacaaagaagtctcatatcaaacaatcttatctagtcattaaagctggactttcatacaggtaaaaatctgtattgaaaatgagtgaactttaaacttagttatttaacataactgaaagcaagacagaactgtaaaatgatcatcttgaaaaagatatcccacagggtaagggtatgaattatgcagctgatctaaattcgtgaggtgtccttttctggtgtcatttgccctctccatcccttctccgcctgccttctttagctccagcatacacttttttttttttttttttttttttacttatatgtctttctccctctgcaagtaatagccagtattcactgggagtttactatgtgccaagagttttctaagcattgtacatacattaagtcatttaattgtcataacaaccctacgagtttagtattctctttagcgtctttttgcaagtgaggaaactgaggcacaaagccattcagggacaagcccaaagtgacacatcttatgctcctaggctgagggtagccaccattatcttgcttgcccttctggccccagagctggaaatttttattaggctgaaaacatttgccatttctcctcactggtacacatcaaggaaatacaataaaacctaagtaaggccgggcacagtggctcaggcccgtaatcccagcactttgggaggccgaggcgggcggatcacttgaggtcgggagttcaaggccaacctggccaacatggggaaaccccatctctactaaagatacaaaaattagccgggcgtggtgggtccccagtcatgctcgggagggagtaaggagcgggtttcaccacgctgtgatgctgagccttgacttgcctgttctaggtttcatgagctacatcgtggagccgctcttccgggaatgggcccatttcacgggtaacagcaccctgtcggagaacatgctgggccacctcgcacacaacaaggcccagtggaagagcctgttgcccaggcagcacagaagcaggggcagcagtggcagcgggcctgaccacgaccacgcaggccaagggactgagagcgaggagcaggaaggcgacagcccctaggggccggcccaacttagacgcggctctcctccggcagggcccccagagggcagaagcagcgtggaggggccctcacgcagcagcccagccactttctgagtgttgtcctggggctctttggaacgccatcttcctcccacttacctgcctcccctccttttcgcaaatgtacagaagccatttgtcacctcagcattcgctgccgaaatgagcaactccattcagtaacgtgggagctgatcccacgggcaggctctccctgctccaggagaagactaggaggaagaatgaggtgctcctgccgtgtccgccttgttccgggtcgcactggaacaggcagcaattcctaagtccggagcgtttgagcgtttgctatctgactgctgatctgcgtgacagaaacaccagcatatttgcaacgccaaggatattggtcttaagtgcaagagcacaaatgagagtgtgagagaaagtaccttctattttaataataatattattataaaaataataaatctttttaacttttatattttatgcactagacaatggatctgcaactttggactaaggtcattcaatgtacccaaacttgaacagggggttcattgttttgctattgactttattatgccactttggggcagagacttggcatcttcgcagtttaagaaaccacgtttcctatccaatccgaagggaaggtgctgtacagttcattcctttgcaccattagccaatctgtcttttatggattctgtgacatgtttatattcacccatgtacattttctgtaaataccaaacgctactgattcccatgccaaaatacatgagtattatgggattgctacctgtataaacaatggcactgtgaaaatactgttagttttaatacaagagaatgcatttgtaaatatggtatagagtttattaatatactattgtttgcagataaaggccttaactttaaacatctttcatcttctgaaagctgcccaacttaaatcctcatagatgtctttctcaactgccttcccatgttcatctgtatgttttccagctaaggtcacaaaccaaaactgaataaagtctttgaggaaacattttggaaacttcacatgcattccgcttgagaccatagtgtttaatctatggcaccaagcatcgtttcctcagattaatgagacccttcaacaagcctgaatcagtcacttttcaacacagcgatgttttaacaagccagctgctaagcttgtgtttatgtgactcttgttacagatcatggcggtgcgtcagcctcacaggagacatagcaggtctcagaaaccttctatgaccctgtcatctaaccatcagggaattccctgctcccatgccacacatttgtctattatggctatagtaccaaagtacttttggtgtttggttggtgtgcatttctttagtgtcgatagtaactggatttttctttttccttaatctcatgtgaacaactacccaactgtttagctgaagttcatattatttaagtaaagaaaatatttcagttttataacagactttaccttcctggcaggtcattgtagttaattatgtctctagcttggagtgtcaccttggaatttcgttgccattttttctcagacacctggccgtaaaatcagtttgttacagcattcttctctaggctgctaaacgctgtgcattgaaccttttctttagaagtttcagcgtaactaatgttagatgaaaattgttgatgcccctttctttttactttaaacaatgtggtagtgggagaatgactgtttctgccactatcaacctgatcctcatgctgatagaatgacagctagcacttatttcctaagtgcaactgttttagagatttttctcctaacatgcaaaggaaatactgattggcctataataagttcctatagggagactgaggcttgcagaattaaggttcaggggaaattttggaaagttggttgtattttcattgaagtaggagagattatcagatggtgctaaagaaagtgtgaagatcttatgaaataggtggatggtaagttgaaattattgatgtgggtaagaagggaggttgtggaaagttaacactagctttgtatttttttttctgtaaaactgtgaactgatatattttcctttatcactttagtattctgcagttctcagcttggtgaggctccaaaagagaatatgtcagatgtattcctacttccaaacctgtcttactttggtttgatggtacacatagggcttttgaacagtctatttttaatgtatatgaggtcaaatcaaggaaggcaattgctggggacaagaaaagtagaggtaggaaagaagacactattttagctaatggggtttcttgggactaaaaaatggctttgtttaaattataattatataataatttaaataaatgagattggaggtattcttagtagttctgagttgatagtttacattacaattaggtcttgaagaagagctcacagagaaaaaactaccaaatatccaatgggtaagcccatgatgtagccactagtacaataaaaatctgaagtaaaatgaggcataaacttgatgcagctgcctccctcattcaactggggagttcttgagttcctcatttgttggtaaaaagaaaaagaatgtgaaaatgtctctttttttcttggctattagtggctgtcttgcaatatttcaataggagtccaattactagttaaaacactggcggggtgcggtggctcacgcctgtaatcctagcactttgggaggccaagttgggcagatcacaagttcaagagatcgagaccattctggccaacatggtgaaaccccgtctctactaaaaatacaaaaattagctgggcatggcagtgcgtgcctgcaatcccagctactcaggaagctgaggcaggagaatcgcttgaacctgggaggtggaagttgtagtgaactgagatcgcaccactgcactccagcctggcaacagagctagaatccgtctcaaacaaacaaacaaaaaatcccacagctattggatcatccacagattttttctttacaatcttgttctccttgtccatggaccatcaatagttgacttgccaggtttaattctttcattgcttgagaagaaaggaatcaaaggactgtgtgtagtaagctgacggtaaagttaagattaaattaagacagagagagaatacatatcactgccaggcctgataggaaaaatctgctcttccttttaataacagtgatgaattgtcaggaccttatttaggaaaccctgacctacccataactccctgctaggctaagtagaaaccaggttatttctccctgcttatggctccccgcaaagggacttgcagcgtgtcctgcaactttgtcttcagatagtgcttcctacaaaactaggtcttgttttgtaatcttttctcgtgttgaatcagatctgcttacttatttaggtttggttatgagcttgtatctcactgtatttctcatgctttgttcttttaaacaaatcctttaaactgtgtcattttgtatacacatgtgaggtttgaaaaaaaaaaaaaaaaaaaaaagaactaccttgtgagttttgctcaaaatgtggcctaagtagccattggcatgtctagatgaacaaataaaaataaagataatttctttaaaatatcacaagatgaaaatatcctaattctcaccaggtaacatgttaccagtcaatgaattggattcaataaaaggatcccactgctcaggagaggaaacattcgaggaaagaacacagatgcaaacatggcccacgtgactcattccactttgggggctacagaaacgcccatgtccatgaaggtatcacctgctcgttagtgccaagttagggaaacagggccaccattcagctttacatttccccagagtcctgatatttttctgactcatatttgtcaaactcatatgaatgagaatgaggtacaatgttttaagttgtaaaaacatagccaactcagggcaagaattatttgtgaaaaatatggtctcacatttcaggattactggccatgaagaacaatagaacagttcaggcagaactgttctattctaaatctggtattctaaatccatctggaaatagagaagaagaagaacactgccaatgtttccaatgttttcttgtatctttatgtattctcccatattcattttattaagatctgtgttcagaatctctctgattccttaatgactcccatgtttgaatgcaaagctactttttcatttgtggatgttctatatcacaaagctaatatcaaaagagatgccccactagtatttcatgtaaaggtcaggcatggctttcaaatgtacacgggaacctagctgaaacactgtcaaataggccaagcctacatgagcacttagatttcaattaaagaaatacttattgaggagctactatgtgccagacattgtgctagatattgggatttaaaaagacccagtccctccaggagcattcagacttgtgccagagactggtgttacctgtgaacacttcttagagaatttgtgaacagctatgattgctcaaatgcagctaaagctccctcctggcatacaacacaatagaaagcagatacacttccaacacagaaatggatcccaatcctagttctgtcactaacttatcctctgactagacagaagttactaaaactgctataaaattatttcaagacagctgggtgtggtgtcttatgcctgtaatcccagcactttgggaggccaaggtgggggggtggatcatggcgtcaggagttcgagaccagcctggccaaaatggcgaaaccccatctctactaaaaatacaaaattagccaggcgtggtggtgggctcctgtaatcccagctacttgggaggctgaggcaggagaatcacttgaatctgggaggcagaggttgcagtgagccaagtttgcgccactgtactctagcctgggcaacagagcaagactccgtctcaaaaaaaaaaaaaattatttcaagacaatattttttatagtattgttgtggcaattaaaagagttggcatacaaaaaggcatcaagcctgctcgctggtacatggtagatgctcaatagatacaggttctcccttaaattacaaacaacttgccaaatagccgttcttgcatgaataagaatggggagagtttacagtggagaaaacacagtaaagagttggtttcacattaggaagtcaaacttctaattaagccagagagattattagaaaaaaaagtttaagttgtagctgataatggtttgaaaatgtaagattggcttgtcttagtcatctaagcaatgatgcatcattgattccattgcctgaaattcaaattctcatattaaatgtgctgatataatctttagtattttctttccttttaaggaagcagtgcagtagggttttaaaagcattgtcagggcacagtggctcacatctgtaattgtagcactttgggaggctgacgcaagaggattgcttgagtccaggaatttgagacctgcctgggcaacctagaccccatctctacaaaaaaaaatttaaaaataatacataaagtgttggctttggactgggtacagtggcttacccctgtatcttagcactttggtaggccaaggtgggaggatcacttgaggccaagagttcaagaccagcatgagcaacacagcaagacccctgtctcttgctgtaaaaagtaattaaaaaaaaaaatgtgggctttggagtcagaccagaatttaaatccctcattatcattaactacctaaccctaggcgatttatttaatctctctgagcctccatctcctcatgcataaaatgatagtaacatcaacctcctgggtggtcatgaggatgaaagtaaataacatacataaaatatatagcataatttctagcaaaaagggagtactcaaaacatgtaaattcctacatcacttaaggaaaaaatatctacaaagtggaagttaggatgcatctttcactttctatagattgtgccaatttttgtgcaaatgaaaacaagttgcattaagagagactgacagtgactctatctacaggtggccaggtcggtcataaaaataatccttgtattatggacaaaaaaactattttaaaatgtgattcaagaaaaaagacagtgacccagaggtgctaaggatacactggtaagaccaaggacaaataagggactatttcttgtggttttaaagtaaatattcctcagctcagcgagagagaactagtccatctggttaatctaagactttcctggagttgacaagaatacaaccctggctagacagaagcattagttaaataagcaaaacttgataacctgtcaagttttcatgaagtccattcaaatcctacaattcctatccatcagagttcctggtagccctttcccttgccacctcttcatcagatcctttctggccactgacaatagaggctgaagactcccaggcagtctctgcaagtaggtggccctgggcaacataggaagaccccatctctactaaacattttagaaaattagccaggcatgctggagcacagcggcggtcccagctacttgggaggctgaggtgggagaatcgcttcagaccaggagtacaaggctgcagtaatctatgattgtgccactgcactccagcctgggtgacaagactttgcctcaaaaatttaatttaatttaattttaaatttaaaactcaattctaaactaacattttccaaattgcataaaaatgtatgtgcccaaagatgtctgttaagtgttccctgaaaaaaaaaaatggattcgtagccaaagaattatgagaaacgatgaattaaagacataggttttgctcaaagatatttgttaagtgttctctgggggaaaaaatggcttcatagtcaacgaattttgagaaacaatggattaatacataagttttgctcaaagatgtttgttaagcgtttcctggaaaaaaaaaaaaaggcttcatagtcaaagaattttgagaaacaacggattaaatgcgtaggtgttgctcctgtctgcttcccagaactctcaagtgctaatggacatcttcaacaaggtgatacagatgacattgtctggatctagttttgatttcttatcacaaaaatcttccttaactattgcaacccaggatgatctatcattttatcattagtgattgttagctgttttgtattgtcattaatgatgtatgtgtatgtgttctgcccaatttgaggtataatttggcatggtggttaacttgcccaagtttgtggcttgactttaccacttagtaggtatctgaccttgggagagttttcaaactttctgtgcctcagtttcttcatctgtaaaatggtgataaaaatatgacctatttcataagggttttgaagattaagagttgaggcatggaaagccctttgaatgatgcctgccacagagaaagcactaagtattagcaaaaaccattatcttctcccttcatccccctcttgacttgacttgtaagctctttgataacagggataactacccttttaaaaactactcttggctgggcacagtggctcatgcctgtaatccaagtacttcgggaggccgaggcaggtggatcatgaggtcaggagttcaagaccagcctgaccaagatggtgaaaccccaactccactaaaaatacaaaaattagccaggcgtggtggtaggcacctgtaatcccagctacttgggaggctaaggcaggagaatggcttgaacccaggaggcagaggttccagtgagctgagaccacaccactgcattctagtctgggtgacagagcaaaactccgtctcaaaaatcaaacaaaaaaactattctccatagcgtagcacaggacatactgaataaatacgtcttaaatgaaagaacacatttttgactgacaaattggaaatcatatcagattatgttaacatttaaatccaaacaagtaaactccaattgtaacaatgaatgtcccaataatttgaatgcagatgctgttttttcaggtccacagttgctatctggtagacctttagcgttttgaagaacatagtttgggaaaacaatagttttttctcctctcagtttatgagcatactcttctgagtggtgacagtagaaataatttctctgaaggacttgatatccaaagatctctagatttttctctatccaactggaaaagaaacctacagaaacaccactaaattgcttcctttgcgggacaaatatgaatctattgtaatgcacaatccaagaggagacagagacaaatcccagtgctcatctttaaaaaagaacagggaatggcagatgagtctcttattttatccttgttaaaagcacttcagattacacataacctactcctactcttcttcccagtaagcaattatatgtgcattttttaagttgtcagcaaagtaagcctaatggaccaaaatgtatgatcagttttggggattatttatttcttccttcttcccactgctataatttactttgagcctttttttttttttaacaggagagtcagactttacatttcaatgaattcattttctcagaaacatctgtctcagtccacatttgaaaaaaaaaaacttctacatgaaaacaaaagacctatagtgttatagaacagcataagtgagaattatactctgtaattatcagttttcaagtattaaccttactgagatggagacaacaaaaagttctgatctttcaatacttgagttatgtaacgttctgaaatatttctgagatgcctctactgactttagttattaaaaatgtgttattttagaaatagcttatcaaaaaataccttttggcatctggagctttatcttaaactctaacgggaagcttgagattttttttctcttatcagtgtgggcttttttgttgtttgagaccgagtctcgttctgttgcccaggctggagtgcagtggtgcaatctcggctcactgcaacctcctcctcccgggttcaagtgattcccatgcctcagcctcctgagtagctgggattaggattacaggcacatgccaccatgcccagctaatttttgtatttttagtagagacgaggttttaccatgttagccaggctggtctcaaactcttgacctcaagtgatccaccctcctcagtctcctaaagtgctgggattacagacccgagccaccatgcccagcctccgtgtttttttagtagtaggtttccagttctcaagtatgatttagtgaatgttcagccccaccaccaacctgcagaaatgtcaggcagccaagcacaggccctatccccacagtgattgtctgatcactgcacagactgtgaagtccccaggtaccagtgccagcctctgaggaggataagatgagaagagacttcaacagggtgggcaggccacagtgcaagggctgcgtgccaggacctcattctgctgagagttggggtatgtacaagtgtcattgagaaaggcctaagattgtggagggaggtgggtaacctgacttgaatatctaaaaggtatgtgacatgtcaataaagcttcatttgggctagcaagcaaaccagaagcaattaactagacatcactgtttcttcttggtatagtcagagctaagtgttctaggaacacttaaacatttttgtacatattattggtaaaggctctgaccagatgtcaatgatattggcaaactttgtccatataaatcaggtgacttgtaagaagtgttcactgaggcttaattttatttcagaaacaacggcattactgcctagtttacaatttatagtgagcattagagctgatgtcatatgttccttgcactgtattgacacgtgtgaacagcaggcattggccagaaacaacgctggtgccatctatgttccatttgcagcaagagattactcaactcttactctaactcaaatgagactgtcaacgaagataggaggcatggaggagaactgacaagaggagaaagcttatattgattccgtatcctgtgagggaaaataagcatttaaggaagaataaccaagatgaatcaaattactcactgagtatgagttttctagggctgccctaacagattaccagagtggcttcaaatacaaaaatgtattctctcacagttctggaggctagaagtctgaaatcaaggtatcagcaggtctctgagctctctgaagctaccagggaagagtccttccttccttcttctagctcccagagctcaccagaaatccatgccggtccttgagtggtggcagcataactccaacctttgcctccatcatcacaggccttcgtccccatgggtctgttttcccttcttacatggacacgagccagggactagggcccaccctaatcccatatggcttcatcttaactaattacatctgcaaagactattgccaagtaaggtcatattctgaggttctggatggacagcaactatagggggcagtattcagctgaggacacctagacactcctcactcctcactcactcacccaatgctttacctcctacagacactcctcactcactcacctttacctcctacccatccccggtacacatacacacatacacacacacacacacacacacacacacacacacacacacagtccatacgcatctgtcagactctttaactttttatttggagataattgtagatttaaatgttctcgtaagaaataatacagagttggaacttgggggtaagtagtcaaaatgaaaataaaagaaatagagaagctgagcacagctgctgatgcctgtaatcccaatactttaggaggccgaggcaggaggatcacttgaggctaggagtttgagaccagcctgggcaacatagcaagacctcatctctattaaatttttttttaattagctgggtgtagtggcacacacctgtagtcccagctacttgggaggctgagatgggaggatcacttgagcccaaaggttgaggctgcagggagctgtttcacaccactgcactcctgcctggggcaagagagtgagaccctatctcaaaaaaaaaaaaaaaagaaagaaagaaagaaagaaatagagagatcctgtgaactcttcatccactttacccaattttccccatggtaacgtcttgtataactatattacaataactatattacaaccaggaaatcaacattgataaaaatccggtaacaattcagacttcagcagtgttacatgcatttgtgtgtgtttacatgtgtgtgtgtgtgtttttgtgtgtgtgtatcatatcttgcagatttcacctgattgacagcattgagatagagcgtttcaggtttgagatgtggttgtttttacatatttggaggtagagtgaggaagtgtggagaagtttcatggaaggaggaacaaaacacatctttgtttctctcttccatatcttttccttactaattcagatctggctcaggaaaaaaaacaactttttaaaatcccagtggcatcagccatctggagatgacagtatgattcttgttctacttttcagcttcttcactatttcatcattgatttcccagatactttcattcattcattcattcattcattatttgtgcaacaaatatacatgaagcaccaagtttgtgttaggtgttggggatgcaatgataaatgtcttctctgtgcttacaataaagtgagcaactagggagaattcataatagcaaatcataattagtgaaataacagaagtaggagcagatgggatcacatagaagggaaaccacatgacagggtatgagagaagtcaggaagccctcccagaggaagggatgcctaagtcaagatataaataaagagtgaggcaaggggaggaatctgggaagaactgttcctgaccaagggacaatagttgaagtgtttctgaggatgaaaaatattcccagaaacatcaagaaactgaaaaaaaaattagcgctcaagggagatatgtaggtaattgtgcagataataaggaaaagttaaaggtatagaaaatgataggtgcaccagttcctgataaggatgggactcagagagcaggaggctttggagatgaggtcgactcaccaccattgtgataggtgggaaggagatgacgccatgtgggacacaattatgttcatgcattttgtggcaaaagttgcagaattctcatctggtgacctctacattctgggtccagtacaatgcacaggcatctgctggagtgaagggggccaaaagtgggagaaaaaaagggaggaaatcaatagcatatctgtatatgagagagtgttgactcaagaaagaaagagcatagcagagagagttcactgaagaaacttcacatgatcacgtagagcaccaatgctagaagtcgggagttgatagccacaaccatcttaaacatcctgcagcatctccagcagctctcagcccccggatgaagatgagaaggtagaagtcagattcttccaaggtttggatctttcccagaggaaacaaagtagagcagcaaggcaagggagttgattgtagttgtaatttaagctgagtagaaaaggcagtaaagatgagaagctgttggataaaggcagaatcaagagatgaaagagccttagaagacatgctgagaagaaagaaccagagagagctggaaggttaggcttgtgtggtccaaggctgtggaaggtctgaatgtattattttagaggtgaagtggtttgatgtgaagacaggtccaggagctttgggggcagacagcttcaggagtatggagaagtttattatagttaaggaatcaaaagtacgtggtggtaggtgagttatccacttggttactgaagtcacacagggtattggcaggacttgaagtgagaagaagcctggagcttctccagtaactgaagtggaaagaatgaaatgtcaaatgatgccgcagacatgaggtggtagcacccacggcaagaaccccaagggagacgtgttctcagcttgagtcctcactgagggtagaggactaatggtctagaagtggcagtaacacgctgatcccatgtcccaacactgacatgaaggacagttggtaataagtagcctccatttgagaggcttccataaggcaatgttgtcaggggacagtttcagataaaggaatgtctagtgcatacagtggttgtaagagtgtttatatcctggtttgggagttccagggaaaataatagaagtgtcaggaaggaggattgtgacaggaaatggtaggatccaaatatcatggagcatgagaatgtgggagaagataagtgaaggaatcattcttcttaggtggtaaacaagggttacagggatgcgagttagggtggattaagctggccactagactgccaacagaattagtcccaccatcccccctgcagatgggaggaggctctcagggattcacatagccctgccagatgtacttccaagccttaaaagaaaggggaaactcttagctgttggaagaagtgacctttggtctggattgactgtggtggtcttggggaggttgtgggaatgaagtaacttccactcaggtacccagggagtggtgaaggacaccatacccagaaagcacgggctgggagtgggcgatgagtctaggctctttgagggaacagtgatgaccaggaaatactggcacacaacctgctctgcttctccctctgggactccaagctcagcattgctatggttagagattctgtgtgcaatctgcaggtggtaataaggatctgtagctagcatttttcaatctcccttcatactacatccccagaggtcaactgagagcccaggcagcttgctgttacagggagggccatcagacatgtcagttttctgaatgaaacagagtcctggtatgtttgaaaaacggaaagaaatctgtcttcaattaaccaaatggtcattcttcaataacggaaaagataaggtggcagcaaagaccagaagtgggcactaaaaggtatgtgatcttttttttcaggtgagacaagggtctatattcctatccattacaggtggggtcatttctatgactcaaatctgaacaaaatacaggtagcaatctaaattcaatcatgacaataaaatactttccattttccaagttcgatggtaatatttacatttaaaaaaataatttgttctttttttgtttttaaaaaagacaacatgctcaagattacacagaatctggaaaaaatcacttcatctgagagatcaactgatagtaaaaaaacaatgttcttacatagtaacccaattcaagaatatcaccatggagtctaacatggtgtttatttcaaagacaatattcaagtatgtcatttagaacactatgtctaatgtgtctgtaaagaagcaaacactgctatccaagatcattaggacaagtagcggcgccagctgggagaagaccccatgtgccattaataaggtgctgatgggaagggtgcctgacagggaaggccagccgaatgaaattaaaccaccacccccagaaatgcccccttgacaaaagagacaagaaagcgatggtggttggggacctaggtggtggaggtggtggtacaggagggggtgggggtggaagagttggctgggggtggtggaggaggttagggaggtggtgggggagggggagaagggcagtggcgaggcggtgatggtagaggaggtttccaaggcaggggagattatggtggaagagagggctgtggtggaagaggctatggagatccatatggaggaggaggaggtggtgaaggtaaataatttttaatgaacacttccaattacacattgaaaacccaggcaatccctttgttaaggtacaaatcaagcaacatctagattttaatccaagttcaaggtcctatgcccagttcccagacacactcagttgcgaaagaaaaagaggctcagaaaacagctagaaaaagaggttctactcaagctgtcttacatctgatcagagttggctcccaaaagcaatggagagcatgaagaaaaggagatcacttagacagcatcctctttatgcagtgatttcttattaacccttaatgtaagaaagagacaattcttagaattcaagaatttgctaaaaaacaaaataatttttccctgaaattaacctttgtgttttgaagcttccaagccttcctggaattattgtttattattccagagggttcagtgaagattttcaaatgcaactacatcctctgctaacgttatatgcagaggccttcttcctcctacaatgacagggtgtatcacgcagtcttctctagaagcaaaagtgcaatatgatattctactaccaacaacaaggaccaattcaaccagagtttagtttcaaaattaagactcactttacatgagatctactctcaacaaatatttaagtgtacactatattattgttgactgtaagtataaatgcctatttttcttataagaactctgacatctcaaagttgtaactattcattttccaatcacgtaaataacatgtagaggaaggatcgccatcaaagacttaacacaatttatggaagggagaatgagaaagagccatttcctaaaccaaactcaaagggattcaaggaccagggagtctgtagtcttgagtcaaataattaaaatgtgttcactaaggggactataatatcttatcaaaacataagaataattttgggctagatgcagtggttcacaactataatcctaatgctttgggaggctgagactaaaggattgcttgagtccaggagttcaagaccagcctgaccaacatagcaagatcctctctacaaaaaaatttaaaaatcagccaggcatggtggtgcatacctgcagttttagctacccaggaggccgaggcaggaggatcacttgagcccaggagtttgaggctgaagtgtgctatgatcacaccattgcactccaacctgggcaacggagagagaccctctgtgagggttatccgtgaggcttccacttaacagtagactattagtagttaagcttttggggagtcaaaaattatacatgaattttttactgtgtgtgggtggcaccccaacctccctgttgtccaaaagttaactgtattacaattcattctgccaacgcgagtctttctaaaatgctaatgtaattaacctttttgcagtcatttaatgattccccttgtggcttttcagatggattagtccattcttatgccgctaataaagacatacctgagaccgggtagtttataaaggaaagaggtttaatgcactcacagttccacatgaccggggaggcctcacaatcatggtggaaggtgaaggaagagcaaaggcaagaggcaatgtatgcaggggaactcccttttataaaaccatcagatctcatgaaacttattcactattatgagaacagcatgggaaaaacctacccccatgattcaattacctcccaccaggtcactcccaagacatgtggggattattacaattcaaggtgagattcaggtggggacacagagccaaaccatatcatcagaaatccagttccttgggttagaaccctaagtcttcataatctgaaccctgccaatctctatagccttctcttcatgcactttcccaccctcctcttgccagccaccccattcgcccagtcttaggctccaatcattctaaacacctgcaggtctccaaacccacctgctatttcccacctacgaggcttccaacaaaagctccctccactgggaatgctcatcctccaacccaccctttctgagttttccaattcaaataactacctctgtctgatgtggctatcctcctttagacaatcatagcgccctctatcagggcacttcctacctagtatcttcatcactgattatatgtatgtttctccgactggacttcgagcaacttgaaaatatccatttgctattttaaattcaacacctaaaaccacagtgcttaacaaaagtttgttgaataaaataatgaatgaataacccatgggcaaatgatttaatatatggaaaccagatgggctggctgtaaatggttttatgagctttattccttaaagttgatgtttttacattttagaagctagagaagtttccagagtagtgagaatgaaagcaaggttcgcactgatgaggaaaagtatgtgaggagacttaaaaatatctatgattaattaaaaaatttaattttttaaaaggccgagtgtggtggctcaaacctgtaatcctagcagtttgggaggccgaggtgggcctcggcccaagaggaagatcacttgagtccaagagttcaagaccagcctgggcaacatgatgaaaccctgtctctatcaaaaaaaaaaaaaaaaaaaaaagagagagagaaagaaaaaaaagaaaaaaaactatgattttataaatgtgttgtgagaaggatttttataaaatgctattaaactgtttgttgagtgaataaagcaagcattacttgactgcccttgggcctgtgtcactgaggaagtgagcacacaccaggaaatgtttggcagactaagaacaggacacaatcattgcctccagggggtactatctggttgagagacaagacatgcaggataacattcaatgaagacctcacagaagagaaacgtcttgccttggtctaagtcaaaaaagacttcgcagaggatgggggccttagaactgattttgagagaggatctgtgttagtctgttctcacactgctaataaagacatacccaagactgggtaatttaatttgtaaaataaaaaagttttaattgactcacagttccttatggctgaggaggcctcaggaaatttacaatcatggcggaagatgaaggggaagcaaacaccttcttcacaaggtagcgggaaagagaagtgtaaacaggagaaacgccaggcacttataaaaccatcagatctcatgagacttactcattatcacgagaacagcttggggggaaccgcccctatgattcaattacctctacctggtcctgcccttgacacgtgggaattatagggattacaattcaaggtgagatttggttggggacacagccaaatcatatcaacatctaaatgagagtgacagtgagtgagaaggaagaaatctacactaaagtgtaggaagtagacttaccacaagtaagggcaaaaacttgccattgtgttcacctggtggtgagtccatcaacaagatgaagctgaaagtaatcataaacaggactatagggtcagctgaaaagctacaacaggttcaaatacataggatcttgaatgcctaactaagggcaaagggcaaacgtcctcctagagtggtcagaacatgagggaagtggtgttgactatgtaattggcccgcaagcctactgaaagataaagaaaacagaaagcaatcaaaatatttttgttaccatagtaatacaagcactgaaaggggaaaattggaatgctccatcttcagggagacctcattgaatggaaagtctccacagctggtggaaggagggggccgtggggtgtgatccagccagactgcaaatctaagagtccagaacacagaccagcatggcagaggatggggtagcacaacagacgaaatatccaagcagaagaaatcctaaatctctgtgaggaaggtccatattgaaggaacacatttgtgtaaaagagacaatgcattatcacataatcaagaaaattagcctgagttggccgggcgtggtggctcacgcctgtactcccagcactttgggaggttgaggtggatgaatcacctgaggacaggaattcaagaccagcctgggcaacatggcgaaaccccgtgtctactaaaaatacaaaaattagccgggtatgatggtgtcacacgcctgtaatcccagctactcagaaggctgaggcaggagaatcacttgaacggggaaggcggaggttgcagtgaaccaagatcaagccactgaactccatccagcctgggtgacagagcaagactccatctcaaaaaaaaaaaaaagaaaagaaaagaaaatcagaccaagttagtaataatgatatttaggcaactatagaagttgccacataataataaagggggactttgatgccgtatcaggacaagatgtagagctgagctttccttaaacaacaatgacagcttcaccggggcaggatgagctgccagggcacctggtgaatacaaaaggcctgagaggtgaaaaggcaaatccagacactgaggctagaaactttagacaggtgcctccaatctaattatgcagaaagtttattccaaactgataaataagttcatatttctttatgtttgcttttttctgtttgtttttcacctacgttatttcactggcacctcaaaatgaccctgtcatgtagatggggtaggaattattatcctcattttgtgaccaaggaaactggaactcgacattagtaaatcacttgcccaagatcccacagagagtcaaacatggagctgggtcttgagttcttatttctagttcagctctccttccactataacaggaggcctctctgaattaaggctcaccctacagaaatagaaattaaggaagcgtgcggaattaggaggcatcctggcaaggctacagctccaggcccttgtgggagaagacaagtcagcaagcagcagatctatggggaaccctggaagaggatggcaacctcagtcaccaggtatcccttggggtgacagcaagtgggcagggtcaccaactcatcccagtttgcccaggtctgtccccattttcaaatcggaagtcccgtagcctgggagcttcatgctggtgatctcaagcaaaccaacatagtggttgggagccctgtgtaggagcagaagctctggaatcagaagcaaggcccagctttcagaccacgctgtcacaggacaatgcatgcagccttcagtgtgtcacttaactctctgagttgcagtatggagatggagtctctgagttgcagtatggagatggagtctctgagttgcagtatggagatggagtctctgagttgcagtatggagatggagtctctgagttgcagtatggagatggagtctctgagttgcagtatggagatggagttggtcattagcacctgccccttcttcacctcccgccatgatttagttgaacctttttaagttgcctctttttttagtcaaaaagtgtcacatatttgtatggttctacctaaaacttcatactgcaattaagaagacaaacgaggctgcgtttatgaaaatacttataaacagtaaagagcttataaatataagttattattatcattattacctaaaagaaccctttattatcaatagcaaagtggacacaggctggagtgaccatgagcttcactcagtgggaaagccttgttttgtaatatttttaagacttccaggaaaaatcactgttcttttacattttctcatgtaaaattttttcctgccccagattaatggtcattcagatgcctaccagatagacagcaaaccaagaaaaccatagggttctgacatctggttcgctcttaaaacaagaacacatttctaaggttgcactgtagatatgtatcacgatgggaataaatacatacattcatgaaaagactagtgaaaccaaaagcaaaccacaaaaatgaccctagttaggacactgggaaatatattgggaaatgtaatgacccccccccccatggaggccatgttaactttgtgttacccagaaaaatttgtgtaaataattgattgggaaatgtcatgatattgcctctgtctcacacacatctcagagagatgcagaaaaaagaagacagagctcctaccctcccattccttataaaagaaaaaggaaaaaacaaaaagcaaaagtcctacagaaagggcacaatctatcttctgagccagacatgagctcagacagggagagaaatttagagctgttgaaataaacccctttggccaaagacagctctgtgtatcttctctaacttcacagaacactcacaggctatctataatatgtatacagcttctagaaaatctgactgcttcaaacacacatgctgatttggtgacagtgacataaacaaaacatacatggaaaaatccagggccccaagcaagtagtcttggcagccgcgctgtaaggagggttcagctaacataccagtctcccaagtggaggacagcatggaccagattccaggggctcgtttctgctaattgaactatatttacatgactcgatgctgatgtgttaatttgcaaataatgcccttataacatggaaaatgttctccttataaccctgaaaatggtcatcgcctttagggaaagaaatttttctcaagctcagaaggaatggcacactatttttgacacattcagcactcatatagtagcttcgggagttaatattgctgccaaaacccctttagaacatggaaagtggggtctagagccaccgcctattagtcagtgagaagggacacctgctcctccctcccaacacttgtttgccagccacagtacattggcaaggtcctggcaactggaccttggctgtgggctctccataggacagggcaggcaactgcaatcaccccatgccccaaccccgcagacacacacacacacacacacacacacacacacacaaacctggaactatgcatattgctgcagtcttcataagaggcagtaaagaactccacctttagagaaaataaatagcataagtccaaggaggtctcaaattctggcagcaaatcagtggcaagttatacagggaagcaaagtgagaactgaccacaactgtcagttccatctgaaacccactgatctgaggtgcagggcctaaaatgtgaaactttctgaggcctcattgaggttttcagagagtctatccagaagtccaagcatacagtaatgatgatgaagaagaggagcaagagaaagaggggagagtaggtaacctttactaagcacttcccaaggcattgtttaggagctttgcatgtattaactgacaatgaccctatgcagtgagagctactattttttccagtttctacgttaaaaaaaaagttgagaaccaaagggttaaatcattgtcagggtccatgaaaccaggccagctgggtccagagcctgacaatgttgtatggtcattcaaaggctcctagaagagtcccctctacttgaatacctcgaagcaggcaactctgcatccccagccagccctgccatcaacgtcatcagtgtgaatgtgcgcaactgcacacattctagccacggttgcacctctgggaatttaagatacacatgtgcatgtaggcagttatttgttggtgcatggttatagttcatacagaaaataatccgcatttccatcaacagataactagttaaattcattgccacgtggccacacaggatactagtctataaagctggcttctcccttccactccctgcaaccctggaggcacgtggcttcatcagtggatagcactgtgatgggaagaaaactgtgccctttcctccaagtggaagcagggcacttgtactgcaagccgtgcagccccatagcctcgcaatgaattaccatgcagcagcaataaaaaagaaagtggtgcgcacacatccacgcacagagtttgcgcagaccatctctggaaggacctgtgggaaactgatgaccgcatttgcctctgaagaggagacctggagaactgggggtgggaaggtgtactttttacttataagtctctttgttgtgtttgcattttacatgtatgtgtaaaccaagcataccttttaagaaagactaaaatttcaagttaaaaattcctagcctgggccgcatgacaaaatcccttccctacaaaaaaatacaaaaaattagccaggcatgtacctgtagtcccagctgcttgggaggctgaggtgacaggacaggcttgagcccaggaggtcagggcagcagcaagctgagatcataccactgcactccagcctgggcaacaaagtgagaccctgtctcaaaaaaaatacaaaaaataaatttaagaaaaatttgaataaaccagcaaaaaataaaatattcattaataatcagtcacaagcaaaaaattagaaaaggtaaaacaaaaaaaactaagtgtccaacaatttgggaaatggaatacaaaaattagctgggtatggtggcatatgcctgtaatcccagctactcaggaggctgaggcagcggaatggcttaaacccaagaggcggaggttgcagtgagccgagattgcaccactgcactccagcctgggcgacagagcgagactccatctcaaaaaaaaaaaaaaaaaaaaaaattggggaaatggataagaacataagaggatatgtcttcagtgcaatatcatgtcatcattaaaagttggggaagctatgtagcaacaagggacatgtttagattacaatgtcagtgaaagagcagaatgccaaactgtatgttccatgtgattacaatcacgataatatgaagaaaattgtcttctcttagcagctagaataagtatttcttctaaaggtggggatagggctgagtgagctgagatcgtaccactgcactccagcctgagcgacagagtaagaccttgtcacaagaaaaaaaaaaaaaaagaggcaataagaagcaaatatgttccagctctaaaaggcagttggaaatcttgcagaagacagtgacagcaaagattagtaatgaaacctccacgtttatcagatcctcagggtgcttaggttttttctgccaccatgtccaagcccctcactcctgggatcaggtaaaagtgaaaaagcagcatgagctgcaggagagagggatggataggcagcaggaggaggaaggagttattttttatttcctcgtaggacggagtctcactctatcacccgggctggagtgcaatggtgcaatcttggctcactgcaacctccgcctcccaggttctaatgattctcttgcctcagcctcccgagtagctgggattacaggtgtgtgccaccacaccaggctaatttttgtatttttagtagagacagggtatcaccatgttggccaggctggtctcaaactcctgacctcaggtgatccactcacctcggccttccaaagtgctgggattacaggtgggagccaccgcccccggcagactggaaggagcattttggaaaacaccttaccctaccaatgcatctcaaatagatagctgatcctgatggagaaaataaggctcaaaaacggaaataacaggtctttctcgattatattcgttctgtagagtatataactagacagtcataaggctgcttacctcaaacagcacatgtgatagctaagtaggtagataacaaagagcatgcagtattttataaaccacagttcaatcctttctcctctgctcttctcccccactcctgttcctccttcatccttccgcccacagaatgtaggattcacagtgaaccactgagcctcaagcctgatacttgaacagatcacaactttccacatcacttacgcctcctaagcctcagaatctccatgaataagatgggaacagtaccaatattcagcttttgaggttatcttgagcattaaatgagatcatggatgtgaaaggccgctggaattttaaagcattctataacattattttatcaggggcaaaaaagcttatcctgtttcagaaaatgcagaaaaatatccccaagaaatatgatggctaaaatacacaattttgggataccacataattttataacattagaaattcaaatgttaataaacttaaaactatatattaccatcttgtttttattttattcccatatgtacttataaatagaatctaacttaaagaaaaataggctaatttgactcctcttttactttaattaaggcctcttagaagtaataataaataaataaataaataaataaataaataaataaataaataaataaaatatctttaaaagagaggttgttgctttaaaaaagggacgatgttatttccttgaagtcacctttcaaaatgcagcaacaaagtaggcttcaaattaaattgagtggaaaactcagcgatagcgtcctaaaaattccacgcaccttaatcagaatatttccctttgtttttttatttttctaggtaaaaatattcttttttttttttttagacccaggttggagtacagtggtgggatctcagctcactacaacctccacctcctgggttcaagcaattctcctgcttcagcctcccgagtaactgggattgcaggcacctgccaccacacccggctaatttttgtatttttagtagagacgggggtttcaccatgttggccaggctggtctcgaactcctgacctcaggtgatccacccacctcggcctcccaaagtgctgggattacagtcgtgagccactgtgcccagcaaaaatattctttctaagtttacctttctttttcatcatattgaatataagcatattcatgatattaattggtaaactgctgtgcattatctttactattattactataaataaattggtgttaatcaattgtaagtgaatattctaaatgaaattcaatatctaaaccaggtcacagagccatgaggtcatcgccaaagcccctctggtagtggtccacagtcataatcccaatcattctgcccatctcctctacccagcacatatttagagctgttggacagaaaggacctccaagggaggccatggcagggagctcatggccttacaatgcatacaactccaggctgaacagctcctggtcttagaaggccctcttgactctgagcctctatctaccatcctttgacttccagccatgaacctagagcttccatcttgagcaacacataaaatcagtccccctccatgtgaagagaactaccatgttccccatcagtatcctcttccaaattaaatacatcaaattgcattaactcctccttataaaacaggatatcctgactccttcgccatcctggtgaaacttctctggatacaaacttctctgcatcttcccaaatggatatactattccaaacatcctctaaattattctgtgtacaatggaattcactcctgttatgaatgaatgttacctatataattgtaacataaatttgcatgcattgtattgtttgcttgttttgagaagaggtgtttgttttggaatctttatctcattccaggcttatgttgagcttggtgccttatagttggaattagcatgattatatgaataaatttgtctttaaaatgttcaggaaatatcttaacatttttacttaaattcagcattcttacattcctcaaggtcaaagagaaaagaactacataggtcttaatactaagtattttcagaaaggatgccacaaatctctataaagagtaagggacttctgaaaaatgatgcgtagtcaaagtaaagattatttttcatcttcaaaatatatactagctaagtgtcttgaagggggacattataagaaaatagactgactaggtcctgtaccaactggtgatatctcaaataagaaaggttttagcaaaacatgtgataatcataagctaatctaagcaagagatgcagttggggtgagctttaaaagtgttttattctctctctagcatggtacctggaagacagtaagcattttggaatcaggccttgtttcaatgccagagacacacctgtgaataaagcagacacaattctctatctacacacagcttacacctgcacacataagtatgtatatggtgatggtaagtgtctgtcttagtccattctcacactgctataaggacatacctgagactgggtaatttataaagcgaagaggtttaattgacccactgttctgcatggctgggaggcctcaggtaacttacaatcatggtggaaggggaagtaaacacttccttcttcacagggtggcaggagagagaagtgacagcaaaggggagaaaaagccccctataaaatcatcagatcttgtgagaattcattcattatcatgagaacagcatgagggtaaccaccccatgattcaattacctcccaccaggtccctcccgtgacatgtgggcattatgggaactataattcaagatgagatttgggtggggatacagccaaaccagatcagtgtcaatgaattcataaaagcaaaattcagaaattcatgttccccctcattttccatcaaagagaacaaaccaagactaggcatggtggctcccacctctaatcccaacactttgggaggctgagatgggaggatcacttgaggccaggaatttgagaccagcctggtcagaagagcaagacctgtctctacaaaaataataaattagccaggcatagtggtgcacacctgtagtgccagctacgcagaaggctaaggcaggaggattggttgagtcctggagttcaaggctgcaatgagccatgattgtaccactgcactccagcctgagtgacagagcaagaccctctctctaaaaaaaaaaaaaaaaaaagtataattatactttttttcaggcacaatgctgaaatagaaatgtttcatggttcattgtcttgagggatcattgatgttctatgaattaattgggcaagagaaaatatttcaggcttcaaaataaaataaagaataaacatgacatcttggatttgtttactttacaaaataaggtcgacatacttagtcatttgtgcagctaccataaaggagcctaggtaagtaatgtatcttttaaaaatacacacattttatattctctaagtatttagtcatagggtttttttctaaagtctgcattgtataaagaaggaaattgaggccaaaagacattaaaagacttggctaatgtgactcagtaaatgagggtcattgcaggggctagctctccagtctcccatgctcagtacgctctttctactcactccaacttctacctgtgacttcagacagaggaaaaagagatgagcaactctaataaaatgcacagatcattcttttttaatttaatttaatttttatttttccataagttattggggtgcaggtaatatctggttacatgagtaagttttttaatggtgatttgtgagattttggtgcacccatctcctgagcagtatacactgcaccatatttgtagtcttttaaccctcgcctccttcccactcttttccccaagtccgcaaagtccattgtatcatgcttatgcctctgagtcttcatagcttagctcccacatatcagtgagaatatatgctgcttggttttccattcctgagttacatcacttagaataatagtcctcaatctcatccaggtcactgcaaatgctgttaattcattcctttttatggctgcatagtattccatatatatatatatatggttttatatatatatatatatatgtgatatgattatcacatatatatagatatatatgtatatatcatggtttctttatcaatttgttgattgatgggcatttggattgtcccacaattttgcaattgtgaattgtgctgctataaacatgtgtgtggaagtatctttttcgaataatgacttctttttctctggctagatatccagtagtgggattgttgtagcaaatggtagttctacttttagttcttcaaggaatcttcacaatgctttccacagtggctgtactagtttacatttcgaccagcagtgtagaagtgtttcctgttcaccacatccatgccaacatctattgttttttgattttttgattatggtcattcttgcaggagtagggtggtatcgcattgtggttttgatttgcatttccctgaccattagtgatgttgagcattttttcaaatgtttcttggccatttgtatatcttcttttgagaattgtctattcatgtccttagcccacttttggatgggattgtttgcttttgtcttactgatttgtttgagtttgttgtagatttgcacagatcattttaatatgtttttctaaaactctagatctgaaatcaggtggaaagaaacaaaagttggaattcttacagaaaaaacttgccctaagcactatgaatctagtgctcaacacagcatatggtagattaaatggtcaaaaatcagcagaactcaacaaaatgttttcattcatttcaaactgattatcaccagtattaacaatttaggcagacagattcctgatggcaggcatgtgccattaatgaaagagaaattaacatcagtgatattttaccttccatctgcttttttagtgactgaatttgatcataatattcagttcaagtagaaaataacagatgggtataaaagtcccacgtacattacttcttgaagaatataggaaaacacatgtattttttacacactacttcaatggcttttgtcaaaaccaacctgcttttaacttaaatagtcaaaaatattttcatctttcttcaaattttactctatcatctgttaaaactaactttaaatcttggatccaaacacctatccaggcaatattggtcacaacatatgttgattattttaaagtcttatgactgatttactgacaacactcttaccaggaattctgaaaaatgagtaaattcttcaaaatgagttgtattagttctcacactgctaataaagacacacccaagactgagtaatttataaagaaaaagagttttaatgataaagaggatatcaccacggatcccacagaaatacaaactaccatcagagaatactataaacacctctacacaaataaactagaaaatctagaagagatggataaattcctggacacatacactcccaaaactaaaccaggaagaagtcgagtccctaaatagaccaataacaagttctgaaattgaggtagtaattaatagcctaccaaccaaaaaaagcccatgaccacagccaaattctaccagaggcacaaagaggagacaataccattccttctgaaactattccaaacaattgaaaagaagggactcctccctaactcattttatgaggtcagcgtcatcctgatatcaaaacctggcagagacacacacacacacacacacaaagaaaacttcagaccaatatccctgatgaacactgatgcaaaaatcctcaataaaacactgacaaaccaaatccagcagcacatcaaaaaacttatccaccatgatcaagccggcttcatccctgggatgcaaggctggttcaacatacacaaatcaataaatgtaatccatcacataaaaagaaccgaagacaaaaaccacatgattatctcaatagatgcagaaaaggcctttgataaacttcaacatcccttcatgttaaaaaccctcaataaactaggtattgatggaacatatctcaaaataataagagctatgtatgacaaacccacagccaatatcacattgaatgggcaaaagcaggaagctttccctgtgaaaaccagtacaaaacaaggatgccctctctcaccactcctattcaacatagtgttggaagttctgcccagggcaatcaggcaagagaaaaaaagaaagtgtactcagataagaagagaggaagtcaggccgggcacgttggcccatgcctgtaatctcagcactttgggaggccgtggcaggaggatcacgaggtcaggagttcaagaacagcctgacaagatggtgaaaccctgtctctacctaaaatacaaaaaaattagccagccatggtggcaggcacctgtaatcccagctactcaagagtctgaggcagagaattgcttgaacccaggaggcggagattgcagtgagccgagatcacgccactgcactccagcctgggcaacagagtgagactccatctcaaaaaaaaaagaaagatgaaatcaaattgtctctgtttgcagacaacattattttatatttagaaaaccccatcatctcagcccaaaaactccttaagctgataagcaacttcagcaaagcctcaggatacaaaatcaatgtccaaaactcacaagcatttctttacaccaacaataagcaagcagagagccaaattatgaatgaactcccattcacgattgctataaagagaataaaataccaaggaatacagctacaagggatgtgaaggacctcttcaaggtcctctcttatttccaaaccactgctcaaggaaataagagaggacacaaatggaaaaaattctatcctcacggataggaagaatcaatattgtgaaaatggccatactgcccgaagtaatttatagattcaatgctattcccatcaaactaccattgacattcttcacagaattagaaaaacctactttaggccaggcgcggtagctcacgcctgtaatcccagcactttgggaggccgaggcaggcagataacctgaagtcgggagttccagaccagcctgaccaacatggagaaacccaatctctactaaaaatacaaaattagccaggcatggtggcacatgcctgtaatcccagtaactcgggaggctgaggcaggagaattgcttgaacccaggaggtggaggttgaggtgagccaagatcgcaccactgcaccactctagcttgggcaacaagggcgaaactccgtctcaaaaaaacaaaaaacaaacaaaaaaaaaaaactactttaaatttcatatggaatcaaagaagatcctgtatacccaagacaatcctaagcaaaaagaacaaagctagaggcatcacgctacctgccttcaaagtatacaaggctacagtaaccaaaacagcatggtactcatcccaaaacagacatatagaccaatggaacagaacagaggcctcagaaataacaccacacatctccaaccatctgatcttcgacaaacttgataaaaacaagcaatggggaaaggattccctactcaataaatggtgctgggaaaactggttagccatatgcagaaaactgaaactggaccccttccttataccttatacaaaaattaactcaagatggattaaagacttaaatgtaaaacccaaaaccataaaaaccctagaagaaaacctaggcaatgccattcaggacataggcatgggcaaagacttcatgactaaaatgctgaaagcaattgcaacaaaagccaaaattgacaaacggtttctaattaaactgaagagcttctgcagagcaaaagaaactatcatcagagtgaacaggcaacctacagaatgggagaaaatttttgcaatctacccatctgacaaagatctaatagtcagaatttataaggaacttcaacaaatttacaagaaaaaaatcaaacaaccccatcaaaaagtgggcaaaggatatgaacagacacttctcaaaagaagacatttacacagccaacaaacatatgaaagaaagctcaacatcactgatcattagagaaatgcaaatcaaaaccacaatgaaataacaatctcacgccagtcagcatggtgattattaaaaagtcaagaaacagatgctggcgaggctgtggagaaacaggaatgcttttacactgttggtgggaatgtaaattagttcaaccattgtggaagacagtacagtgattcctcaaggatctagaaccagaaataccatttgactcagcaatctcattactgagtatatacccaaaggaatataaatcattctactatgaaaacacatgcacatgtatgtttattgcagcactatttacaatagcaaagtcatggaaccaacccaaatgcccatcaatgatggactgaataaagaaaatgtggtccatatacacgatggaatactatgcagccataaaaaggaataagatcatgtcatttgcaggagcttggaagaagctagaagtcatcatcctcagcaaactaacacaggaacagaaatccaaacaccacatattctcactcgtaactgggaattgagcaatgagagcacatggacacaggtaggagaacaacacacaccagggcccgttgcgggatggggaaaaagaagagggaacttaaaggatgggtccataggtgcagcaaaccaccatggcacacgtatacctatgtgacaaacctgcactttctgcacatatatcccggaacttaaagtaaaataaaatagataaataaataaataaaattagattaaattttaaaaaagaagaggtttaatggactcacagttccacatggctggggaggcctcacaatcatggtggaagccaaaggaggagcaaaggcatgtcttatatggtggcaggcaagagagtaggtgcagggaaactgccctttataaaaccagcagatcacatgagacttactcactgtcacaagaacagcacgggaaaaccccacccccatgactcaattacctctcaccaggtccccccccacgacacttggggatccagcagacaccaccaccacttcatcccacttcaaatgtggtctcccatgctcgagaagcagtactcaccttctggtctgcaaagcgccatcctggcataatttgccttggcatttgtcttttaacgagtattttaaacgatcttttaaacgaatataatatctttggaagcccttatttgcatgtattagttatgatatacctaataaacattccaccactctaatttaccaatctttaccagttataaaagcagaaactataatcatgtctttcaaaataagccttgggctgttttgtagcagtgaaatcgatagttgtacttaacctaaagaacctgtgagaatcccactgcagtgttgaaatttaacaattaagcaatactatccctggctttcatcattgaatttcacaaaatatgttatttgctgggaaaacagttgaatcggcctgatgacgtgaataatctcaggcctgacaaggatatagctgtattataattccttagtgtccttaaatgtaagctacttttgcaattaatactaaatctaacctcgctttttccgtaatttctataatttcatctgaacgtagtaacaggttagcagggggccaccagcctgggcgctctcggtgttatactgtcctctcgtggtaaatatggagaactgcagcctgacggctttttcctctttcagtttcctgttccattattttgccgtgctatacatatccttgtaaactgccttaaattctttctaggacacagcaaaatctaaaataaatagataaacaaatgtataagatgagaactgttgactaggagcttaaaacatgggttggaaaacccatctgcttgggttcaaatcccagctcttaaagcccagcacagtggcacgcacctgtagtcccagcttcttggaaggttgaggcagaagaatggctcaggttcaggggaaaaataaaaaatgaaaattccagctctgccacttaatcagctgtgagaacctgggttatctactggggtggagatagtctctctctatgcctagctcctcatctgtagaatgaagataacaatagcctgcattgcatagtgctgatatacctccatggcaagcactaggaacagaactactactccttctcaaaaacaaacaaaaaacaaaaaaccaaagtgagagctttatcacctaaaaggtcaattacagcttattcttaaatacagtggaacagaagttctctgggacctacagaccacttccccactgtgtccaaattggacacagagtgcagaaaactgaaactgcaacccagctgagctgtgattgtgtcttttttcactggaagaagtaaatcatagaatgttagtgttgtacattggactttggagcacattccgtttggcctcctcattttacagttgaggagtttgaggcccagagaagtgataactcagttctcccgatgcatttccatgatgcgatcactgcttcatgctctgagtccttgtaaacacaggaatttccaggaagaggaaagggcaaagctgtgatcaaccagccatagttttcccagccctagttttccccatgcagctgcagaagtcaccgtggaatgacccacgagcaaggccacaggcacagacacttcgggagctgacaggaatagatctttagagacaggaaggctttcctacccaaccccaccatcaattttttaaaagcaagcatttcccacaaggtaaatataagaactagtctggtcaaaggataacaaggcagtaggtactggaaattccggacaatttgtactactcaagctaactgcaatgcaagacaggctctggaacttaaggcaaagctattatgtccggctctgccacaattttagaatccgcgtcccctgtagtggactgtgatgcaccaccatgttctgtcctcaacagaggttgtcctctgacaaccctctctgaaaactgccctcagctcaagaaggttgctttgttcaaggtcaagccccccagtacttagtcaacgagaaagtgtagagactcagcactcccagagtgatgggggaccactccagagcccctggggttctgctgaggccctgctgagattgcatcacagcccagctgccccctcacctgagtattatcctgaggacacgcccagagagatgtcctgcacattcatctctactcagagcctgcttgccagagaaaccaaatcaacagcccttttctgatataaaatctcacacgtcactcttcttgacctgttcgggttttgtggggttttttgtttgtttttgtttggttggttggtttttttgaggggaagaggatcaatttaaaataaatccattgtatacttagcctctccaatctgagaagagagtgtgctttatatctggcaaaacctgtttaaaatgctgtttcccgattgctaccacctaaattatcctccgtgtaaatggctgtttctccccaaacctaattccaatggatggaacgtttctgttcccccaaaattcacacgttgaaatcctaactcccaaggtgatcgtatttaggaggtgaggcttttgggagatgattaggtcaagagggcggagtcctcgtgattgcgattagtgcccttgtaaaaaaccccagagagctctctcaccccttcagctacgtgaagacacagcaagaagatggctaggccttctatgaaccaggaagcaggcccacccccagacaccaaatctgccagcaccttgatcttgggcttcccagcctccagaactgtgagaaataaatttctgttgtttataagcccctctgtttacggtattttgttataggaaccttaatggactgttggaaatttttatttagatttcataattaaaacacaaatacatagtcattataaaagtatgaccttttgatccgccatccccagggggcccatgccactgtttccaatctgggtcctctccagattttgatacacactcctaggtagtcacgtctcccctccctgctttgaaaaccactaccatctgcatatcaaccagtcaagattttgaacattaacttcttgcagtctatattataaaaccctttttaaaatttttccaaatataaaatactattagaatgttttgtgaaacatccttgctcaaacaccttagtttgagggcactaactaacacccagtttggagggaaatgaaacccactcaaaggcatttgaggaagtgggagaagggacttctccagggcaagcaagagaagtgtttcagagtcaggaaaggaagctattaacgtaacttgcaagagaaagctgcagcatttacagtaatttcatcgaattttaaagtaatcaaatctgaattttataacatttggcatgaggtcatttatgtataggctcatgaggaaggcctaaactgaatccccaatcctcaagaattctaaagtgaacacaacagttaccgggagcccaaaattaggccactgcagattttagggcatatggtcatgtcctcccagataccaggagttatacttcgaaacacagggaagcataaagtcaactcaattctaatgcatcactggtgttgaaatgtgctttgggaaggcaggaaatccattctaacgaagagcaaaaaagcccaccaaaaagccaacttggggtttgtcaagaaatgatatacttcacttggcagaggatagtatcttccaaagattcctgctggttgttgaaggattgttgattacacatttttgaacaaggaaactagaacactgaaaatgcaagcctacctacttgggaaataaaaaaagttatttcaagagaaaacaaactcttattacaaggataatgagaaaagtcagcgtggggaaaacgtttaagaggggcaggaacaacagcaagaacaaaaactattggtagctagataagaaatgtcaaaaacaatcacaggctgggtgcagtggctcatgccagtaatcccaccactttgggaggctgaggtgggtggatcacttaaacccaggaatttgagactagcctgggcaacatggtgaaaccccgtctctacaaaaaatacaaaacgtagccaggcatgatggcatgtgcctgtagtcccagctactcaggaggctgaggtgtgaggatcacttaagcccaggaattggaggctgcagtgagccatcactgtaccactgcactccagcctgggcaacagagcaagaccctgtctccaagaaaaaaaaaaaaaaatcacagaaggaataacaaataacaggcaggcattgaaactacactacgacaggtgcagcaactcatgcttataatcctagcactttgggaggccaaggcaggaggatcacttgaggccaggagttcaagaccagcctaggcaacgtgagaccctgtctctacaaattagccaggatggtggtacacacttatattccagctacttcagaggctgagggaggaagagcgcttgaacccaggaatttgagcttgcagtgagccatgactgagccactcaccccatcctgagcaacagagtgagaccttatctctaaaaaaaaaaaaaaaaaaaaaaaaaaattacactactatacttgctgtatcattacaaatgcttttggctgcatgtgacagaaaacacacggggcatatttttctcatatatctttctttaagaagtctgcaaacaggacttgttgatgttggttcaacagctcagtgatgtcatctctgtgattctaacccttttcttcatggtcataactgccacacagccactcctaactggagctgttgatgttggttcaacagctcagtgatgtcatctctgtgattctaacccttttcttcatggtcataactgccacacagccactcctagctggggctaggcaagcaactctctaccacaacaacaagaaaactgtaggaaacctgggctttgctgaaagtgaagagcttggcaaaatgggtggggctgagtccattccagtggtgacctcagctccctggctgttgcacacagtctgaaaggtccagggaaacatgtaaatttccatatcacattagtatgtgggagaagagggacaaaatatctgttgcaaacttatgtttcatttctattatccaagaaactctacctatggcattcctcacaaaaaacaacaacaaaaaaaggtcagactatgtggtgagaaaacatgaattttggttgctacaaaacacaagcaagttcaaaaagaatgtttattttaagctctatgtacagaagaacagagtataaacgtaaaaaggaacaaaggaaacaaaaatgacaggcatacatatttacatagcaagtgtaggcaaaatgtgtcaagaagagtctttaaatacatctacttttagcctttaacagtccaaatcagtttctaagaataatttatcatccaggaagaagttttggaagtttaaagctcaaccttaagttgagtttaaatccttgagtttagaaggcttgtgttgctgataccttggtcaacagcttttgtgttgaccatttcttctttagttcgctgtccttctgactgtgaaatgtgatgtccaaactgaaataaagcaaatatttaacacagaaattattctaatgtcaaaaaaaaaaaagaatggcaagacaaaggccagatgaccctctgaggtttcattcacaatatttatttaccgtatttattactataatacatagttatttggctatgtatcaggtactacgctcagagccaaggacaaaagtgaacgagacactctcagcggcacagactgagctcttaggcaactaaaatttgagtccctatgtgcccagcctgaaattaagtgctaaaaactatgtaaaaaaaaaaaaaaaaaaaaaaagaagattatctaaaatacttgtaattggctggaaaaagtgctaagagacactgaactaatagcaagcagtaaatgacaacctagaaacacttcgtttatccactatcactgggaaacagtgtgttccacctacgggaacttcttacataaatgcatcctcaaattttcaaacatcctcaaattttaagaaaccaagttctagtctctgctctgccccttagatatgggattataggcactacagggatcatttccctcacattttcgggggaaaagggattgctgctgtgaagatctagtgagatgagtaaaaaaggtactttgcaagttacaaactgctctacaaatgttaaaattaaacatttattttagacacacttgcatttttatagtaatagttctaaagtgtcttcttaaatagttaaaagaatataattttctaagtcaacatgctaaacatcagatatatacacacacacacacaatggtgagcacagaggctgcacacactggagtggcaatgtgtgtgtgtgacaagtccctccactctgttacactctttttctttttttgttttttttgagactgactctagctctgtcgccaggctggactgcagtggcacaatcttggctcactgcaacctccacctcccgggttcaaccaattctcctgcctcagcctcctgagtagctggaattaattacagatgcgtgccaccacacccggctaattttcgtatttttagtagagacgaggtttcaccgtgttggtcaggctggtctcgaactcctgacctcatgcatgatctgcccacctcagcctcccaaagtgctgggatgaccacgcccggccctgttacactcttggagggctcaatgcatctgagttttccagtctcttcctctgctgacgtctgtccttcctcagtgctatctagctgactttagatgctgttcctcttccacactcctgtcattctcaaggcttattcttatgtgttaatactacctcaactaaattaagacatgtgaaaaccaccccaaaattagaattacttctaaatttaagaaaagagacttcaagtaaggagtaatcttaaggctcaaatgcttaaaatccagtgtttgtcatcctaggcatccagtaagtgctgtcactaaagataactataatcccatttgcttttttacatgcagagttaacattatattcaacaaaatatccaaagtctgtatatttgacagagaaaaatcttggcgtattcacattccatatggttagggggaatctattgcaccattcttccctggccctctcaaactgtcagacacccagttcatactgcagatggcaacatcaaattggcacctaagataagtcattataaacatatgcacaaatatttttcaaattaagtattttatttcaaaagagctcatgataggctaaaagtgaaaatgagcatataaaattaacaacaaaaaaaccccagaaacattagcagcatcaataaacaattatatagcccattctgcacaattacttcaagagaacttgaacacaaagctgtaacataaacaacacatctgagaaaaactgaaaaattaattttacattagtgtagcttacccttgaagtttctggactagaaaatggggaagattcccaagatctattctctttctcaaaagaatcatcttcttgaaatgcaaatttctgtttaagtgcatgagatattaaagaaactggatcccaatgtgaattctgtcttttcctcttatgaatgggtctaccgccaggtgacctattttttaaaaaaaaaaattgaatttattaaaacttggatgtaattttagctccttgttgacaaacatggcaggaatacaagcatatcttacaatttaattagtcttcaagagattgaaaataatctaatcttcaagaaattttcgcaatgaaataaggaaggcacaatgaatgaagaatcagaaaaccaagaacccatgtgacttgagactctgccataaccttgttatgacctgagatttgtcagatgtcactatgctgaagatctttattatggtaattttctaatttcctaatgggtaggaaaattcaaataaataagaacttttaaaaggacgagagttcatgccaaaaaaaaaaaaattacgcaaattgttcatttgtttggttgttcattcatttaatcttcattgaatgcccactaccacatccgactccattttatgctttgggagtattctgctcccaattcttacagcaagattatcatcaatatacaagtaagatcatttggctggtaataagagctgtgaataaaacaaaacagaggctgggcacggtagctcatgcctataatcccagcactttaggaggccaaggtgggaggactgcctgagcccaggagttcgagagcagcttgggtaacatagcgagaccccatctctagaaaaaatttaaaaattagccaggcaactacttgggaggttaaggcaggaggatcacttgagccaaggaggtcaagcctgcagcaagtcatggcaccactacactccagcctgggtgacagagcaacaccctgtctcaaaaaaaaaaaaaaaaaactaaattaaaaaataaaaaatagggaaatgtaatagtgattagggacagaagcactttagatatgatcagaaaaaaagcctctttaaggaagcaacatcctctttaagaaaatgacaaggggtcagttttagtgtaaacatctggggctgcatcaggaaggagcttggcatgtgtgagaaacggaaaaaagaaagcaactgcagctggagtgcagtgggcaaacatggggcataggagaggagctcagcgagagaagtgagggctggctcctggaggggcctacggacacagcaagggctctagaactgattcaagcacaacggaaacccacagaagagtctgaagcaggagaatggcctgatctgacttctggtcactatctgcagaataaataaggaggcaagaatgaaaacagatcactgaggaggctgctgcggaagtctaagctagataagaatgggcttagcctggggagttggcagtggaggtcaagaggtccacagaattgagctatgtgctgatgggaacggtgggagatagaatggaaaataaagatgaaggatgattcctagatatttgtttttgtttttttgagacggagtctcgctttgtcaccaaggctggagtatagtggctcactgcaacctccgcctcccgggctcaaacaattaattctcctgcctcagcctcctagtagctgggattacaggtgtgcgccatcatgtcagggtaatttttgtatttttagtagagactgggtttcaccatgttggccaggctggtctcgaactcctgacctcgagtgatctgcccacctcagcctctcaaagtgctgtgtttactggtgtgagccaccgcacctggcctgattcctagatcttaagcaaccgggtgatcgtgttgccatttgctaatatgcaaaagacgtgggaaagaacaggttttcaaggtggcggaaaagaacaggtaggaaggaaaagtcctgttttggacctgtgaaacgagatacctgtgagacaggcaaataaagatgtcaagtaggcatttcagtatgtgcatctgggctcaagaggagaggtcagggctagaaaaataaacgtttgagtcataagcatacagctggtatttagagtcataggactaggtgagctcaccaaaggaaacagcatggacagagaagagagggggctgaggtctgaaccaggtatttcaacatttaaagaccaggcccagggggaagagtttaaggaataagaaggaatagctgatgaggtcagaggaaacctgggggtatgctttcccagaaaccaagtaaagaaagtgctccaggctaggcgcagtggctcatgcctgtaatcccagcactttgggaggccaaggtggtcggatcatgcggtcaagagatcgagaccatcctggccaatacggtgaaaccctatctctactaaaaatacaaaaattagctgagcatggtggcacatgcctgtagtcccagctactcgggaggccgaggcaggagaatcacttgaatccaggaggcagaggttgcagtgagccgagatcacgccactgcactccagcctggcaacagagcgagactccgtctcaaaaaaaaaaagaaagtgctccaaggaggtggggaccataggctgtatcaaatgctgccaagaggtcaactaagacgagcaatgctaagagaccagtggatttagccacatggagtcactggtgaagcagttttcaatggagttttcatgggtagaaggcagcagcgatagacagaaacaaattatagacgacttcaagaattcatatcagaaaggggagcagaacaacagaacaacggctgagagtacatgtgttttgaaggtgggaagtactcaggtgtgaggagaaggatgaagtatagaaggaagactcagtgatgcagaagggctcattttaagtgaaatccttgtgaagaggaaagagaagggaaaccagtaaccaaaggaagagcctggccatgaatgatgacacttggctcccaacagcaagatggaaggcagagaatctgcacggggaatctgtaggtgtaaagaggtgagagagctcatctgattcctcagcaacgtacaaaacaaagttagctgtagaggcaactcaggagagaatagggggacaggaggcagaggctactggccttttagttgtttttccagtgatggtaacagtcacagagttgccacttgatactaagcccgacaacacaagtacaagatctagttgggaccaagcatgcacctacagccatgagattcttctcaacaagctgcctcatgctcttcctgtggttactggtttcccttctctttcctcttcacaaggatttcacttaaaatgagcccttctgcatcgttgcaaggatcaaactcacaacctcattaaaaacagaactgacttatctgtcccaggactatcatacagaaaatatatctattttctcaccgaaaacctcactgagggatttccaagtaagcatggcaaatcccttgtgaaatcctactaaaatgacagtaaagaaatgaaaaagatctatatatccacaaggacaaagagattagaaggggagacaggagataagaattgcaaccagatgccggaagctggaaagctgatgaaagtgagagcatggggcgtgggcgccctgctgaacacagggcgtgtgctaaataagacacttctctcttgctcctctttccccactcagctctccaatgacctgacttgcacccgctgtgtaatccccatccctcctgaccacaagggagaatgaagaactttctaaggaaaatcctgtagcccaaaagaaaagacatacagctctggggtgtggccaacaaaatggtcctctccctaatcactaaactgtgaagctcccaagttgataagcccacctcacacaaagaacatgcgatcagcttttccttgcctcattttaaataagaatcaccagatgcttacccaaggctacaaaactaaagatagagatcaaagctaaaaggaaaaaagaaactcacaaaaaatacagtaattcaagaacagaggaaacttaaaacaaacctacacttttaatactgtcagtgggataagaccaacaaaaccaaaaagattttaacaagaagcatttgaagaaaaagaaacagctcttaaaaattaaaaatgtgggccaggtgtggtggctcacacctgtaatcccagcactttgggaggccgaggccggcagatcacaaggtcaggagttcatgaccagcctggccaacatggtgaaaccctgtctctactaaaactacaaaaattagctgggcatggtggcacgtgcctgtaatcccagctactcgggaggctgcagcaaaagaattgcttgaaccaagacccaggaggcagaagctgcagtgagccaagatcatgccactgcactccagcccgggcgacagagccagactccatctaaaaaaaaaaaagaataaaagaacatttttggacatgcaaagtagtaaactaatctaccctttatgtttctcaggaagctataggaagatatgacatttaggaaatcagtgatgcagcatagaaaaaagggggcaagaatgctcaagaggtaagcgaaggaaatccttcaggcacagagggatccttgaggagaatcaccaagaactaaatggagggtcatccaaaaattagaaatagaactaccctatgatccagcaatcccacttctgggtacttatccaaaagaagtgaaatcagcatctcaaagagatatctgcacacccacattcattgcagtgctatttacaatagacaagacatggaagcaaactaaatgtctatcaacagatgaatggattaagaaatgggatatatacatacaatatacagcatgctaagtgaaataagccagtcacaaaaagataaatgctgcatgattcacttatatgaggcatctaaagtaatcaaactgggccagacacagtggctcttgcctgtaatcccagtactttgagagaccgaggcaggaggatcacttgagccgagttcaagaccagcctgggcaacacagtgaaatcctgtctctattttttttaataagataaaataaaaaataaagtaatcaaactatagaagtagaaagaagaatggcagttgccaggggatgaggggagagggaaatgattactgttcagtgagtataaaatttcagttatgcaagatgaaaaagctctagagatctgttgtacaacattgtgcttaacgatactgtattatacacataaaaatttgttaacagaatagagctcattatgttttttcaccacacacacacacacacacacacacacacatggaactcagagaggcaattattaactctaaaaaaattattcaacaaataaaatgtagtcaaaatatatgaaatggggccaggcacagtggctcacacctgtaatcccagcgctttgggaggccaacatgggcagatcgcttgagctcaggagttagagaccagcctgggcaacatggcgaaaccccatctctacaaaaaaatacaaaaattagccaggcatggtggcacatgcctatagtcccagctactaaggaagctgaggtgggaggatcacttgagcccaggaggtcgaggctgcagtgagctgtaatttcaacactgccctacagcctgggttacaatatgagaaatggcttactgtggatgttcactgttataataaggatattaattctgaatactcatttaactaaagattgtggtttaactatttcaggaagacgtggcaagatgtgtgtgtgtgtcctgggtagagtatctaagaaaatatattcctaatatcctacaattggaagtcaacataattaaaatatcaagaaatagcaaataagtatgttgtttcaaaaatatggtgataagagactagaagaagaaatagtcaaaaataattgaatgtcattatctctaggagaggtattcaggggtgaagaagaataagaaaaaagacatatatgttaattttcataaacataataatttttctaaacataaaattgacaaaatttcagttcacttttcaaattacaacaacataccgctcaattgcacgaagcttaaccttattcatatcctttagaacgtccaacatgtttggaatatctttatttctctggctttttgaatgatgactataattggtcttattagcagccgggttctgtttgctcatttcagttgctggattatctgagtcacaaatattattagatcctggttgtacgggaggaaaacacggtggctggagagatgaaaactgaggaggaagtggtggaggaggaggaggagaaagcactgaacctggaagctgatctgggtccacactcagatgggcagcccgcgatgatgacagctgacccaaactaatgcgctcgtcactcaagccaaaggaacctacaaacaaagtggtttattacaaaatcatgcacaattatctctaacgtaatatatattaataacactaattagaaccaaaacaggagcaatttctgtaatgctagtagcgatatggtagcaaggaaagagtgtcaatcccatctgcttagtaatttaagagtcaagtcaaattgtgaattcatttttaatccagttaggaattttcagtgtaggtccaagagcagagcggggaggagaatgcatcttaaacaaacaaaaaaaagagttttttcagtaattcacatacactctgaacttcatcctctattttaaaaaagctaaaacagaaatcaacaacttgtagttagaaacacaaattgatgtattcactgtataatgacattggagaaataagcatattattttctaagcaaagcttaagatgggtactgagtatttaacttttccactttaagatttgctcataaaggactgtgggtaaacacgattgcttaagaaaactgtgtatagttatatatcattttatttattatgtataaatataagttattgtatattatataatgtgtttatatgtaaatgttataaatatacactgtataaatatcttaaattatatgtgtatttatgcatttgtatatatacatatgtattaaaaaatttttagcaattatatttacacacagccctttacagccaaatctgttgtgaaaagcattcagtacctagattgctttacattttatacacgcatacatacatgttgtgtgtatgtgtgtgcataagtttaaagcaagttgtatctctataaatttataaaacaatcatctggaaaacatgactcacctcaacttggtggaagtgtagcagcaataactaaaaactataaacatatgatgcctcaaacctatatcctctttcaaaccaatgcattcttcctctttaatatccaatgctttcatgaagagttagaaaagcttactgagggccgggcgcggtggctcacgcctgtaatcccagcactttgggaggccaaggcgggcagatcacgaggtcaggagatcgagaccatcctggctaacacggtgaaaccccgtctctactaaaaatacaaaaaattagccgagcgtggtggcgggcgcctgtagtcccagctactcgagaggctgaggcaggagaatggcgtgaacccgggaggtggagcttgcagtgagccaagatcgtgccactgcactccagcctgggcgacagagcaagactgcgtctcaaaaaaaaaaaaaaaaagcttacttagaagacaacagactttttaatacaaaaatacaatcttctagtatagtaaagctagttcttctttaaatcaaagccatcccctcactacaaatgtgtcttaatttatcctgaataaacatcagatataataattttgtatattcaacatccttttatgtacatttaatgttttcatggtacttattcagaattgtactcacttaaatactagatgttcctgtatgctactatacgtactatattcagtacagtatcatgctgtacaggttggtataggctataccatgagtatcatctaactgaaacaaaaatcctactgttacttactagaatttgtactatttttcagttcctgcatttccacaattgctgcaatctgagagcgaagaaaagtcagctcattttcaagggcagctatttttctaattgcagcttcatttacaggcaggtcatttttcacagtttctttctgtcttacagcaggtgacagtggatcccgaactagtcgcaaaggatgaaaaatttccactttctcttcttcatttttccatatactatttctgtgggtgaaaaaaaataggaaatggagggaagatatatttccaatcaaaagaggtataaactcttacactcctacgtgaaaatcaaaagacaataaaacaaaataaaagctactctcaggccgggcacagtggctcacacctgtaatcccaacactttgggggctgaggcagtgaatcacctgaggccaggagttcgagaccagcctggtcaaaatggcgaaaccctgtctctactaaaaatatttttaaaaattcgccggtgtgatgacgtgcccctgtagtcccagctactcaggaggctgaggcaggagaatcacttgagcctgggaggcagaggttgtggtgagccaagatcgtgccattgcactccagcctggtcgacagagtaagactctgtctcaaaaaaaaaaaaaaaaaaaaaaaaaaaaacctactctctatcccccatgattgtttctagagtcaccactgaggacaaggaaaatatcttatttagctttgtattcccaatataaacagaacatagcctccaatggaggaccagtcagtgaccagggaatgaacaaaacaaactttgcttttagattataaaaccaaaataattacctgcaattgttctacttattaactttaaacgcaggtaagttaatttatttagaagttctatataagttaataaagagccttacattcaggattatgttagggtgaaatgtatgttattttaactatttgaaaattggtgccagtttgatacataataaaatcagccggaatacttaaataattgacacttaatgtgcttagagcctgtatctgaatatactaacatataaagtaatactccctaggagtaacacatccaaattttgaaatacatttaacatcattgcctggtgcacagtaaacagtatataagttttggctaaaaacatgattctaatatccctttaataaccactccctcctaggcctggtgttaggtttaaatgtgcactaaaaaaaaaacaactggctaaaaaaatgaaaagcagccagtcttctttattaagaagatacagtagggcacagcacagtttgaagataaacaaaacaaaaaagctcaatcaatcttaacaagcttcgacacatgcaagaattcagtttatagcccacttcccaagataagcatataaaattaccgaaatctgagataactggcttcttcatcatttgccacatacaaaa

SEQ ID NO: 59425 - DNA, 139515 bp, Homo Sapiens
  misc_feature (130011)..(130011): n is a, c, g, or t
  misc_feature (130022)..(130024): n is a, c, g, or t
gatcttccattgcacagttccatgggaaaagcatggtttcccaggctgagtagcatgcttgctcactgccttcttggctggtgggtgggggctcccctgacccttgtgggtctcaggtaggccgcagaaccacactggtcttcctttctcttggtgggtcatgccagccgcctagtcagtgctgatgacagaacctggatacctcggttgccagcacaggatttgcaggctgttttgtttctttttgatgcaagcctccaattgtggctgcttctagtcatccatcttgggcctgccccccagttgcctttccagacctgtgtagggcagagcctttgggtttatgtatagaaagaatgcaaatgcaaaacattaaatttcaagccagtagataatggttctcaatccttttaactggatgccccagcagatcacagaacagcaacatgagttctagaacaaatgcaaaaggtgctctggtagaggacttcctgccagaacaagttttcaatgacaaatatgacctgttttggataagacgtattctagacttttatttactctgcttttaagtattatatatatttagcccttaattttttgttcctgtcaaaccttttattttccacgaagaagtattgtcaaccaaccattctgccagccccagaacttttcacatgcaactttttctccccatggttggcaagggatcactgtaattatttcaggcatgaaaataagcatttatacacttacttttcattaccttaagaaaaactgaacaagtaactggaagcattttaataagtgtggcagggcaaggtattaataatttacaggagcaatatccctgtacacaatcccttcctcgccccattggagtagtcttatcagaaaaaagaaaaaataataagagctgattattcccatggaagattgtcctgagggcatttgtaaaggtaaaactttgaagctgcagtcttggcacctgtagttgagaagatgtctcactgaagggacctgggacagacccatctctgattctctatgggctgctatgttaccagttctcaaagatgggggaagagaattgtgctcaggctgagttctgcactcaaatgaggaacggtaagatggcaaccacaatggaataagaacctgccctcccccaccctttttctctggaccttgtcagccctaggatccttgtaaagtccctcccttgaagggagtggaagtaagtatgtaccaatgactgatattgatcagctgctttcctacctaggtgagcaagggctcagattgcagagtaatttgatatagaaaactaaattgaacaattctagcaccttgtgttatgcaggaacttattcatgttatatatgatgatggatattgcctaccattttttaataaaattgatttccacaagacctgtttttttggggggttgggtaggggggcttgatttttcctacaggaagatgagtctttccctggatcaagtgtgggagaaagaggggaagaccgtggaactggttctgagcaaaagtgtaagttacactattatggaaaagatctatgcacattttgaaactcgaaggttttccagaattattgagtttatacaaattctgtttttaaggctgaattagcagctatcagaatccattacaatttttttgttttctttttctttttctttttttctataatagaataggcttgctgttgaggaaatgtgtgaaaataccagtgggggagcagatttttctaactgattaaaatatgtggagctgctgcaatgatttcctctgtgtttcctttggctacagataataccacaaagctaactcagtgacgcacatggccagctgataacagctgacacatgtgaatcgaaagccaagtgtgtattatcagaaagtgagttaaaaacccataaaactccccactgtctgacttgaaaacattcctcttgaaattttaatgacatggtaggtaatatttttaattctgcgtgctaaaacacttccagtgaaatctgagagtaaaagcatgtccctttaatcaatatgagctagatatacaacctaagtattaatatattcctgcaatagcaggattcctgagaattgcgtaaaattggtatcattcattaggatgtacaactaaatattggacgatcttgatttgccttttaaaatttaattttaatattgtaatcaaacattgacaaagttaaaaaactccaacagtaccatagctttaaaaagaaaaccagcagtcctctgctaaaacccttcccatcacagattcctgttccctggagatactttcaattattgtagtcgttatgtttattgtttactgtaatattttaaaataatcttatactattatttcttcaattttaattcataaaaattatctaatgacttcatattactgaagatatgaattttggtctcttctactgcccacttctctgttcacactttccttttcctatccttccaatgcgacttttgatgaaatcagtttggtacatttttcttggttaaattccctgcttattatgattatttaaacataattcaccactgagccatagtgaattatgatcctatttctttcttatacagcttttcatttttcatactaattgctttttgtcaagtttagtcttctatgcagccatcattaatttattcccaaacttcccacaggacttcagatcttctctcatctctcaatatgttaaaatacacctaaaagttaaataaaaaaataagctaataggtactaggcttaatacctgtgtgacaaaataatctgcacaagaaacccctatgacacaagtttagctacataacaaatctgcacatgtacccctgaacttagaataaaagttaactaaaaaaaaaaagtccaccaaatgtgggccatgaagatgcgcagcccagatctccttacagagtctgctataggacacatggggattgccttcagttgctgctcctacagctgcttagaacatgcttcccctaggttgttctcggccaatgactgaacatggctggggtattagggcctagtcctgtcctagtaccaatgaacaacttttgtgtgggactcccctctccactggcctggctacaactttctcagaactgtgctgtggtctggggcttttctacccaatcctcccttccctctcctttcaaaaggtcatatctgcaaacagttatccctgcctaatcctggtctggccccctttatccttcacagacattccccccagtaaatttcttgcacatccaatctcatcttggcacctgcttctcaaaacggggccctgagaggagtctgagaaagcaggctctaagatggacatgtggattggcttactctttgccctgatggtggtaaggaggaccccatcctgagagtaatatgaggtcaatggaacctggtacagttggaggctcaattacttaaatctcacttgtggtgatttgggaaaacagccagagggctgatgattgctaagttatattgatgtcctacaaaggataatgaaaaactgagagtgattaacaaatagtgaaaggctaaatgtaagtgccagagggactgttggtagttcacaaataggtccttatcttccacagtagaagaacatacacagctgagaagcagacatgggattttatagttaaagtcacaaagcctcagaaacatttaaatgctcagctgaggcaggttctggaaccctgacacatgcgatagagacatctaggagaatgccttgagattttttttttttgagacggagtcttgctctgtcacccaggctgtagtgcagtggtgcgatctcggctcactgcaagctcctcctcctgggttcacgccattctcctgcctcagcctccctagtagctgggactacaggcacctgtcaccatgcttggctaattttttgtatttttagtagagatggggtttcaccatgttaaccaggatggtctcgatctcttgacctcatgatccgcctgcctcggcctcccaaagtgctgggattacaggcgtgagccaccgcgcctggccaagggtcttgacactacagatcccctgaaccctcagagcttacggagacatctcctttttccatagcaagggctactgcttcctctaattggaagatgctggagaggcctcttcccaatcaggcaagcgccgcctcaggaatgcctccattcctgagggtcaaatcccagtgcagcttcatggggaatgtgctgggcctggtaagaaaggaaagaaaccatgtactaaaggaacagcaggaactagttagcatgaactagcagaagccaggggagtatattagtgattggattttgaggaggtgatatggtttggctctgcgtccccatcaaaatctcatcttgtagctcctataatttccacatgttgttggggggatccggtgggagactattgaatcatgggggtgggtctttcccatgctgttctcatgatagtgaatgggtctcacaagatctgatggtttgaaaaacaggagtttctctgcacaagctctctttgcctgccaccatccatgtaagatgtgacttgcttcttcttgccttccaccatgattgtgaggcctttccagccacatggaactgtgagttcaagtaaacctctttcttttgtaaattgcccagtctcgggcatgtctatatcagtagcatgcaaatgaactaatacaaaaggcttgatcaaggggaccgagaaatgaaattgtataagcaaaatttattgacttgggggtactttcttgggacataggatcctggcaaggaccccaagtgatggaacaaacttgttgccagcatggacctttgaaacctggaaaaagcaatggtctgaatgaagtggaaatgccagacatcagaagaattacaaaggctaagggaatcaggcaaagagtgaagactttaaatcagatgttaatgcctaccagaaagcatacaccatggaagaggcactgaacaactaaattgacaaaataacttggtcatttggcattatccagtcttcatgattggtcactctggtactaatgggaaaggaataataacatagtggtcatcatggtggcagagatgaaagatatacatgggcccaacagtgggaactttcccacttaccaaggtcaatctacctactgctgcctctgaacatccagtttgtcattaaccaagatcaacactgagccctgatatggcattattgctctaggggaccaaataaccacttggtggcaaaccaaccaaattgggtctcttatctggtggatggaccagcagttcgtccactctgggacagatacctattctgggtatgatttcctgcccactgagattcagctaacactgttttctgggggcttaaagaatacttgactcataggcatggaatcctgtacagcatagcatcagacaggggactcacttcacagtgatgtaggtgtgggagtagggctatgacatgggattcactgatcctatcacctactgcatcatttagaagcagctgctccatagagggttgggatgactttctaaaggcacagtgagagtcctagttaggaggcaatactctgtgaggatggtgtatcattattcaggatgtagcatatgcattagactggagaacttcatattgtattgtgaccccaggaggacgaatacatggatctgggtaccaaggaggtggaaccagaaatagctccatcccagtgatctgctgggggcctttgtactttccatcttgcaactttgggctctgcatgattgaaagtctgtactagtttgggttctctagagaaacagaaccaataggatacacacacacacacacacacacacacacacacacacacacacacaccccttccattcctgagggccaaatcccagtacagcttcatggggaatgtgctgggcctggtaagatgtgtgtgtgtatgtgtatttttatatataatatatgtcctatatatttagaagtacatatatacttcttatatatttatatatactatttatttacttatatatataatcttatgttctatctatttagaagtatgtatatgtcctatatatttagaagtatatatttttatatacaatatatagtcctatatatttacactttatatatacacattatattaaatatatatacattatatggtaccttcatattaaatacataaagtatatgatatacttcctaatatataggacatatattaagaatatatgtttttatatctctctatatatttatatgtatagagacatatcctatatgtatattcttagtatatatgtactatataaaggacatatacaaatatatatggtttttttaataagttttttttattttttagttgtattttaacatattgagagatgagagaagatctgaagtcctgtgggaagtttgggaataaattaatgatggctgcatagaagactaaacctgacaaacaacaattagtatgaaaaatgaaaatatacaaatgtatatgtccttaatctatataggacatatatattaagaatatatctctgtatatctcttatctttctatctatggagggattgatttattataagaaattggcttacaaaattatggaagctgagaagtcccatgacctgtagtcagtaagctgaagacccaggtgatctggtattaacggtatagtttcagtccaagtctgaaggcctgagaaccaggagagctggtggtgcaagttccagtctgaatgccagcaaatactgatgttgcagtctaaaaataggcagagggagtgaattctccctcacactgccttgtattctacttaggccaccaacagattgggtgaggcccacccacactggggagggcaatctgctttactcagtctgctggttcaaatgttaacctcatccagaaagaccctcgcagacacacccagaataatgtttaaccatatatctgggcaccctgtggaccagtcaggctgatacataaaattaaccatcacaaagtctatgtccccaaagggagtcattcttgcaaagagacacagtaaaggtctccttgaattataagctacagctactgccagaccacttttaatttcctgtgtccaaggaccagaaattggggacaggaggcaccatcttggcaggggcagttggcaagagaaggtaagactgctttcccacaatgggagcaggaaggaattcatgtggaaccaggtggtcctctgggtaccgcgctgcccagtgtaactgtgagtgggcacatgcagcaatcctaacctgaaaagtctctgattagaaagagctcaggctcctcaagagcaaagttttgggtgaaaccaccaggtcagcctgaagactttctgaggtgacagctgaagattagtggaattctgagtaaataacgatgaaaggagaggacgagtgcccatggcatccctaaaaccacctgcagtgacgcaaccatcatgcatcccaccagctttcctcttctcagattcctttcaagaagagaggcccatgacactttggaggaactgctcctcaaatgtgcctgaaatgaatctttttttttttcccttggcttcagcatcccaagtagctgggattacaggcgtccaccaccatgcctggctaatttttgtatttttagtagagacggggtttcaccatgttggctaggctggtctcgagctcctgacctcaggtgatccacccgcctcggcctcccagagtgccgggattacagacatgagccaccgagtgcagctgagaagcgaatctttcaagaagtgtggctataatgacaacaagagagaagggagaaaccatgtcaagaaacagtttatttaatatgagggagtgtattttaaagaacgcaaagtgggagcgacttattgaagatataagagagagggaagagataagtgattgacaataaattgtccctgagaagataggaagaaataggaccttggcagaggagtggtcaggagaaaagagaaagatgctctactgtgatcagagaaaagagtcaaaggagaggtatgagcctacatttatagttttggatgcagatggtgagggcattcctatgtgatgggttctttttctatttgaagtttgaggcaactttgcttagactgaatggcacttggtagcatgagagtggtgtgaaaagagaggtgaggtgattgtgggaatagtaggtgcaattgagatatttgttcaaaaacaagtggatctttaaaatcattttttgagcactaacaatgtcaggcacactactgagctcttttccgcattatttctaatatttaaacctatcatacttactctgagaattaatgaatattgcctttaatttattggaaaagaatgttttcttacttgtccaattcattcctttacttgtttaacatatatttactgagcttcaattatatggcaagcactgttctcagcatagtaagtaagtgtatcagtaatgcaaaccaagggctgcctgatttcaaaatccagtttccttatagtatgtcaataaaaatgatccaacaatacaaaatattgactctgtgagccctctaccgggttcacctattctaatgagacagggaactactactttatacaacaaagacagattgattatttatagttgtttaaattatttcaagtatattttcaatgataagtttggaagttgaattccaatataatttctttatggtaattaagaagatgaattagtatcttattaaaatgtattttccttacatattcaaaagcaacatcttgaatatttgaaaacgcttatggtaaaattatgactaattcatgatttagtgcatcgcacttcagctgaaatttacattggcatttactttgaagaaataatttgataaccaatgtaataatttgcacaacatttaaaaaaggtttgtgagtttgaggagtggttgtggttgcatttaactcatcctttaaaaccagctttttttaattggtcagcatatttctttgttagtaactccagtcatttattgaagcacactcaaatgatatttacttgcacaaacatattagggttataatataccttttctgtttttaaatttctatttgttgcaattgtagacagataaacgttattggccccctgtgcacatggggcttttgtgggaaaagtgcaatgctataatacattaaaagccataagcttttacattaaaaagcagtgatgatgggatgagggtaagtgccatcccatggtgttattgctatagcatcagctgtggcactattttcatgaacagacttagagttgagtacctctcaaagcaatttttatgtttgaacaaatacagtgatggatcagcagagtgagttactcatcaagaacttggcaagaaggatgagttacgctgagcaaaaatgctgctgagtttaatgactctttgggaacatgtaggcacttaagtctctggggtctaaatctggttaattcacaagtgtgaaattgtcagcctacttaaaagaggcagaaattatgcaatgcttttagaaagcaattttaatgtaagaggagcactggaagccagacagggcatagtagtattatattaatgacttttgttttgtcatggtagaacagttaattgattccatgaggaagatggaacaaaagagactttctagaaatttcattctccttctaggagagaagagataatcagggaaggatttctcattttaaatctctgaattagttcttattcctgattcaggaaaggttttctctaataagtatgcactcagagtttgaagaaaaatgtgatgtgactaaagagaaaaaacaataatatgaaatgtctttattaccttaaataagtaaaattagattcaacatacccatttgttagatactgggatttttgaagggatgatttaccatgtataacatgttctcatttctcaatgtatttcacttccttggccttcaaatattgcacttgttactattcttacactttaccagtgaaattaaatcaaggcaaataagagtttttttaacatgtttttaaaactttttagagataaatgtgttccttccactcctatcgaaaatggagtaacaaggactttctaccagaagcaactagaaaaccaagatatatacgtctggtttttaaaccttgagcctaagatatcataggcctgtgattgcttcaagaaaaaaaaaaaagaaagtgcgctctaaaattgcatttttttttttttgcatagcaggtagtacagggaggatgcattcagagaccagagattctgctaaattgaagaaaaagaggaactaacccacaaaggccaaatttgttagaatttgcaagcagtctaccagtggggaaggaacagcacaaagacagagctctagaaatctgcagagaggttcccacaagtctttggatgaatactgatctctataatgcatgagaagaaactatctgagattggagtgggtggaacaccacaaatagagtgaggagaacagtttcagagctcaaactggctagaaatagttcatgttttcaccattaaagtggaaataatttgtcatacaaagagtattgggtagaatgctcagaaaactgtcacctttgttgtggggataaactggctctatgctaaaggctgctctcaacacacacaaagcttaaggacaagcatcagaatgatttaactggttccaagcaacttaactgcatgccaaagcaaagtctaatgctattttaaggaatacaacaaaactcagtaaagaacaacgtaaaaatcacaatgaatggcatccaacagaaaactaccaggcatacaaaaaaaaaaaagaatatgattctagtaagataaaaaacagaaacaaaatctacaaaatagacccagaaatgaaaaaaataataaaaccagcagataaggatgttaaaatagtgattataaatatgctcgatatgtttaataaggtaggtaacaaggagataaataacctaaatggaatttctaaagctgaaaaacacagtatctgaaagggaaaatgcaattgaatggggtcaacagctgattaaacaatgtagaagaaaagatcagtgaactttaggatgtagaaactatccaaaatgaagcctaaagaaaaaaaaatggttaagacaaatggacgtaacatcagtgacctgtgggacaatatcaaacagtctaacatgttattacatctaattggagataaagaggtgggagacataaaaatattcaacaaaaaatggccaaatatgattccaatttgattataaacagaaattttgagaagaagccagagggggaaaaaatcttatcatatacggaagaacaaagaattgtcacagatttcttgtcaggaactgtgcaaactaaaagacaaatttaaagttctgaaagaaaaaaacttgaattttgtactgttgaatatatgtttcaaacaaatgcaaaaggaagactttttacacacacacacacatacacacacacacacgctctcttgagaaaatttgtcaaaagtacacctgtacaagaaatgttaaaggaagttctttagggcagaaaattcataactgtttttttttttattcattatgcctttttataaatgttgacatttttctttattgtaatgtatttttaccatgaaatttactttacctgaaatcaatattgctatttttatttattttacctgatttttgtcttaattagctactgttttttcttcatttgtaatatttataatatatttatttaacataccttttctaaggtggaatagtttgaatgctactttttgaattattctgtgtttgtctctttttgaattgaatttaagcaacttgaatttagttataacaaatatatttagtctgtctcctgtcattttgttttatattgtctaaggcttcattttctatgccaatactttcgtattctaaattttagggactattagtttatgtatgggtatgtgtgttgctgttgcttatatggagcatattttgtttgcttttataaattgcctactgcattagaaggcatctgtaaggcttaggtccaattctattagtgatcactttcacattcaaaactatgcttgaatctttttttaaatttccctatttctgaatttcaagaatgaaaaaaaattgctacctgtaatattacatgaataatttgatgtatttcaccattcttctagaaaatatactcatttttgctatttcattatgttattaactttttaggagactatcaaattgtttgcaacgtgatgatgtcatttcatagtcccaccaactatataggaaagatgtacttgctattgtagccttaaaaatttttagcctttagaagttttatagttttagtatttatattacggtctgtaatccatcattttgagttaattttttaaaaggtgcaaggtaaagattaaacttcatttttaccgtatggatatccagttggtctagatcacttgtggaaaagactatttttaaccctgttgaattatcttgacactttgattatcttgaaaatcaattgacaatatatgtgtgggtctattctgaattctcagtttggttccatggatctatgtatgtattcttatgttgataccatattctcctgattactgtatctttatagtaagtcttgagattaacaagtataaatcttccacttttccctcagctatgctgaatcttttgcatttctacataagttttagaatcagcttgaaaatttatgtcaaaaaagcctgtgagaatattgattaggattgcattgaatctacagaccaatttggatataattgaccttttgacaatttcagttttctaattcataaacatgtatgccttatctttttgtgtatatcatttaatttttctcaaggatatttgtataggtgttgcacaaaatttgttaaatttcttccctgtctcaaagtagaaaatagaaaacaatcacagagatgccattataaaatatatagatatagcaatcctctaaaattcccatttaactctgtagtttgaccggaatgaaagacggctatcttggagaatgatgttagattaatcaagtagtcactctaataatagcaactgttccaactaccatctccatattgaaatcctacaaatgtttcctctttaaaaaaaaaattcaaaacagaagaaccagcagcatgtctttcactaactgattcagttagctcctggggcagtgatcatctccctattttataggacatcatactcatccgttacattgaagataccatatagattcttggatagaataagaaagagagtgctaggtgccttagagtacatgtactgatgaaaatacaggagcctgacacttaattaaattttttggaatttaggagccttggtcaagaaagatagatatctttattagagtaactaatttttttttaaagagatgaagtctcactttatcaccaaggctgaagtgtagtgggcacaatcatagctcactgcagcctagaactcctgggctcaagtgattctgccacctcagcctcctgagtagctcggactacagacacatgccaccatgctcagctaattaaaattttttattttttgttttttatttatttttatttttatttatttttattttttatttttttttagagattggatttcaactatgttgctcaggctggtctcaaacttctggccccaatagatcctcccacttaggcctcccaaagtgttgggattacaggtgtgagctaccatgctctacagcaatgatttgctgaaccttgtccatccttcaatgtttagggtatcttttagattttgtaggcaacttatcccatgtataggtgtgtgctgcctaatttattaactgaatgacctaaaaagcttccccattaaggcccagaacaagggagggctttcctgatggcccaggctgcagtgtaaacagctaaactgtttggctcccatgttgcttaaagtgtctatggaagatacgaatgctgtggcaagtcctataagaggattgcagaagagactggtatctttgatttgagatgcagctggaatggaaatttgtctcacttcactttctgcctcatgtttcctccatcaccaaggaagctggtaataacttggttggtctgaacccatgcacagctcagaagtgtgagtgagttaatacccccaaggaaaacttttgactaattgggggaagaaagcagatagataaatgcttctcctgtttccctccttctgatagaaaattcagggaggtatctggaaacttctcaggagccctcaacagaacagtgcattaatatactacagccaaataccactaagaacacatctgtggcagaacaagttcggctcaaggttcattgcaacaagggagaactcccctcatagggatctttgggacatttctgtaagatggtgttaaaaggacgtataggatttttagctatgccaggtattttgaggagagttcaagaatgcagggctttgttatggattagatgctgtcaggaagtgaggataattctgactgggtgtcttaaatctttacaaggtgagaagactaaagtgagggtaaatctaattgataaagaatcatattagcaaggttagggagacgcttggtcatttgtatggtttggataatgttgtttttaatctgtgttcagatgtgattacgaagtggtatttttgctctaattcattacagttgtggtgtggccttgttgatgttgatgttctaggaaaattgttcacatccaacaggagaatgttgagacctagctgtgaatgccaggccagctcttagcaaaaccaaagtctagctggtagttccaggctattcttatcagttaagagctatttttctctctctcaagaaccactggttttctggaaggaatagcttcaagaataccctcttataatggcttttcatccttcctgttgcattctttctggcctctcactctgtctcagtctataccttcagccttctgtaggcatggtaactcaagttgagatactctttcaggaacacaaacaatattctaaatagtattccccttttgaaaaacagctgcccatcatgaactgtgctatatgatccatctggccataaggtcgggacgtgctaactatgctccatcattaagtggacgtagatattctcaacagggctcaattgttcctgaaggcaaaagtacctttcctgaataggacattcacatgtccagtgtgccttcactttattacccttcagtttgctcctgtggcctgtggacattcccaatgactagttggctgaggaggtatggctgtgagtctgctttacagatggctctgcatcatatggcatcatctgctataactggccaaaataattatgaaaaagttcagctccattcaggattggtttagaaaggacattcctgaggaggcagaatttgaaacagaaaaactcattttcccaattgtatcttgagctaaggatataaggatgggacaaggatggggaaaagttcagagctacttccttggcagcagttttctgtggcagccatgtcagaggacagtatcatgttgacatcagcagtggcatcaatcagtctcatcctgggttatggtgatggaggaccaggtacctacatgctccacatctttcccgatgccttggacttacctaaacctctgagatgaagctaaaatcctggaaaaaaaggaagtatgtaggaaaaccttgatttcactgaggaaaaaattagaataaaccacattcaccatatattgactaatattatgtttttaccaccagagaggcttgagacaaaaaataagttcagtgatcaagaaaacaaagaaaatatccactctcaaatttgtagcctgataattcagacctgtagttagaagtattgacagtggctttctagatagagacactaagagagagactaggaaacttaggttacttaagttttcttatttgtactatttttcatacatgtaacaaaattttttacaacaaatatgtattacctctataatcagaaaactataagcattgctttagaggaatatcatcaaggcaaaaacactactgaaagtcaatgatgagtatctgtgactagtattactatggttattattattacatttaacctaatagaaatggtactatacatttactattataaaccttatcctaataggagttatagttgattaaaacacttaaatttatcttgttgatattttcttagctaataatattatactataaaattaatacttctcggtcttttttgcaaactcttaaaatatgaaagacaaaattcttacctcttggtcatgtgagtcatcaatgactgtggaagctactcatgagctcatgcttatttataatcttgaatatgtgctcacacagattatataacattaagcaagaagcaattcactggcaatgcctaatattggggcagatagacacttatatgagttacacagaaaatattattactcacttttgtggacagtgggggcagagaggatttgttttcagctctaacttcagtcaggaaatgtctctactgttaacaagaaaagctctagacttactaaagttaacagcatttatttgagcaaagattgattcatgtattggtcagcactcagaaccagaagacgttcagagagctctgctctacaatgtgggcagtgagtattcatagacagaagaccatggaagcacagaaataccttaattggttacagctaggcttttgccttgtttggacatggtatgaataactggctgcttgtcatttgctgaagctctgctgcttgtgattggttgagatccggctattttaactcctaaattagattgccctacaggttgcagttctttaggtaggaacttcaagtatacagacagcctcaggctaatggccttctgcttatttaatgtagcagtaccaaaagaagtttcattctaccatatcccctttccattactgcagtgtatggaaagccacatttatcccacagagagaatagggctggaacagagggatctgaccacagtgagagggcagatcgcagagactgaataggagtacggtgctgagtgtgtagacaggattcagaaccttccacagcaatcagctgatacagactcaccgcctaatgattcagaaaatgagggatcaaagactagaatggagagagaaaaaatgaagtgtggcaagagcaacaaggggtagtgggatgcacagaaaggatccaaaggacatcagcactaatccctcagttgacaataatggctatctggaagccacctacccctgagaaattgtgaagtacatgtgtagatctcatgacacaaaagaatacttttagtatattgctgctataatcaatatgattaaaaggttaactacaaatttggagcatattggtcacaaaacagctgacatttctttctggatatgtaccaggtaatgctgagcagtttatatgccttgggtacatttaatttttccaacaacactatgaggtaggtactgttttcctcattgagaaaagtgcagaatgaccaagtggcttgcttaaggtccacagcaaatggttggcagggccagattcaggctgagatatctgacttcagagtctgagatgttaattactgcatagacttcttttccaaactgacggatctctgtgaggagcatcatcacatctctgttaggagcaactgttaatttattaaaacctactgtaggctgggtgcagtggctcacacctgtaatcccaacactttgggaggtcaagttgggtggatgatgaggtcaggagtttgagaccagcctggccaacatggcgaaaccccatctctactaaaaatacaaaaaattagctgggcgtggtggtgtgcacctgtaatcccagctacttgggaggctgaggcaggagaatagtttgaacctagggggtggaggttgcagtgagccgagtttgcaccactgcactccagcctgggtgacagagcgtgacactgtctcaaaaaaaaaaaaaaaaaaaacaccaaaaaaaccaccactgtatattccttagagtttagatagtatgactgagtggagaaaattttaagagtgtggattcagcatcttcaacagaatttttggttctgttttcttaatttatcctatagagtagtttcaggtactgatatttgtggatacttggaccaaatggaccatatcaaatattatgccagagattctgatccctaaactaagtagaataggcacttgatttataattgtgtcttaacaacatcgtttctctcttatcttgtgttactctttgtcatttattcctcacaggaagaaagaagtacctaaggccccaccattagaacctgactctgtgtttctaatgcttcaggccaaggaggaaaacactgtatttaatgcgcttgcagtatttctattcttgcaaaatacttactgttccaagcaagtgagttttcaaataaaataagaaaagcattttcctatttttgctgcttaccttattgctctataaccctctacaagtgtatctatttccaaatcgttttctctggggaggctacatttcacacttctacaacataaaatactaccacagagattcttaacagttgacatttgtagacctccttgattgaaaggttgtgcagtgaatacatttgttttggaatcaaataaatattatttaaatttggaaatagatacacttgtagagggttatagagcaataaggtaagcaccaaaaatacgagaatgcttttcttattctatctgaaaacccacttgcttggaacagtaagtattttgcaagaaaaaaattacctcaagcattttaagtacagtgttttcctccttggcctgaagcatcagaaccatagagtcagattctaatggtggggccttaggtacttctttctcaccgtgaggaataaatgacaaggagcaacacaagataaataaacctgttctaatctagagctaatatgatataatttacaaatgttctggttttaattttaaacaaattattctgcctgaccccatgtttttcattgcacactaatattgatatttgacacatcagattattagatattcataacatttgattcctttggctatcatggatcattcttttattcagtaaatatttatcgaaagccttaaatgagccaaactctattctgattctgggaatatagttggtaacaagacaaaaaagatcactgttcttgtggagtgaatattctcatgaggaaagagagacagtattcaaaatgtaagaggaatatgttagatagtgatgagtgctctgatgacaataaggcagagtctgatgatagggagggacttgggggctcctttggagtgagtaatccaagaagactggaatggcaagcagggaccactgctgtaaaatcagtgaaagagcatcccagatacagggaactgacagagctgcagtcaacaacctagaaccaggctgttcaaggcagagaatgcacgaatcacagattgctttatctagacaaaataatcaaaagatatcctggcattcccccttctgttggtgaggctccaagaccaacctcacaagacaaatggtaagactggtttgtttggtaagactggttttattaactactcataaagatggcagaagcaacagaattgactttcttgcatagtaaacaggagactagtctgtgagtgacctggagaagcttagtacggctgtggccagtttgatagttaataggttaattctgataattatcagctgagttgatagttaatcctatattgaaatcctggaggagaaagaatacaaaagagatgacatggaaaccagcttcttgttcgcacttgttactgagaaaacacactgcataacacacaggttaaacgctgtttgctgttcatggggctttaattggagggtcactcttctggatgtttgtatcacaagtgcattccagtggcactggcccaagctgttatttccaccttgtagctcatgtggttttgctatggtgctgatgtgcgtaaatgtggttgtttctgtggttttcttacaggtcctggagaattacatatcatgcaaaaggttataggtcagcttatctttgcagatatagaactaggtaaaactcccctaaaataccggtgcttagcaaagtaaccttgcaagtttactttgcccttcaatgatcaacaacaaaaaccaaccaactaaacaaacaaaaattagaactcattagcttaacgatccatcattcattaatactcttgagcttatggagaaaacaaccaatatataaaatattcttcaattgtacctgctgcttttatttcttttagaagtatttttttaagctgtacttttcctaaagcctgagaatattttgtgttatttttgatgccagaaaggataatataatacactgtatgtctttaattcgttgtaactggtggaaaaagagaaagataattgaaaccttaaaacagcagagataagtgatctaagttgtaaatctgttagtaattcaagaacatttagaaatatctcctgataaggttaattgaaggaatattctaatgaatgtagtaaattagttgttcccaatctcaaaatcttttaatattctgaaagaaattaagattttagtgagagatattccactttatggaactacttctttctccctttatctctttatggaaaattctatcttaaggagcaaggtgaatctttcttgttctcttttactgcaaaatatttgtttttaatatgtaactaacctgcacattgtgcacatgtaccctaaagcttaaagtataataatagtaaaataaaaaaaaattgtttttaaagcaaaacaaacttacatagaatcaataatttctgttattaaattatagaatgggaagatgtattgcttattgtgatgaccctcaaccctggctgcacattagaatctcctggaatggggcttccaaaccttagtgtgcttgtgaatcatctagggagtttgttaaaatgcagattttgatttaggacttctggggtaggacctgagagtctgcgtttataacaaactcacaagtgatgttgatgcttgattagcctgttctttcattgctataaagaaatacctgagactgggtaatttatgaagaaaagaggtttaattggctcccagttatgcgggctttgcaggaagaatgatgctggcatttgctcagcttctagggaggcctcaggaagcttccaatcatggcagaaggtgaagggggagcaggcacatcacatggcaaaagcaggagcaagtgagagagagtgggccaggggaggtgccacacactctaaaataaccagattccatgataactcactattacaaagacagcaccgaaccatgagggatctgcccccatgatcgaaacaccttctaccacgccccacctccagcactggggattacaatttaacatgagatttggttgggcacaaatatctgaactatatcctgccctgcacctcccaaatctcatgtgattcttacattgcaaaatacaatcatgccttcccaacagtcccttaaagtcttaactcattccaacattaactcattccaagtccttaactcattccaacattaactcaaagtccaaagtcttgccttgagacaaggcaaatcccttccacctatgagcttgtaaaataaaaaaaaagttagttacttccaagatacaatgggagtataggcattgggcaagtattcccattccaaaagggagaaatcggccaaaagaaaggggctacaggtcccatgaaagtttgaaacccagcagggcagttgttaaatcttaaagctctaaaataatctcctttgacttcattttccacatccagggcacactggtgcaagtggagggctcccaaggccttgggccgctccacccctgtggctttgcaggtttcagctcccagggttgttctcacaggttgttaaatacttgcagcttttctagacagagggtgcaagctgctagtagagctaccattcttgggtctggagggtggtggcctacttctcacagatccactaggcagtgccctagtggggactttgtttgaaggctccagcccacatttcccctttggcactgccccagtagaggtttactctgagtgttttgcccctggagcaagcttctgcctggaagctttctcaggcatcccctgaaatctagacagaggcccccaagcgttcatcacactctcacattctgtacatctacaggcttaacaccacatgggagccaccccaaggcttatatactccaaagtggcagctggagctatacctgggcctctttgagccacagctggagctgagctggagcagccaggatataaggagcagagtccctgggcctggcccacataaccgttcttcccttctaggtctctgggcctgtgatgagaggggttgctgtgaaggtctctgaaatgcctttgaggcttttttcttgttgtatttgttatcagcacctggctcccttttaattatgcaaatttttaattttgcatcaaattaaaccagcaagtggttgctccatagcctgcttgaattctccctaaaaagctttttctttctctgccacatggccaggctgtaaatttttcaaactttcatgctctgatttccttttaaatattaggttgatgccaaacaatcacagtttgcaaaaacaattacttttaattgcaaaaactgcaattgcttttgcaccaacctaatataaattccaactttaggtcatttttttgcacccacatcagagtgtaggctgttagaagccaccaggccacatcttgaacactttgctgcttagaaattttctcttccagataccttaaaccatcactttttagttcaaacttccacagatccctagagtataaacagaatgcagcgaagctctttgctagggcataacatacatgagctttgctacagttcccaattaagttcctcttttccatctgagaccttgacagcctggccttcactgtccatatctctgtaagcattttggtcacaaccatttaaccaatctctcagaaattccaaactttcccttatctacctgtcttcttctgagccctgcaaacacttccaacctctgcctgttactcagttccaaagttgcttccacattttcaggtatctttatagtaatactccactcctggtaacaattttccttattaggccattcttgccctgctataaagaaatacctgagactgggtaattaatttatttatttattttaaaaagaggtttaattagctcatagttctgcaggctttagaagaaacatggcactggcatctgcttagcttctagggaggcctcaggaagctcacagtcatggtggaagacgaaaggggagcagccaggtcacatggtgaaagcaggggcaagtgacagagagaataggtaggaaggtgccacacactttgaaatgagcagatctcagaagaacttacactgactatcatgaagagatcaccaagccataaaggatccactcccatgattcaaacatctcccaccagtttccatctccagcactgtagattataattcaacatgagatttgggcagggacaaatattcaaactatatcatgtaggctttacaggaagcatgatgctggcatctgctttctaaggaggccttgggaagttttcagtcatggcagaaggtgaaagagggagcagatgcatcacatggcaaaatctggagcaagcaatagagaatggtgggggagggggacgacacacacttttaaatgaccagatcttgtgagaaagcactatcataaagacagcaccaagcaatgagggatcttcccgcatgatccaaacacctcccgccagactctacctccaacatagaggattacaatttaacatgagatttgagcagggacaaatatccagactatatcaatgctgttggtctgtggaccataatttgaatagcaaggagagagagcttttagaaattaccaatacaaaggccaagacacccatatatttggattcatggtatctaacacggggtccagaaatctgcatgttaacagaaacaacatgtgattgtaatgcatataatccacagatgggagtttggtctggctagaaggcagtactagccctgattgtgtacaggattagaatcccatgcaaatcattaaggctgtaattcctgtgcctctgtagtcttaatatttttatagcagatgctgatgtaaaaaaccactattctgggcattcaggaaagaacactatcattgtatgaacttagtgaaatgatgtgggaattttgagtgtatgcacaatcataaggttgtggttcatagctattaattgaatctttcttaaaatgtttttttgtataaatatatgggatacaagtgtaattttgttacatggatagattgtataccggcttgtatactggtgatgtcagggcttttaggatatccatcacctgaataatgtacattgcatccactaagtaatttcccatcatccacccaccctcccatctccccacccttcatgtctccattgtctatcattccacactctatgtccatgtgtacacattgtttagctcctacttataagtgagaacatgctctcttgctaccaattaattttttctttaagaattttcagattttactttagatatatgtgcaggtttattatacaggaatatagcatgaggctaaggtttggagtatggatcctgtggctcagatagtgagcattttacccaatgggtagcttttcaacccccattcctcttcctcccttcccacctctagtagtctacactttcgattgtttccaaatttatgtccatgtgtgctcaatgtttagctcccacttataagcgagaatacatggtatttggttttctgtgtctgtatttgtttgcttaggattatgacctgcagctgcattcatgttgccgcaaaggacatgatttcatcctttttatggctgtgtagtattacatcttgtatatgtaccacattttctttatccaatctaccactgatgggcacctgagttgattccatgtctttgctattgtgaatagcacagcaattaacacatgactgcatgtgtctttttggtagaatgatatatttttccttgggtatatacctaataattggattgctggattgaatggtagctctgttttaagttctttgagaaatctccagactactttcctcagtgactggactaatttgcattcctaccaagagcatatgagcgttcccttttctctgcagcctcaccagcatatgttgttttttgactttttaataagagccattctaactgggtgagatggtatcttattgtggttttgatttgcatttctctgatgatttgtagtgctgagcatttttccatgtatttgttggctacttgaatgtcttcctttaagaagtgtttgttcatatcctttgccattttttaatggggtttttttttgcttgttgatttaagttccctatagattctgttaataggcctttgtcagatgcatagtttgtgaatattttctcccattctgtaagttgtatgtttactctgttaatagtttcttttgctttgcagaagctctttagaaataagaaatgttgccaattaaataatgagatactaattatgagaagacttaatctaattttaaagatgttaaaaattttttaaatatgccctggagtcaatgaagtatattattcaattatggaaattctctgtacatagaacagttcaggaacacaaagttatctaaagagagtttggatttttacatagctcacctattttttattataatgtttctcatatggacaatgtatagtcaaggtgaaaacacagttctaattctgttcagggaaaaaaatagtagaaattagtttcctccattctgttctatattactatttaaatttagtttgttaaaggcttaaagtttaacttcacaaacatacaaaatcatagttttttgttaaataacaacatttgaattgtataaatatattattgtatttcttaatttataaactatattagcaactagaaagaaaaaaaaatgacttagaagatattttacacatttacttacattctttatgcaacctgaaccctcatctctttttaacattagggatgacagtgggtggacagtgggtggatctgaatttttaaagttattctctagcaactagaggaaaaatcttaccagattatataggctagaactcttgattgagaagacagagtattattaaggttctgaaagaagagcttttcattattcaccagcaggttttactatctaaaatagaattacatgaatttgtaaaatttgtcaccaaaagcttcatctacttgtaaataaaaaaatcctctcaatttttggccaggtgcagtggcttacacctgtaatcccagcactttgggaagctgaggtagatggagctcttgagcccaggagttctaaaccagcttgggcaacatggcaaaatcccgtctctacaataactgcacccttaaaaaaatagctggtggtgtatgcctatagtcccagctacttgggagactgaggtgggaagatcacttgggctctggagttcaaggcgatactgagctgtgattatgccactgcactccagcctgggcaacagagcaagacctgtctcaaaaaataaataaataaatatataaatatataaaataaaaaaataaaacttctgtcaattttggataggtataaacatcatgaaaaatagtttgaaaatttataactgagaagttgctgaaaatccttgatcggatctctgcttgcaatttctgcataaaagattttgagaatatatgcaatgcaaaataaagcattccatattttaaaagaaaaatattttcttgtcttaactatgtatactttttttatttgagagaagttgctcaaatataatatagttgttgactcaagagaatcaataaaaaaaatctactgaataaataacacagtttataaaatggttagttatgacatcattgccttcctcatacaaagaatgacctgttagaaattctaataaaaaagaatcctcttgtagtagcaacaaaaattataaaatgcctaagaacaaattttaatagagatatagaggccctatacagttaaaaattccaaaatgttaataatgagattataatacttgaataattttttaaaatacgtttaatttttccataggttattggggtacaggtggtatttagttacatgagtaagttcttcagtggtgatttgtgagattttggtccacccatcactcgagcagtatacactgcaccctattgatagtcttttatcccttctcccctcctacctttcccctcaagtccccaaagtccattgtatcattcttatgcctttgcgtcctcatagcttagctcctatatagcagtgagaacatacgatgtttggttttttattcctgagttacttcactaaaataatagtcgtcaatctcatccaggttgctgcaaatgccgttaattcattccttttgatggatgagtagtattccatcgtataaatatatataccacagtttctttatccactcgttgattgatgggaatttaggttggttccatgattttgcaattgcgaattgtgctgctataaacatgtgtgtgcaagtatctttttcatataatgacttcttttcctctgggtagatacccagtagaggaactgctggatcaaatggtagttctacttttagctctttaaggaatctccacactgttttctatagcagttgtactggtttacattcccaccagcagtgtagaagtgttccttgatcaccacatccatgccaacatctattgttttttgattttttgattatggccattcttgccggagtaaggtggtatcacattgtagttttgatttgcatttccctgatcattagtgatgttgggcattttgtcatatgtttgttgtccatttgcatatcttcttttgagaattgtctattcattccttagcccactttttgatgggattgtttgtttctttttttgctgatttgtttgaattcattgtgattctggatattagtcctttgtcaaatgtataggttgtgaagattttttcctactctgtgggttgtctgtttactctgctgactgttccttttgctgtgcaaaagctctttagtttaattaagtcccagatgtttatctttgtttttatcgtatttgcttttgggttcttgatcatgaaatctttgcctaagccaatgtctagaagggtttttctgatgttatattctagaatttttatagtttatagttttatagttatacttaagtccttaattcatcctgtgttgatttttgtataaggtgaaagacgaggatccaatttcattctcctacatgtagctagccaattatcccagcaccatttgttgaaaagggtgtcctttccccactttatgtttttatttgccttgttgaaggtcagttggctgtaagtatttgggtttatttctgggttctctattctattccactggtctatgtgcctatttttataccagtgccatgctactttggtgactatggtcatatagtatagtttgaaatcgggtagtgtgatgcttctagatttgttctttttgcttagtcttgttttggctatgtgggctctttttttgttccatgtgaattttagaatagtttttttctggccaggtgcagtggcccacacctgcaatcccagcactttgggaggctgaggcagagggatcacctgaggtcaggagtttgagaccagcctggccaacatggcaaaactctgtctctactaaaattacaaaaattagccaggtgtggtggtgggcacctgtaattccagctactggggaggctgaggcaggagaatagcttgagcccaggcgccagaggttgcagtgagctgagattacaccattgcactccagcctggtgacaaccatgagactctgtctcaaaaaaacaaaacaaaacaaaacaaaaaaccaaaaagaatagtttttctaattctgtaaagaatgatggtggtattttgataggggttgcgttaaatttgtcgattgcttttggcagtgtggtcattttcacaatattgattctacctatccatgagcatgtgatatgtttccatttgtttgtgtcatctatgaattttttcagcagcgttttatagttttccttgtagaggtctttcaccacttggttagtatatttctaagtttttttttttgcagctgttgtaaaaggggttgagttcttgatttgattctctgcttggttgctgttggtgtacaggagaccttctgatttgtgtatgttaatcttgtatccagaaactttgctgaattctttgatcagttctaggacctttctggaggagtctttagggttttcaaggtaaaggatcatatcatcagcaaacagtgacagtttgacttcccgtttaccaatttggatgtcctttatttctttctcttgtctgattgctctggctaggacttccagtagtgtgttgaagagtagtggtgggagtgggcatccttgccttgttccaattatgagaggaaatgctttcaacttttccccattcagtattatgttggctctgggtttgtcatagatagttttattacattgaggtatgtcccttatatgccgattttgctgagagttttaagaattttaatcataaagggatgctggattttgtcaaatgctttttctgcatttattgagatgatcatgtgatttttgtttttaattctgtttatgtggtgtatcacatttattgacttgcatgtgttaaactatccctgcgttcctggtataaaacccacttaatcatggtggattatctttttgatatgttgttggatttggttagctactatttcgttaaggattttagcatctgtgttcttcagggatatcttcagggtctgtagtttttttttttttctttctttttttggttatgtccctccctggttttggtattagggtgatgctggcttcatagaatgaattagaaagggttccctctttctctatcttgtgaaatagcatcaataggattggtaccaattcttctttgaatgtctggtagaattctgctgtgaatccatctggccctggactttattttgttggtaatttttaaattaccatttcaatcttgctgcttgttattggcctgtttagggtatctatttcttcctgatttaaccttggaggtttgtatttttctaggaatttattcatctcttctaggttttcaaatttatgtgcataaaggtatctcatagtagccttgaatgatcttttgtatttctgtggtgtcagttgtaatatctcccgttttgtttcttattgaggttatttggattttctctcttcttttcttggttgatcttgctaatgatatatcaattttatttatcttttcaaagtaccagctgtttgtgtttcatttatctattgtatttttcttgtttcaatttcatttagttctgctctgatcttggttattttctttcttctactgagttttggtttggtttgttcttgtttctctagttccttgaggtgtgaccttaaatgtcagtttgtgctctttgagtctttttgatgtaggcatttagggctatgaactttcctcttagcactgcctttgctgtatctcagaggttttgatagattgtgtcactattgtcattcagttcaaagaatttttaaatttccatcgtgattttatttttgacccaatgatcattcgggaccaggttatttaatttccatgtatttacatggttttgaaggttccttttggagttgatttccagttttattccgctgtagtctgagagagtgcttgatataatttcaattttcttaaatttattgaggctcattttgtggcctattgaataggccacatgtgctgttgaatagaatgtgtattctgcagttgttgaatgaaatgttctgtatatatctgttaagtccattcattccaagatatggtttaaatccattgtttctttgttgacttcctgtcttgatgacctatctagtgctgtcagtggagtattaaagtcccccactattattgtgttgctgtctatctcatttcttaggtctattagtaattgctttataaatttgggagctccagtgttaggtgcatatatgtttaggattgtgatattttcctgttggacaaggccttttaccattatataatgtccctctttgcctattttttcactgctgttgctttaaagttggttttgtctgatataagaatagctacctctgctcgcttttggtgtccatttgcatgaaacgacttgttccacccctttactttaagtttatgtgagtccttatgtattaggtgagtctcttgaaggcagcagatagttggttggtgaattcttatccattctacagttctgtatcttttaagtggagcatttaggccatttacattcaatgttaatattgagatgtgagttaccattccattcatcgtgctatttgttgcctgtataccttggttttttgtttttgtttttgctttttaaattgtatttttattgtataggtcctgtgagatttatgctttaaagaggttctgttttgatgtgtttccaggatttgtttcaaaatttagagatccttttagcagttcttatagtgccagcttggtagtggcaaattctcttagcatttgtttgtctgaaaaagactgtatcttttcttcatatatgatgcttaatttcactagacacaaaattctgggctgatacttgttttgtttgaggaggctgaagacagggccccaatcccttctaacttgtagggtttctgctgagaaatctgctgttaatctgataggttttcctttattggttacatggtgcttttacctcacagctcttaagagtctttcctttgccttaactttagataacctgatgacaatgtgtctaggcgatgattttttttttgcaataaatttcccgggtgcttttcgtggcttcttttatttggatgtctgggtctgtagcaaggctgggccgttttcctctgttattcccctaaatatattttccaaattttttatttctcttcttttgcaggaacagtgattattcttaggtttggttgtttagcataatcccagatttcttggaataagaatattttcttattcttttttctttgtctttattggattgggttaattcaaagacttttgagctctgaatttctttttttctacttgttcaattctgttgctgagactttccagagcattttgcatttctatatgtgtatccaatgtttccttaagtttttattgttttttctttatgctatagatttccttgaatatttctcccttcacttcttttattgttttttggatttccttgcattgggctttgcctttctctggtgcctccctgattagcttaataactaacctcctgaattctttttcaggtaaatcagagatttattcttagtttggatccattgctggtgagctagtgtgattttgggggatgttaaagagccttgttttgtcacattaccagagttgtttttctgtttctttctcatttgggtagcctctgtcagagggaaggtctagggctgaaggctgttttcagattcttttgtcctacgaggtgttccctggatgtagtactctccccgtttacctatgggtgtggcttcctgagcagagctgtagagattattatttctcttctgggtctggccaccaatatgtcttccaggctctgggctggtactgggggttgtctgcacagagccctgtgatgtgaactgtctatggatctcacagccgtggataccagcacctgttctggtggaggtggcaggggggtgaaacagactctgtgagggctcttagctttgatggtttaatgctctgtttttgtgctggttggcctccgaggccaggaggtggtgctttccagagagcatcagctgtagtagtatggagaggaactggcagtgggccaggcccttgagctcccaagagtatataccctttgtcttcagctaccagggtgggtagtgaaggaccatctgatgggggcagggtaggcatgtctgagctcagactctccttgggcgggtcttgctgtggctgctgtgggggatgcggatgagatttccaggtcaatgaaattgtgtacctaggagaattatggctgcctctgctgagtcatgcaagttgtcagggaagtggaggaaagccggcagtcataggcttcacccagctcccatgcaatctgaagggccagtctcactcccattttgcccctgatagagcactgggtctgtttccagatagtggggaagcagagctgagagcttgtcccagactacctgcctccaagctgcagaagaaaaggaggcttctcaactggttcaaattgttacgaagttcagctggagacttccttctccctgtggcatttatcccgtgccactggaccccctcccaaagtatccctgtgacactcccatggtctttcctgctgcttcctctacccctgtatttcactgggctctctaaattgattcagctccagttaaggttggaatcttctcccacagactagacttttagtttccccagtgtgggtgtgagtttaggggtggaggatctccctttcccacttccgcagtttgggcactcacagtatgtggggtgacttctgggtcctgcaggagcagtccgtttccttcagaaggtctgtgggtcctcttgggattcctgatttattcctgcagtcattctggagctaaaactcatgatgcaagcctccacatgctgctgtatccatgcgagtccaagctgcaatctagtcctgcctcccatctgccatgacgatcctaggtatagtcatatctaatacctgaatcatttagaatatatgtcatatctctagataagaagactaaatatcataaaatatctattttctctaaatcagatccaaatgaatttttttcaaaactcaaatgcttttaaaattaatttgcaagaataaatttctaaaatgtcatacacaatttttgaattaaaacaaataatcagtgtagacttcctcactaaaatttaaaatttcataaagtttatctgataaaaaataactcacaggagcacttgcatagaaaaagactaataactcagtgacacacaatatataggaacaaatgcaagcattttgggagaatttagtacatgatgcacatattatttaaaattggtggaattaagatgaattattcagcaaatgtattggaataactggctattaaaaataacattcaattttatacttcatatttttactccaaaatatattccagatataataaatatttaagtgtaaacccagaaacaatgtaagtactaaaaggaaatataggtgaatatttttaaaatcttgggatgggaggaaggtctttcaacgtaggtgatcaaggacaaagttaataagaatattgatagatttaactgaatgattttataatctttgcactaaaatcagcatataaggataaaatacaaataatatgctaagaaaatatttcagggtatataacagatgagatgcatcattaataggagttattacaaattaataataaagtttacaattctaacaaaaatgatcagtggcatgagcagggaagccataaaagaaatgtaaaggcacaaaaaacatgaaaagtaaccaaatacactgaaattaatggagatcttgtatcagttagctatttttgtgtaacaaacattcccaaaactcaatggttacaacagcaattatctgttgtaataatttacatttctttttgttgtctgagggtttgttggctgctttaggatgagcttaactgagcttgctcttgtttctgtatgcaggctgggggcctgtctctaagttgggctttcctgggacaatttagctggggcattcctgctccatttgtctttcatactctgcaagggctccatgtatttctcatcctttttctgggaccaatgagccagcccaagcatgtccttcttgtggaaatggcagaagtacaagagtgcaagcctagctggacaagtgtttcttaagctgctgcttgtgtcacatatgctaacatcccattggctaaatggcaattacatgaccaaactcagaatcaaggggaaaggaaatatatcttgtcttttaataggacaaactaaaaagtcatatgataaaggacatggatacaagcaagtgcaaagatttggggccattaatacaatataccagatgccgtcttttgcacgttggttagtagaagtgttttgtttttgttttttttttttttaaccttgcttgtaatagtcagtgtcgtcaagagtgttaggaaatgagtactcccacacactgctgaaggtgggagtctaaatggctaattggagtgacaatttgagtgtgtgtttcaaaattttattaaaggtgtgtgttttgggctcaatacttccatttttaagaatttactacaggaaaataattaggcaaatgtgcaaaggttgtataagtataaacctggttaatatagagccagttgtcatggcagcaggaggccatgtggagcagcggctgccatcaatcctggctgcagcagagaggtgtggctttggctgtatgcttcatggaactggtgggaactgggaacaagtgggagccctgccccttctgagttggggcaggagctccctgggtgccactgaagatgcccaagccacagcagtagacctgggcattcctgtgctctttgggcccaggagcaggcgggaggctcaccctcctgggcatagctgcagccactcaaactgtggctgcaggcccatgcctcctgctccatggagcaggcaggagccccatcccccagagtgtggctgcagctacccaaaccgtggctgtagacccaggcatctgtgcactcttaggcggtcttgagaaggcccccactgatcttacgggctcagaagtacctgttcccactgcctggtttctctctgctgttagcacctgcttctttcttggagcaaagatagggccaagcccaggcactgtcacagcccagctgggtgtgtgcacacttggggcagtgctgacatgccagcccctggtcaccttagccccctccagactttgggcactgatgagcataggaggaaagctgaggcaggctgagtgcagctcagtgctggcctgcaggtaccccttggcttctacagcctgggtgccctgaatgacagattgaggtagacaggttactggatggaagggggcaggtcacaggtgaggtcccagccttcaaagagagcctgaaggctggggactaggctgccagtaccgccggactggagtggaaacttgtggtgcattttccgggcctgcccatggccacccatggacaaattggtgtacacttcctcccctctgaggcccataaaaacccctggcttagccaaagcttagcagatattgaggtgaccagctgcatagaggagcaacacactctagggcctcctctctgctgagagctatagagacaatgagatgacctgcctgcagagaggagctacccactttagggcctcctctctgctgagagccacagagatgaaggagagatgacagggagatgatgggactacctgcctgcagagaggagcaccccattctagggcctcttctctgctgagagctgcacagacaatgggacgaccagctgcagagaggagctaccttctctgctgatacctgaatacttgtcaggatgacttgccttgaatacttgtcaggatgacttgcctagcagaaaggagcaaccctctctgctagaagctgaacacactttggggaaaccctggctgtggaaaggagctgccctctgagggtttcctctgagccattttattgctcagtaaacctcctcttcaccttgctcaccctacactttgctgcatacctcattcttcttaggtgtaggacaagaactcgggacccactgaatgaggctaaaagagctgtaacacaaatgaggctgagatatgccccattgctcaccacattgcaaacaaagagaaggaaagaagagctgcagcctttcagagagcccagacctgtgagctccccaagccagggctgtgactccctctttgggttcccggcatttccaagctactgggcatcaccatgttccctggtgccagctgcggaagctgctttcggtgcacctggtccagccgcagccttgtggaaagccgactctcatgctggcacctggagcttcctgccttgctgcagcagctggcatgtctgactgcacagtggctggaccccatgctcactcacatatcccttgtgctccacacagtctcccttggcagatgtgggatccaggctggtagtgtgagctgagcgcatcctgccaggccaagtgggcggaatgagcccagcgggcctgagtgaaactcaaggcaaaggcatcactggccacagaggtttctggccagaaaagtgacaccccaaagatcctgtaacagttgcacatgtaaggctatactttttaaaaaagttgacatcaattttgattgattgattgatatttcagcctgttatatattttaaatatcacctctgagttcaatgatattaatcactagattgtttataatagtaaacatttggaaaatttctaagttccattaatataaaattgataaaaataaatgttggtacatccacacaatgggttgctatacaactgttaagataatgatgcttgtatttattgtcatgaaagaaatccatgccataatgattaaatgtaaggtaggggcttgtttcaataatatatatggttgtatgttcattaaatatatgaaaaagtatttatcagggtatttctatgtggaaaattatgggtgcttttattttcttattgtgctttttaatgttttatttgtagtgtcatgcattaacaggcactttttatgaccattaaaagacagaaagtctacttctatttttgaaaagtgatattgagaatttaattgtaattagtttcaaggaaagcgtatgagtaacaatactctgttacaaagtcaaaacattccgtagaaaatagctatgagtcttaaaggaaagacttctctagtcatatcataaatgatgtctgtttcccttttgagcaaagagacacaacttaataaaattaataggggaaactcaaatgtatagaaaatagaatatgagtaagaaaggcatggatacttttatgctgtttatatacacatgtacacccagccatgctttctgtaaaaatagtgcttgcttggttctgtaaaaggaggaaatatttcagagtttatggcaaaatcattttggaagtacagaaggttggtttggaaaggattacacatttgtcatactttctttcatgcttaataaaaaaagtgattctgatctgatgaatggaacattgttagaagtcagaaaatattactgtttctcattatacttttcatttgtcacatgactttaatgaaggaccctcctgttagcatgagagtcattatcaaccaaaggtatatagaacgtttcctctttaatgcagacatttaacaaactaatgaatactaaaaataaaactctctaaaaataatgttgcttatatactgtgaggatctgctaaatcttttctgcttttgaatacacagtaagaaaattaatttagagcttaatcagccatcataagcagcagcaggtaattttatttaatttttcaaagcaatgagagactattggagtgggagcaggcatgcaggtaataaagaactctttgatttttattgaaacatccataatttaaatgacaggttttgcggattcaagactagtggtttgcagagggtgctctgcagagcctcttgggttccatgacattaccttggggcccactgagggtggtggttggaagaggaggaggctcctggctcccatgtccacatcctccactgtagctctaatttcataggttttgtatttcaatgttctgtgtgagttggcgtgaaaaatgagttctattgcaaaaatagttttgaaaacctttaatttgttccatctccacagtgtgtagatgaagaaacagattcaaagtagactcctgctctattttagtgattattaactcctggtaggtgtaagaatgcacaaaatgcttcagtcatcacaccaatcctgttacctaggctgagtaaatatcagcaccattgtttgccagattaggaaatggacactcagagggtttcaacaatctgcccacgagatggtatgcctaactcctagtcctgcttctcctccttctattccttctttaaagtactttttatctgaccaggctgtgtggttctctatgtttgtacatgttccaacccagagaagttgtagtgtataattgatagtattttaaaatgattccactgaagctgccattattagaaatgattgatctctaaacagcagcactatgtatgaatatgtccaataatgacaaactctaaccagtaagtgctcagaatagtgtgaaagttttatttagcaattttacaagattggtgtggagaatatatacaaattgctttctgtgtttttcttttttagcaggttttaataaatgatatatttataattttaaaagttatattaaagacctataatttgaacattgtagcattgcaagcataaatgttctttatgtttacaaaaaacctcaatggtattcttgattttaaattggtctttgtgtatattatattcctctcaagtgcactaaatttctatagattctgtatgttcattaaaaatatttgctcagttcaattacagttattgggattaggggtagcgggtggggaaaatgtgtaagttcctgaggcttccctaaatgggatgtcctctctgtggattgagacatgtccaaaaacccacatcgaaccttcaaggatctattacttgaggggcctgagagtctatgaaaaacaggcattttaagaagagtcctggctcaaattttgtttcatatctcgtcatatcaaaataaataagaataaaaaattacaataattgtgttatttttctatgtgaatatatatacacacagcagattttatttaaccatttcctctgttattaaggaacttaaaacatttaagatatttccgaatcttcgccattgtttaaaataacactgaaatgagcatctgggtgcatatgtaattgcattcatctctaataatttccattggaaagattcctattaatgacattgtcgtactaatttactctttcatcaatttaaaataatccttatactgccaaattttactaatattgaattatacattattttactaatattgctgatgaaaaattgtgtcctggtgactttttttcatatatctaccagtatgtttttgtcatctgtaagtggcatggagagcttataatttttgacatctctgatttatgtaaaatcatatatggaattagagaacctatgacattaaattaggttatctctggattgagaaatggtgatatttgttttcctcattctttttgtgagtttctgcccataaaatattttataataaaaatgcaaaaaagatgaaggtatctttttttacaaaacagcatacagtaagacaagattcatgtgtattatctaacatttatgaaattttattattaagtgtttttagaggacttattcaacatatgaaggattttagtcagtagacacagtgcctcttcacctgcactggaggcgttgtttttcttctctgtagcagggtgaatggggtaggatggtaaaaatttccactgagaatgtagcaaacttgatgtcttcaaaacagctccagcatttgtgagatgatgaatactccacatgaaagaggagacacagcgcagtggttagtgcacagccctggagtcgaaatccttagatattactccaggctttaccacttcttatgtgaccttgagcaagataaattttttatgcctcagtttcctcatctgtgaaatggggatataaacagaacctatatcttaagggtattataaagattaaatgaggtaactatgcagaaaacgtttagaaattctgacaataaattgttttaaaatggcaattataactttagtaagtggtctcatattctctctttttttaaaaattttactttaagttctggggtacatgtgcagaacatgcaggtttgttacataggtgtacatgtgccttagcagtgtgctgatcacggtcttcttatgcacatttaccaatttcagtttgttgaaagacacaattatcagatatttgaatgtggatgaggtttgttgtaattacaatttcacttgccttttgtgaatgtttctgtcacaccagggcatggggatgacatgaacaaaggcagagcagtggaaaagcataaacttgttcagggaatagtaaaaaatctaggtaaatccacaacataatgctattgtaacatactattaattatgttaattaaacaattattcatgtttggtcttcatgtcaagatgaaatatatttaaatacttgactttataacatatataatattgatgtaatatcataaaatatttgtaaaataaacacagttatataccatgtaaatatatttcatgtattcattctaatctaccgccaagtagtaaagtttcagatttttttttttttttgagacagagtcttgctctgttgcccaggctggagtgcaatggcatgatcttggctcactgcaacctccgcctcccaagttcaagcaattctcgtgcctcaccctcccgagtggctgggattacaggcgtgagccactacgccccactaattttggtatttttagtagagacggggtttcgccatgttggtcaggctgatctcgagctcccgacctcagatgatccgcctgcctcggccttccaaagtgctgggattacaggcatgagccactgcgcccagccttggataatttttaactctggaggagcagaaatgaagcactgtccggaataattttcctactagagaagcaagtgatgaccctgcgttacaaggggtttatatgctggcctagtatctatgttctctagatggcagtggtaggatctcactcccataacacccaagagtcactgcattataaggaacctagaattgctttcttttttttccgagaccgagtttcactctgtcacccaggctggagtgcagtggcgtgatctcggctcactgcaacctccgcctcctgagttcaagcaattctactgcctccgcctcctgagtagctaggattacaggcgtgtgccaccatgcctggctaatttttgtattttgagtagagacggggtttcaccacattggtcaggctggtctcgaactcctgacctcgtgatccgcccacctcggcctcccaaaattctgggattacaggcaagcgccaccgtgcccagcctagagttgctttcttaaaagcatccattatgtattagagaatacattacaacatttgcgatgaataatcaagcaaagattcaatatatcaccctgtttaaagtggaaatccacctccaatgattttgctgataatgatagaatgatataatttcaaaaatcattcttttaatttttgcattataaaaatttttgggccatgtgcggtggctcacgcctgtaatcctagcactttgggaggcctaggcgggtggatcacttgtggtcaggagttcaagaccagcctggccaacatagtgaaaccccgtctctaccaaaaatacaaaaattagccaggcatggtggcgggtgcctgtaatccaagctactctgtaggctgaggcaggagaaacgcttaaacccaggaggcagaagttgcagtgagccgagattgtgccactgcactccagcctgggagacagagcaagactccgtctcgataaataaataaataaataaataaataaataaataaataaataaatatttgatatgagtgatggactaaaaatctcaactaaatattcctgggactcttcattctgttctctaacagaaccttcaaagtgtattttggaaaaattccattaacacgctgcctaggctgaaataatttcatgatcagtttcatttttgcactcaccttgtaaatccagacctccaggcaggtgtcgggcagttatcagtggattaatctggtcagctgcttctggttgctgttttaaggttactacctaatgtgtacttttagagactctccctagtgtgctgtcacaaagaagtcgattggatttttatgtaaagaagggctcggtgagcctctaatccttaaatcattcctttgaccacattttatttcattgtaaatggagattaccacacagaggaatatctgatgctgtctggctgatccatttctaactaaacaattaagtcacttgtatgtcagagcatactctcagcaactggcatttccattacttcaggcttaccctgagactattttggaaatatttcatcttctgctattttttttctagacatttgttattttatttttagattgacagacaaaattgtatatcttcatctgtacaacgtgatgttttgaagtgcatatgcattgtgaaatgaatgaatgtagctaattaacgtatgcattacctcacataatcatcacgtttttgtggtgaggacacttaacatccactctctgagcattttgcaggaatacaatatattgttattaactctggttacaatgttgtacaatagaactcttcaatttattccttctatttaactgaaatcttgtaccctttgaccaatgtcaccccaagcaccccacctgcaactgcaactgcccccactcctctactctctagttccaggagattaatttttttacattccacatatgaaggagatcatatatttgtctttttgtgcctggcttatttcacttaacataatgtcctttaggttcatccatgttgttaaaaatggcaggatttccttctttttttatggctgaatagtgtttcattatgtttctatatgacagtttctttatccattcactgatggagtcaggtggattccatttttttggctattaggaataatgctgcagtgaacatgaaagtacaaataactctgacatactgatttcatttcctttggatatatacatgattatatccaccagtgggattgctggattgtatggtagttctatttgtaattgttttgagaaacttctatattgttttccataatggttgtactaatttttattcccaccaacagtgtgcaaggtgggtcattcacatcctggccaacacttatcttttgtctttttgataatagacactaatgggattttctcatacacatttaccaaacttcagtttgctgcagaacacaattaccagatatttcagtgggggcaagggttgttgtaattacaatttcacttgccttttgtgaatgtccctgtgataccaaggcatgggaatgacatgtgtagaggcagaacaatatcactccataaagatatcatctctcattgtgattttaatttgcattttcctgataattagtgatgttgagcatttttttcacataccagttggatatttgtatgtcttattttaagagatgtttatttaggtcctttgcccatttttaaattgggtttttcgttttcttgacttaagccccttaaatattttggctattaaccctttatcaggtgtatagtttgcaaatatcttctcccattgcgttggttgtttcttcactctgttgattgtttactttattgtgcagaagctttttactttgatgtaatactgcttgtctatttttgcttttgttgcctgtgcttcgggggtcatatccaaaaaatcattgcccagaccaatgtaatagagcttttcccctatgttttcttccagtagtttcatagcttcaggttttacatttaagtctctactccagtttgagttgattttcgtatatggtgtgagagaagagtctattttcattcttttgcatgtggatattcagttttcccaacaccatttattgaagagattgtcctttcctcactgtgtgttcttggcacttttgttgaaaatgagttggctggaaaagcctggatttatttctgggctctctattctgttccacttgttgtgtctgtttttatgcctgtaccatgctattttgattactatagatttgtagactattttgaattcaggtagtgaatacgtgctaattttcaattagcagaaagctcaagcaaaacaccctgagtataaatgaagcagctctttatgtggccttcacgaggattggactctcatagggcttggtttttgtataactcttagttttaactacatcctaaggttctagagaaaattctggagctgagacttagctatgcatttgtacaacttccttgtctgccaatctaaaagtcaatcttactgataatccctatttttcttttattcttatttcctcttaccattgtttagtagctaatatactatgtatttcacttgcttatgtgtttattgtctgtcaaccccatcatagctccatgagcatagcaccacgggggcagaaattatctactttgttcattgtcatagtcacagtgtcaagaaaagtgtctggcacattgcatgtgtataataaataattttgaataacagccagtcaccctattttatatatcctattttagtatcttggcatgggagataatttcatgagtatttatatatttgcaaactttggaagaaaaaaagaaaaaacactctatagaaggcaaattgagaggactgaaagtttagaagtgacaaacaacctagaaatagctacacatttttagtgatcaaaatcaatttttgtcattaatctggatttactaacttctcaaagttatcatggatgtaaaagtggctttaatctgctgatgctctgtggtgttctacaaaattgctaaattgcttttatgtgaaactggataagacataacccttctcctaccttttatattattttttagccatgagccaaatttttctagctaagccaatttaaaaaatattagaaatgcaaatgtattgccattgttctaaaatgtagttttaaaattccatttttcaaggtgggatttgtgattatgtgtgaggcgcttcattgtctctcagcacttcccaaccaaaatcagtccattttgccactcctgaggaaaggtctgctctgtgtgactcacagttacttccatgaatatttatcctgcctgtactgttggaatcaccttgagatcatgtacaattagttagggttgatagaattagtaatgttactggttgtgttacagcatctacgggtctcagtgaagtgggactcagtcccttctccccattactctattttctgtcccttcttgattctgcttgccattttgggggtgccaatttatttccttagtaaaaacaacagtagttatatattaagatacaactgtattatttgctttttttcttaaatccactattattttttgtcttttcattgattaaacttcaggcaaaactcatttggctgtgttgaataacattttgcaattttcttttccctgtgtctttcacactttgtagcattgtgctcatgtatactgtctttgtaagttcgaatctattaagtgatggttcgtcataaatcctgtataatacttgattttcatcatttatttatattttgtcacctgtactctcttgtcctgagtacaaagaatacacattcatctctgtaccttttttgtttattgatagtttatactttctttggacaacttttaaatgtatatttatttatatttgcttatccaatcttataaagaacaatttcacaagtagttagtccctgctcatcttcttttgatattcctaatatagtcttgtaatggattacttgggatatttattcctctgtattttaaaatcatgaatctcaaacatctctatccaccaaagaatcttttgaactaaaaaacgcacacagacagaccacatttttgaaggattcaatttcaaaataaagttagttcctacttagccttgcaaaatgaggtatcttctcttgataaagttgtgcaaataatgaatttcaatcattgaatattctaaaaatgtgttatcttgcctaagtaattgtttctatgcctttagctattaaaaatatgaaaacataatcctttataaaagcacatatttttaccttccatttgagtaatttttattagtcaaggaattttgtataggtatatatttggtgaaactttttaataaaattgtgtttttctggttataaaatgatgcagtttcattaaaaacatttataaagcagaaaaatacatagaatataaaaatcatccatattttcatagccagcaaatcattgttatcttaaaagtacatgtctataaacaataatttttaatggaattgggatcatttataagttcatttactacttgtctcttaacaataatgtataatctaatggttagtggaaaattcatcatatgatgttttcactatttaataaattcctcattcttagacatttagattgttttcatatttttcactgttatatataatgatgtgatgaacatttttgaaaataaataatcatagggttttctcttaactgccttacatacttcatttggagttaaatcactgagtaaaaagattcacatctcctcccacactctgccttctcttatgtgatttagtaccttttgcttgccttaatctctttctgcaaagtaagaaagtgatctgaaaaactaatttatatacagtgttgttaacttgtacgtgttttcctgcccctttcccttgctcagctgtcctagaccaattttgggaagcagactccacagacagaggtttatttgcaggagatttagtggggaatgttgtcagcaacaatacaattaagggagtaagggaagggggttgagcaggagaggctgaactcgggtgcaataacaggaaggtctccagccatcccaaggggagctctggagctcagaaggaccctcagagtgttcttgaattgaaatacatctctgaatccaacttcctcctgccactcccattgaccagtccttagtttggtatagggtgccttgggcaaggcagtggacatgctcagtagctgggtaagatgaggacttcatcccaaagtggccgtctgggcagtgaaccactgggtgttcagcgtatcagcctcgtggattttgtgttatcaaccaataaggggagagggggtgaagtgtaagtcaaaacagatgattctccactaggaaaattttagtctttcttgcctgttacctaaattggaaaatgtacatgaggaggatcttcctcagatcttgtcggcctctttctcataatcctgctctagaactcgaaatatcctgctctacgactcaaaaccaaacaaacattgttatttgttggtgaagggggcacctagaagcatttactgaccgagcagtgactttaacattattttatgtatcaatgtcaccagtttagaggatttcactatattaacaagtcctactgtgaaaataactatagtattactgattatataacaaggtgaaatactatattttgaccattaaactatttttttttaacttgggtgacatttagcaatttaccatttccagcaatctaaatgtttatgtcacagaaatcacatattaaattatctggaaatttatttctcaggaggatcaccaaggcatcagaaaataataataattaataacacaactataacaacttgacgttttataaggacaaagtatacaggttaatcactaatattgtaatttttttaacagccattgaactaaattttgacaattgaaaagaatttaattatgaactcctgatgatttgcctcccacctccaaatagtccacccatcattctttatgaaatatttattgtataggggctgggtgtggtggttcacgcctgtaatcccagcactttgggaggccaaggcaggaggatcacttgaggtcaggagtttgagactagtataagcaacagtgtgagatcctctctctaaaatatatatatataatttattgcataggaagtattttggggggatagtttaattactgttgtacctggttgtacttgatgaatattcacattttttctgctctctaaaatgaaaatttagtatcatttaacaacactaagagacatcatggaagcacaattctttattgccgtattttggaataggggtaaataggatgagagttgtttaaaatacattttactctgtctctcccactgagtgaaactatgcatcctggacagaatacataaagcagatatttgaggaatctaaaaaataaataatagcagatgtagtgggaagaagaccagaatttgttcattttttcctctggtatcttctggcttagactcaaggcagcctgacacctgagagagcaccttgtcatagacacacagctgcagacgccatttagttcagactcaaagagcatgaaagtgacctcttgttagtggcagtggtggcagtgaacgctctcagaggctttaaattctgaaggaagagaactttgatttgaggaaatctggtcccaagatggcagagcaaactttcatgctgtttttctatctccatcctcccatcacttagtgtggatgcagcggcaggaagtaggtggcagagaagggggtaaataaaaccccagctttttggctgcaggactgaaaagaggagctcctaggaaccagtaagtaggaaagagatagcacagagggagaagcttgggaaaggggcccaatggagttgtttacaaatttctgagctctttttacggccacagtcctctggtgaggactgatagtagaatagtatgcttgtttatgtccttatctggttggatgcagcctttattatttatttatttattcagcaaaacatcttgtccttgttggcaagatgctctgtgaaatgtgatggagtctttttctaaggcagagtgacttatgttcaaaggctctctttacatatgggctccttacttagttgctcagcatctcaggcttgccatctagaaaatggatagaattctcactaccgtcaagaagtgttatgaggattaaatgaattaatgtacactaagcaactgaacctaacaaatgtttctttccctgtggcatttggtttttagctttcctatccatttcctaagtatcaggcccttaggtttcatgtttagcactcctttaatctgtcaagtttactaagttgtaggataatttagaagcttcctaagaatcacatgttaaataaaaaaagaacaaaggtcttaaaggaaggagtgctaagataaaacctatggtaacctgctgccctttttcttacttctgaagagttgaggttgtcagaaaactaatatttagatatgggcttatctggttcataatattctaaacaacactgctaccattactattattaccaactaaaactatttaggatgtgtcaggtattgacattctacatatattaatttatttaattcttacaataacatgataaggtgggtaccattattattctaattttacagaatacataacaaaaacatcactttattgccctagtcttgttattcatattattaaaaaaacaactattgtgtactggtcttaaattaactataaaattagttaatatttggttatctctttaggataaaaactctagctaaaatgagccttaatatgggcaatgctttttttcctgctccataaaacagaccaaccctccttgcaagcttaaggctaaaaacccagaatgtaataacaactggaatgttggagatgcatcaaggtttttgcaatgtaaattccttccattaccttagttcaggtcctaagcttctctagtttaaattattacgattgatttctttttatttatttatttattggttttgagacggagtctcgctgtctcccaggctggcgtgcagtggcgcgatctcagctcactgcaacctctgcctcccaggttcaagcgattctcctgcctcagcctcctgagtagctgggactacaggcacctgccaccacacccagctaatttttgtatttttagtagagacggggtttcaccatgttggccaggctggtcttgaactcctgacctcaggtaatccacctgccttggcctgctaaagtgctgagattacaggcatgagctgttgtgcccagcctattacaattgatttcttactgagcataccaatctcttcttcattgactgcatactccaccctcactgcttgaattatttttattatttacatgcctggtttaaaaaataatggctgctcaataaagtaggacctttttctttcttttttttttttttgactgagcacaggggactttagtaataggacgtgacaaggtggagctccctaggcccctcccttttcaggtggtctgtgtggaaattgtgaagaggggagatcctcagtgttgtgaggtctgagtgcagcagggactccccagcagctgggggcctctctcttcctcttatactctcgctggggctggtggtccgggggccttattccttggaagccatgtgggccatgaggtccaccaccctgttgctgtagccaaattcattgtcataccaggaaatgagcttgacaaagtggtcgttgagggtaatgccagccccagcatcaaaggtggaagactgtgtgtcactgttgaagtcggaggagacaatctggtgctcagtgtagcccaggatgcccttgataggatcctctgaagcctgcttcatcatcttcttgatgtcataatatttggcaggttttccagatggcaggtcgggtccacgaccaacaccttggcagtggggacatgggaggccatgccagtgagcttcttgttcagctcagggatgaccttgaccattgccttggcagtgctagtagatgcaggtatgatgttctggagagccctgtggccatcaggccgcagtttcctgcaagggccatccacagttttctgggtggtagtgatgacatggactgtaatcatgagtctttcaacaataccagagttgtcatggatgaccttggccaggggcgctaagcagttggtggtacaggaggcattgctgatgatcttaaggctgttgtcatacttctcataattcactttcatcatgaacatgatggcttcagtagagggggcaaagatcatgacccttttggctcccctctgcaaatgagccccaaccttctccatggcggtgaagatgctggtggactccacaacgtactcagtgccagcatcgccccatttgattttggtgggatcttactcctggaagatggtaatgggatttccattgatgacaagcttcccattctcagccttgatggtgccatggaacttgccatgggtggaatcatactggagcatgtaggccaggtagttgaggtcaatgaaggggtcattgatggcaacaatatccactttaccagagttaaaagcagccctagtgaccaggcacccagtatagccaaattcgttgactctggccttcaccttcaccattgtgtctcagggatgtggcaggcgctgtgctgcacaagaaaatgcggctgtctctaatgggagaagggagccaaaatagggcttattctatgcttctaagaactgaatcctggcctcacttatttctctaatgctgtctcctctgactgaaagtaacaaacagaaagcccttgtccagtcacacaaatacagtcatcattcatgcctttgctgcagaatgtatctgtcactcttaattaagttgtgataataattttattgtttactatttattgaggacttacattgtaccagggtttgttctaagccctttatgtggacctattttatagataaaaaagctgaagtttagagaaatagtttgcccagcatcatacattctgtaagtggggttgctgagatttgaactctcggcattctaatacaagcctgagtttttagccatgatacatattgctacctgtttatttctcacattgaagaatggaaaggatcacactgacactgcaaacctaacatatacatcttgtttccaggaggcaataagataaattgcatggaaggtctgttgggaggaatttggatgttgttactgtcccttaccctgaaggtaattattaggtcttttgagcccagagcttggtaacagttgccagtgttgataagccaaaggtggggtattttcctttttcctctggttaaagatcaattcacttctttcatgttttctttttagctgatgataaaggagaagaataaaaggatgacagatgtgaatacttaatcacgttgcttaatattatggagtgacataaaaatatggtttgctttatctagacagatgtggttttataaaataatcatggtctttttgtttgccatgtagaataattatgcacaaaatgggagtgtacattctggaaaggtcatcttgacttttaaagggtttctttaggcattcatgattgtcactttctgatcagtatgggacaagttgggatacataaaactctattctgtgttaaaggaatatttcaaagattccatgtttaatgaaataaagtattgcctagaaattagagacttgtgattacttgcactgattcattctgaagttttctgaatgctcttttaaaaatctgtagctcttagtttcttatttctttcagatatcaagaaatgcggatttccaatgcacttagcttatgctcaatattaagtgaaataattaatttagcatgtccatgatgatactaaattagtaattcagggtagttaaaattgcagtggatgctgaactgatccaagaaacagtttcaaccttgtgaactggtttggaattagtagtctatcattaaatagtaattaaacatcaaaggcttgaaatggcccattatgtgcaacagaaagtttgtgtgttagaataagacacttgaattaatatatatttcataattttatatagcaattatgtggtgataaacagtataattattttattttttatgagttcattgtctacattttatattttacatagtagttatggagaaattgcctactctgtgatgataaacagaagactttttattatttttaaactcactttctaaaaatataacacaaaattggtttattttattttatttatttattttgagacaaggtctcactctgttgtccaggctgaaatgcaatggctcaatcttggcttgctgcaacctccacctcacaggctcaagtgatcctcccacctcagcctcccaagtagctaggactacagatgcaccactatactcagctaattaatttttttttttttttttttggagagacaaggtctcactgttttgccaaggctggtctcacactcccaggcccaagcgatcctctcatctcggcctcccaaagtgctggaattacaggcatgagccaccatgcccggctaattttcttttaaatccctatacagaatgtaatttgaatatggattttgtttttgtaactcatatttgaaaaatgtctcctttaaaaaaatcatacaaatattgaaagtatttgagattttttaacctaaatcaggaatttgttttaacatctgttatcagtcatctgaagccacaacacttggtttttagagccattccactttatgatgtgaacatgcatgatgcatgcaaggaagagtaacatttcatactatgtgcaaaattgtcaaaccttgtatctttggtatgtgggagattggggaagtgaaaaatgagtctgttttattaggggcagtggtatatcatggtgtatgggtcatcattgtgaatcacagggaaagtggcatagcatttgggattgatccacatgccaccagtaaatcttggcccaaatcaaatcgaaatagcacaggaattaagatagttaacatttggcagggcacggtggctcacgcctgtaatcccagcactttgggaggctgaggtgggcagatcacaaggtcaggagatcgagaccatcctggttaacacggtgaaaccccctctctactaaaaaaaacatacaaaaaattagctgggcatggtggcatgcacctgtagtcccagctacttgggagggtgaggcagaagaattgcttgaacctgggatggggaggttgcagtaattcgagatcgcgccactggactccagcctgggtgacagagcgagactccatctcaaaaaaaaaaaaaaaaaaaaaaaaaagctaacatttatcaatggttaattatgtacctggcacagttctaagtgtttaaagtgtattaaatcattaatcctcacaaaaaccttttaaaataaatactgttattaattagataccagcaggggtgagcattgtatagaggagcaaacaggtatggagtggttgagtagcttgctacacaactagaaagtggcggtgctgaaattgaactcgggcagtttggctacccagtcagcactcctaactattttattaaataaatatctccctcgggactttgattgaggtctaagtcatagaaatggtctgttttcctgaatttttcttcgttaagatgaaagttctaacttcctgccagtaaatgtctaatttatctggaatttgtatcttcaggatatttgagtcttagagtttgtttcattgtcccagtggtcagtctaatgttgagcttaagtcatttatgaattcagcccttttgtttttatgaagatgtagaaaatattctatggctttcttttccttttctttttgtagagacggagtctcgctctgtcgcccaggctggagtgcagtagcgcgatctctgctcactgcaacctccgcttccgggtttcaagcaattctcctgcctcagcctccccagtagctgggactacaggcacttgccgccacacccagctaaagaaaatattctatggctttcctgtgggttgctcctaagcttcctccaagatatttcttctttctcctctttccagaagcacagtcacccatctagcttgggctctctttagcctcctctgtagtaatcctaactctagtctccttacaatttattttctagattaacttaagcaatgttctgatcacaaactttactattgtctctccatttatcattatatacaatccaagtcccttaatgtgatagcccaatgtcttgttgctctggatctacctttcttttcttatcttaaaattcttaatcatcatggaagctaacatttattgagcacttactatataacaagcactgtgcttacttccaaacatacaaagatgaagaatagaacctactttctccctttgtgattatcacagggattatctcacttaatctttgtggaaaccatatgagctatgtaatattattaactccattttaatgaagaggagacaaagtcttgaagagtttatgtaacttattcaaggtcacaagagaaccatgtggtagatctgggattcacaccctcacttttaagccctatacaatactccccatgtcataaattttctaactctaacccatctttagacgtatggggctactcaccactccctttatatccctcacttttttctcttcattatcatgttttatgtcattttattctccttgtatgtaggtctcaatttttttccttatttctgcctattgagtaacaactgccttcaacctgtggatataattgacctctcccaccacagaaccaaagcttcatttattttcttaactcccatagtgctataaccttgtatgctgcttatacagactatatgatgagctttatcgagtgctaaaattttttttaagagtaaacgcttctaattatgtgtcataagtaagttctcagagaagctgattcagactttccaccaaagggttgtgttggtacagaaaacataaacatcaaccacattttagcacaattttcatcattctcttgtggtttgacttttctgatgatgtctaaacttagacataaaaggaaaccccgccttatatggatgacatggaatggaaaagaagctccatggctttcctgtttcactggtgggtttgaccttttccacacgtgcatttgctttgaactcctcctaagttaggtgctacgtgaatacaagttataattaacatgctttctttgggtctccttgaacaaaatgttctctctcatgatatgctatgcatatttactttgaatgaataatagttttgaatttggatttagaaagcagataatgtgactgaaatccatgtttcttctttgcctttaatctagggctgcaggatggggcccaaatgtgaagggaataaaacatgagagaaccttgtttagccacgagataaccagggataagagtttagcttataggctctaatcaaacgtgttatttttcattgaaaactggcgtatggtatcactatgcagctgttaaccagctgtttcctttctactggggttcttgtgtgctctctgctttaaatttatgtgttgcttgggatcccgaaggataaaatagtacttgtaggttcaaggtagtggttggaatggttgtttgcatgtttttagattttttagtttaaagcaacatgtttaaaatgttttcttctaattgctattgtgaatatgcaaatgtttatttaatcatgctcaagtgagagaagatatagaaacaattcataggctaattcaaaccatgtttttccctctcttgtttgccctacactaatctgccaagcctgtatgattgtctcagttctccatttagcaccgaagttagttttgaaccctgaaaaaagagacatttatatacttaattatttacatataataataaatatcgtggtcatgtaatggctacttcagtcattttatttccggaattggttccttccagtgggttcttggtctcgctgacttcaagaatgaagccatggaccctcgcagtgagtgttacagttcttaaagatggtgtgtccggagttcgttccttcagatgttcagatgtgtccagagtttcttccttctggtgggtttgtggtcttgctgacttcaggagtgaagccacagacctttgcagtgagtgttacagctcttaaaggtggcgcatccagacttgttcattcctccgggtgggtcgtgatcttgctgacttcaggagtgaagccacagacctttgcagtgagtgttacagctcttaaagatggcatgtccagggttgtttgtccctcccagtgggttcgtgatctcgctggcttcaagagtgaagctgcagaccttcgcagtgaatgttacagctcataaaggtagtgcagacccaaagagtgaacagcagcatgatttattgcaaagagtgaaagaacaaagcttccacagcgtggaaggggaccccagcgggttgccagggctggctcaggtggccagcttttagtcccttatttggccctgcccacgtcctgctgattcgtccattttacagagcgctgattggtctgtttttacagagtgctgattggtgcgtttacaaacctttagctagacacagagagctgattggtgcatttttacagagtgctgattggttcatttacaatcctttagctagacacagagtgctgattggtgcgtttacaatccttttgctaggcagaaaagttctccaagtctccagctgacccagaagcccaggcagcttcacctctcaatttcatgccttcactggcccgatgacagagtttcaccaacagaagaaaatctttcggtttgtcacagtgtgtatggtctgtggtcagatatgtcaaagaatggtaaacaaaggcctgtagacagtatatcagtgctatggtttgaatgtgtcctccaaagttcatgtgttggaatcttaattctcaatgccataggtttgagaggtgggacttttaagaaatggttaggttataagaccacatctggtctcatgaatggattaatgccattagtgcagcagtgaattagttgtcacaggagtgagttcctgatacatggataaatttggtccccttcttccccctctgtcatgctcttttgccttcctgtcttctgccatgggattacacagcaagagggtcctcacaagatacagccccttgattttggacttcccagcctgagccaaatacattcatgagccaaatacatttctttttttataaattacacagtcttaggtattttgttagagcagcatacaacagactaagacaattggaattcctactaaggattcacatggtatggagtttaaacataatggaatatgtttgtgttatcctttttattattggaaggttgagattttattattacaaggttgagattaggaaaataatacctaacaattataacacttactacacactaagttttctacatgtattaatttatttaaccttcttgataagtactgttaacatctttgttttataggtaaactgagacaaaacatgttaagaaaagtgtacatggttacacaacttgtaataatcagagaaggatttagatgttggtaggttagctctttactctgtactagactgccttgagttgttgcaaggagttaataattaatcagattactaatttcagaagtagtccagtggcatgtgcctctataattcctgtgtttggtatgtttgattaacttcccctaaacttttagaactctttttcatgattgctggggagcaccagtgtgggggcagcaaagcttctatctagaagatcagttaagtcaagataaggaattcacagtaggtgtattaggatatatcagggtgtactagtcaatgtcaaccaaatgcagagtgagttgagctgggattactatatcatgctccaacaattcaaagttttcatggggatctctcttttctgaaaccaagtctaaaactctcatacctctcatgtgaatttatgttaaatttcagagcattcaaagattttctcaccctaatgttcccttgaattaactagatcaaactgctgagctcataggaggggcttctgaaatatgtttgcttgtttgcttttgcttttggatagatggataagtggataattgagagaaagaaaaataaagttcatattaataaaattgtaacttgccatatttcattttgttaccaggaagtaatgacagtctttaaatgacttagtcttcctccaaggcattgtctcctgctaagcctcaataggcaggtagggaagagaagctattgagagagggagtgctctatagatagttttcttttttcttcctgaccacagttagcacagaatatggaatcatttaatctccatgttatctttggtgggggccaggaatataaggaggaacagaagctaaaataacaccaccaccaccaacacagagaagctaaaatgaaattactgagttaatgactgagtcctctataacagcaacttaatatattggctgtgtaggccatgttattaaattgtggttccagtgagtatcttagagcaaataactatagcaaaagtactattaaattcttagcaaaccaataaatccatacctgccagttaagggcaaaagatatctaatttacacatttaagatgtatacatgctacatttggtttcagagcattggtttccttggatttaaagtgcatttgtacattaactagaaaaaattggtagactttaacaataaggtgaaatactcaaacctgggaagaaatcagtaggctttaactataagtttaaagagccaaaacaagccaccaaatgaaaaagtgaaagctcatgtgtgctttacacatagcagacgtgctagaaataattgagtaaatgtagatggacatgaataggtggagaaaaacctatgaattaatggcaccaaaatctcaggttctacttggggaacgaggctctgccgtctggggaggtaaagtgagctagtaaaatgacatgatcaaccattgctaggataagctgtttagtcagaacactagctaaggtctcagctaaggagaatgagtaagtggtaatcatatttgagtaagtggtaatcatatttaaagactcagagatcaacagaagcaaactcctttattatttatttgttattattattggggatctcactctgtcaccccggctggagtgcagtggaatgagtatagcttactgcagtcttgaacccctgggctcaaatgatcttcccacttcagcctctcgagtagggtgtaaaccatcatgtccagtgcaaagtcctttataaggtggcatacttgccttgggtaaagacaaagatgaccagtgttggtgagcagtgttatccagtagatccagatgttttgctgtcaagatcaagaaagtaggtaaggcaaaagaacgggcccagtcagagcagaacacaggggctgcccttgggagaaaagtgggactaaacagcatttgggatcagaaaatcattttaatatgatgattcagggtattttactagcccactttcgaattctcttcacctaatcattataaagactcctatggctggtgattcagagagctcacaaagtctaaattgcatgtacaaaaggataaatgtaaaattttgcacttagcttaagaaacaagtggatgatgggtagggagaacaagctcagtcacactttgcaggaaaacaaaacaaaacaaaacattgcattaggaattttaaaatttaatcttaactgccacaagtcaactgtgtgacttttggcacaagatcttttaaaaccttaatttccttatctgagaaagaggatgttggaagaagatcgtctctgaggttcttcctggatttaattttgtagttctatggcgtcgagttttcttttaagtaccaattcatatgaagcaatgttgtgacatgtgatgccaaaaatctaattcattaggagaaatacagagactagattatcctactgtattcagtgtagtcgcttcatttggctggacaatcaagttatggttgccatatattttgaaggatattaaaaaaattataggagatctagaggaagttgactgaggtgtttattattgtagaaacaattgtatagaagaaaacatgagatgaactagggttcattagcccaggccagagaagaagggggcactcagtaactttcttccagtatcccctctcatagctctagatggaaggctgtaggaagattttccctaaaggctacataaaaagaaataaaaagacaaaccttcaaataattgcagtgttccagtagtaaactggattgctttgtgatgaaacgatttccctcacaaggatgatgttcaggcaaaagttgaaagaccatctctgcagggaaagctggatttgatgatcttgagggtcccaggcactcacaggtgcttccatcttatgatttgctcagtcttgacattagttttgaaattacaataaaaacaaatttatgtgctaatatcagaagtgataaatttttatggcaaactattttctgattaatcagaaataaaatattataattgtcaaaactcagacaatttcatttagttctatataaagaactattgaaaacagcaacatgatctggaggtttttacagttcctcttgctccttggcgtctttatccttcaagagcatttctctgagtgtatttctttcacatctaattctgtcttggtgcctgcttcttggagaatctgagttgacctagtaataaacacacaataaatattagcaattttctcttactctttcctctgtgactcaaaagcaatttgttttcttcctgtgaatagtttgtttactgttggtggatatagaattaaagtgagttagaattttatgttgtttttcctaacggaaccatggaaacgttcttgctgtttgatagttacaaaatgcctcctgattttaggcggatagtaacaatttagaattgaattgtaaacagcatttgggaccagaaaatcattttaatatgatgattcagggtattttactagtaaaaatacttaatatcacttagtatttagacttcacatctaactggactagatgactatttatgtgtagacaggacttagaggcggaacagcaggaggaaatgtagaaagtcaaacacctggctagggaaaagtccttacgctgtctggatttggtgtcagcctccgctctgtctccaccactagcatttccagccaatgcatccctgattactcaaagccaagcatttcctgcagagtagcaggagggataggaaacagcatgtgcttcctggtctgggaggtggcacaggactgcggggcagccagtaatagcaaacacctaaagcgggaaaggatttggtgaccctgtgaacagaactttgcttttcagcagaatgacacaatcatctgtagcattttagtctggatttaagtcataactactgagaacacactcactgtagaatctttgcttttggggcaccagtgtaataaggtagacaggactgatactgacttactcaggggagagaaacaaagatacacccagctcttccggagcatggggtgcccttggtggaaataagcaaacattatttttttgccctggggtcagttaaggtcattcaggaatcacttcattgagaaggacagtcttgaagagagtccaagagaaaaagcataaagttatgctttgagtggagggaagggtataatcattccagttaaagggaattgctgtcgatcacagctctgaagcagagagaatgatttgttaaccagggccgtgaacttaggtttacctttgaagttcttaaacactgtataaagctgcatattttaagaagtagagtgagccttaaatatttaaattatttaaatgtgtatctctcttgtagggcatgggaagaggaccatagtttctgtggcctccctaagatggcctgccacctctcctgatgctggtgacttcttgtgatggtggggcaatattaagtgtttgaaaaaggaagaagttcttattcccaagtgagagaccatataaacatagaaattaaagacaagggatttggatgaggtgtggatatgaattacagttttatttcttgctagtcatgtcaccctgggagagttacttcatctttctgagcttcagtttccttatgtaaaggaatggtgacaatattagctcctatcacaaaggatttttgtgagaattcagtgagatgtgccatgtacaatgtttagcacacagtgccagaaatattttatgggagcacagattcaaaaatgactaattagagcagttactgaggcgtctcagtgcaacagctgtgtttattattgaattgcctgcaaaaatgggcacacatggctttttaaaattttttattaaaagttagtaatttatgatggctttattaaaatacatgactagtgtaactggcttttatcacatagaacagtttatgttttcattagtgagacgaaaagaaaaagatttcctgcatcctgaattagagctatcatctgttaaaaatatttatgactaagaaacaaaagatacttgtttttacaagataggagctcaatatataattacaaaatgaatagattcacctatttattaaatacatatttgttttaaataatgataagtgctaatgggggatatgatagggattgggctgtgtgtgtttgtagatattgtagtgttctgaaatttagattgggcactagtcttaatgtctaaattccaaaattacttgaaaattgcaacttctattaagtgtgctcaacctaaaagtttccagaaggtttacgataacattcaagtttaaattcaacataattgcgaaaagttgtattttgtttattttcagagtttatgaactttttctgatgttttcctaatatatgaaaatgaaattgggaaaaaaagttagtttcagtaattggacctacatccttcagcgtggatttgtttccccgtttggctaatgtttcattgacctctacaaggctggcatttctagaataccaaccgagtaaattttagactctccacagttgatttttgttgaagctatcagaaaccatcaagaactcatttgataattataagtttttgtgtttgtatagtagttaatttgcaatcatgtgctgttttgttgaatgtttgaagttggcttgctattgatgtccttttctaggatgcattttccacatagaaaagaatacatgcctgagttctcaggtttatttgttcatttaaaaataatttatcaagtgcctatcatgtgctacatggttctagtattaaattgaaccccatgccactgtgggtattctatcctttttaactcaaaagtcagaaatttgatatagttcaacttattcaaaaacaagtcccctttaaagagctttcaatctaatataaggttttaggtgtataaaaaaagaatgcctctaaaagtttttatacttcattaaaaattttgtggccatggaattctaaaattctgtagatcagaaatatttctatataatgaaatatacaatgaaaatatttcagtataatgaagttatttccctgatgcaaggtctcatttagaagagtttgttttctgcatgaagcatccaaagtaataaatgatttcttcatccttgcgccgtgccgtatcatcaagaattacttatttgtccattttgttgtgatttttaaagctaatttagaatcaaaactgaagtgagaagttgaacagtagcccagttttgttcctgcttggaagaagtaattaatctttaacttcccgtatttctacctactctctttcaaaagcacaaataattttccttaccagaaacctcctaaatttcatagcattcacagtatacactgacatgatgtaggagaggtgacatgttatgtgcttgaattcagagttttttcccccgttctttttgatttaatgcctgaaaagagtagtggcatatggactctgttcttattcaaagcccaattatggtatgattcctggcaaaaacgttcaccattatacaagtccacaaagggctttgaattattgaccctactcagtaaacaagagagctccttgttgttggtcccactggggatgggggagcacaggcaaggtagtggaaggcataaaaaaggaaagcaaggagagatgaatatgcaaaatgctgttattttaaaccctcttgttttagtttacattcaaggaattgtatgtaatggagagggcacagaattaaaaactaaaatgatgggattccaagcaggctaaacttaaagtaccttcctaacgacaagcctacctgcctctgtacccattgtttccccctcccattttggttggaggtgacactccttgccattgggccaatcctcttaccaacatcagaagcccacttctttcttatcatgtttttatcatcctccttctcttctatatcttctccttctctctttctactggattttcctcatcagcatttaaacatatggaagtcttttaatttataaacatctctttatcctattttcccctcctgttaccaccctaatcctttccatctttacctgtgcataagaagtagcacagcaaggcaacacttgtctttactcaacagctccatttccttagctctcattcattaattaatcttcctctgaaagggctaaaccaaagttatcaatcatctccctgaagctaagttcgacaaacattaataagtttcttatcacttaccctcttatcaaagcacaacaaagctgaccatgccactccagtagatcctccactgacttggtttccatgatactagatccgtttggattgtctactgcctcttcagttgctccttctccttcttcatttaccagccagtgctcctcatctgatctgaaacgctggacttcttcaagcttcaatcttcggctctcttttcttctccttagaccaagatttctcaatagcttttgggtcttaaagaatccttgacaaaaaattattgctgaacttccagtatatcagcatgatcagtaagttgcagacataataaactaaaaatactattaatactcttttggagatagaatgatagttttctatggatatgtttattttggctaatattatcagcccactcattttgtgtggttctcctcccactaaggatatcaacttgaatgtaagtcaatagtatgagtagcgcaaactttagtttttctttttttttttaaattaaaatttcttctggatttttaaaaccttatccaattagacttaaaattcttattacaaatgtctactatgtaattagtatgtaatctcaacattttaggaggctgagaaaggaggatcatttgagaccaggagttgaaaaccagcctgctcaacatagtgagaccctgtctctacaaattaaaaaaaaattagccagatatggtagaacttgcttgtagtcccaactacttgggaggctaaggcagaggatcacttaagcctaggaatttggggctgcagtgagctatgattgtgccaccacactccagcctgggtgacagagcaagagtccatctaaaaaaaaaaaaaaaacaaaaaatgaccaaaaacccccccaaacccatacattctactataaaaaatgcaaacacggtatggtatgtggtacatggtgaatggcaagagtgctttttccctatttacaactaaagatgacttgttagctaacctttcttgaaaaaagaaaggcaataagcttagcttgtcttttaaaaatttaattcctttattttcaataattcttaaaacccatgggttaacatagtaaatttctgttaataaataactggcttaagccaaaataatttttaaattgtatttacttagaagcattcaaaatgtcaacaacatggctgcaactgtttttttttttttacaattatagagttgtattcagttatcaaaacaacaattattttgtataaactgcatcagagacaactgaagatgaaagaactaccatctccacatataactaatttgtgcagtgcaccagaaagaacctgtttaaatttccatgccaatttgcaacccccatactgtgccaggtaaggttagtggctattgaaaatactacctggacagggctatctaaagacacattggatagtgtgttaactatataaaaaaagacactgtacaatttaaaaacaaattttatacagacttacatttcaatttgtttctttaaaaagtagtcagttgtgtacaggggggttaaatgcttttaagacaagaaaaacactgcactagaaccaacttattaacattgtcattatctcctcctcctcctccttctcctcttcctcctcctccttcttccttcttcttctccctcttcttcatcttcatcttcttcatctttttttcatcttcctcctcttccttcttgttcttactccctttttttttggctacatcagtctttcctttagcttactgtgcagcaatattctttgggtatttttccttcagccttgcatccttctttttataaggctgcctgtcatctgcagcagtgtcattccatgtctctcccagtttctttgcaacaatggataggctgggatgttctctttcgatttttgggtgatactcagaaaagaatgaggccaaaggaggcctcttgggtgcattggcatctttgaacttcttttttctttcttctttaggagggacatgggtttcatttctcttttgtaacgagtattgtctacctttgccatgtcttcaaatttttctttcttcttggcagacatggtcttccacctatctgggcacttcttagaaaactctgagaaattgaccgaacatttgggtgcttcttcttctgctcctcccagcaagtttacacaaagaatgctgtgaagatattttgcctcttggcttcttaggctctcctttgcccaagtttagttatttttcctcagcaaggcacagaattatccagaatcacccagtgcccatctggttctcacttgccctggcattgtctttatgcagctcaatgaactacaactgagatttacttttttaaaggtaaacttgatagatttaattaaataaaatttgtcagttgaatttaattaatattatttacaacacaaagatttgttgggaatgctgaatagtaaacctcttaaaataataagtcaaagcagtggaaataaaaatacagcttaggacatatataaaagtcaaagtcttacagattgcttgttggaatgtaaaattgtgttgtcactttggaaaacagttctgcaatttctcaaaaattaaatataggttttcatgtgccccaacaatttcaccactaggtatatactcaagagagcaaaaacatacgtttacacaaaagaattgtacatgatgtttatagcagcagtatttataatagccaaaaattacaaatctaattgtttatcaactaataaatgaataaataaaatgtgatatatccataaaaaaaaaagtcaaagtctttagtataaagctgtaacaaatcattttctttgtgagtgacatgattaggctcaaatatagacctagaagttacaaaattgttatgcagatgtgtgttggttttccaatctcttttataggcctaaatatttttaaaagtattatttgaaccaaaaggaaagaatgaaatttacacatgtaatttcaaacttggtttttgctgcaaaaatactcaattctaggtcaaatatatgaagtaagcattcaactacttcattttcaactatgatcagacaatttctgtccttgtttttggtgtttcttaaataagaaaatgttgctcataaatcaaaaaagttgaaaaccacagcaaaatattcactgcttcactgtaaatggcaggatactctgtcttcacagaaacccagaactcatataggggcagaactcttattgtcatttgtaagaataatcagacttcatctcaaagttcttcctcttctctgaaaatcaagttctcatgtgaggagaaaatctagagaaagcatccctcaccaagtcagacacttggattgaagggaaaagtacactcagtgttgctctgcagttctctggatggttttcaatatgctcatatcctccttcaatttcaagcccaagcagcagttgaaacatttcacaatttccttctgtgacttgttttttcctaaagattcaatttctttaaattcaagaatcctgtcatttgaaacaaaaaaaaagtttctgggccatacaaagacttgttcatctggataaggtgatggaaaatggctgctaaatagcctagtttctgcagccattctttatcttgaaaccctctagcaaaatctgacctactaatttcttgaaagtgctacctttcggttcaaacaccctgttgagaactcttcctctgctaactcactggatgtagaataaggtttgttaggtggcctccaatattctcataccatcttcaagccatcttcagtgaactggtctgtgtttaatagtaatcatccttgtagcattactcagatttttttttttcattttgtatttaagagttttcaacaccagtagctctctggaaataagtcagtgtcttgtgatgtcagtgtgaaggtgaattttcttggggcaccatcaacgcagatgccagtgccattcttgcaaaatagactttctgttttcagatataaagatgaagagaaaaagtatcttgtcctttacttgttttgggcaacatcctgcagtagaaaaaaaatgttcttaaatttcaacattatttataaatcttacaagtgctacagcatgatgtttattggtgaaatttgtttattcatcaaaatggacaaagaagctgtaatttttcaatgtattataaaaataccttcagcatcatgtggcatgccatcagtatgtcagcttattatgctgattgagagcgtgactttttcagttgcttgtatggaatctcattctagcattttcctaattatgaccttacctgctatcattattaagttctcaccaactatgcaacttttccttttctaggctacactttgtgctttggataactccaaaataacttgttttcagagccttttccttgagtgtgactgttttttagaacaaaatatttattttgtttgtttgagattcaaattattgtttaaaataatcagtatctttatttgttaaatggctgtaatttgtagttaaatgtcttttcaattttgctagttattgctgcatttttagttgtttggtattgactgtgcacaatagaatagatcaacttggatgtaaaactcattgttaagtagctttcattgtaaaggtgaactttcttttggattctctgcactgggggagtgaattgactcaaaagattttatttccttatccaaccttatcaaaactgtccagaagcctaagcctagaatctttcttttctatctcatacttcatcttcagaaatcatcaacccaatgttcagatatatttgtgaaacacaaatgcagataaaatataaaacagaaaggtacagcagggcacagtggctcacgcctgtaatcccagcactttgggaggccaaggagggcggatcacaaggtcaggaaattgagaccagcctggccaacatggtgaaacccgtctctactgaaaatacaaaaattagctgggtgtggtggcacacacctgtaatcccagctactccggaggctgaggcaggagaattgcttgaacccgggaggggacattgcagtgagctgagatcatgccattgcactccagcatgggcgccagggccatactccacctcaaaaaaatgagacaaaacaaaacataacaacaacaaaaaacaaaacagaaaggcacaatacctgagaaaatctcaagaaatgcaaaacctacaatacagtctatttttaacttaccgaattcacattcagcacttattacaacaacaagcagcagggatcagatgagtcttggtatgtataagtatcttctttagggtgaaaaggtcccactgattgtctgttacacctgtagagcttatttttttccttgtcagtaggttgtatataaagggaggtgggaaaggtaacttggagggagaaggtggacatcattttcctgccttcctcacctttgtgcagcataacactcaacagatatccaaggcctccctcacctggcatcaatatctgagaatggatgtatctaaataaatattgtcctatgtacattaggacaaaatctgatgtttaatatctctgcaatcagtatttcacatggaagctctcgagacatttagcagcccactaggattctgtagaacttctgttgagaaaacttgttgagacaatcttacctacactcatggcttcagttatctaatgctttcaaatttatgtctcctgttggttctggatttaaaattgctgactcgccatctcctcttgaacatttcataggcacatcaaactcagaatgcctaaacttaaattctcaattgtgtctctactccctccccaaccatgcaaaaaagaaaattgtgagccacttccagtgttgttcccctcagcaaatggcaccaatgtccactaactgcacaccccagcaacctggacatcattctttactcatttcccttaactgtacctcctattccatgtttaatcagtctctaattcctgttgattctgtttactaaatgtcacaacattgaatcttattctatatccccaccactctgaatcaaactattcccttttttagggctgaatttccagaagagtctcttaactggtctttgttatctactatgaaaccagtccaagtcattctctactttgttgccaaatcttatcacgtttctccctgcttaaaacttctcaataactaccagcacattgctcttaagatgaagaccaaaatccttaataggacatacagtgatgtgcgtgatcatcccctgctaacctcttctctgccttctcccttcccttattgtattccatccatgaagacttatcaatcccctcttttaagaggctccctcacgctgtcctccctctgtttatacacctcccactcctttcatctcactcttactcatccttcagatctgagtttaaatgtcatttcctcagagaagcaagaagttccttagtactgtgtatttctgcctaatttcacttaccacaattctaattgcacagtttgttggttattatctatccctgaagcaactctgattgctcttgaaaggcagggagtgcatttgctgtgtttaccacctatctccagcattaacacacaataaaaacaattggtgggacaaatgagtaaatgaattattaaattcactaatttgcttctttcatgctattgctctcaagtttaggaataaaattactatactcattacataaaagaaatatgaatttctaattttagggttttttattagttgaactttttactataagcaaaattgcttagcatttgaaatacctttttaaaaaatgttgcctagtctaccatctcatgtatgttgtaagttttatgtgattaaataagttttgatatgcagcaaaataacaacatgaaattgtaaattatactaatagtctgtgacttaattagcatgaaaaatcttcccatttatttataagaccaaataaaaatattaacttgagattagcactgcagctgttgaatatttcagtgctattaaatattggaggacataatttaaaaatgtacaaagatcatacacagatcgttttatagttttatttttcttactattatttagaaaaagacattttgaaatcagtgtttcccacaaagaaaaatacttaaatatgtaattttaatacatgcatatgccaaaattaatatttatttatttttgtttggatataagccaacatagacatgaatgtagctcttttctcctgagatagaagaacacactattgaaattcaatcagagcatccagatgtaaatgagctgttcatctatagcccacaggatgttcactttggcttcaatccttccagactggatccataccaagactttctattattactattaattagcagttctggcaaaattaaggaatattgttatgtcagcttgaaatcctttagactgactagtgatctcaaaaaaagttaagacttgatcgataattattccaagcatgatgattaaaaattaaattcctgatgtgatccatgattttttttccctctctcactctattttagaaaaacagggtaggtatttattagagaggaatctaaaatcagaggtagaaaagggcatggattttaaggtcttctctgtcttcatttagtcttccctttctttccacagattatagatccagactcctgtgcctgaccactgcccatggccaactctctgctgatgactggacttgactacacaagttgttgggtactttgactagaacaccaaccaagtcattggaaatataatgctttgttctttctagctccaagatatgaacatgtgacaacccaaacaaacaaaatcccaacaaggttgtcagatatgcaaattacagttgacccttgaacaacagagagggtagaggtgctgatcactggcacagttgaaaattcaaaagttttgactcccctaaaacttaattactaataacctactgttgactagaagcctactgataatataaacgatttattaacacatattttatatgttatatgtattaggtactgtattataataaagtaagctagagcaaagaaaatgttatggataaaatcataagaaagagaaaagatatttactctccattgaatagaaatggctcatcataaagatcttcattctcaccatcttcaaattgggtaggctgaagaggagcaataagagaaggggttggtcttgccatctcaggtgtggcagagacggaaaacaatccacgtataaatatggacccatgtagttcaaacctgtgttgttcaaaggtcaactgtatttactttaaattacttgtctgacctgagattttcctgaccataatccaagagattgacacctttctaaagtttgttcttatgttttccaaaatgacaacttgttttccagaagttagcagccaccatgttttaagacagaaacagcctgaggttctcccaaggtctattgagcataagagttttttgccttctagtaaaataaacccatattcgcagagtgtctggaccagaaaatcttccacattatcctgtgttcaagtattaggattgtgcaatacatttcttagaagaattctgcctactactcatgcaaacaccaaacaggacaaatacaaaggcgaccacatctagacatgtcatattcaaactgctgaaaactaacaacaaaaaacaaatcttagaaggaaaagaaacctcgcatggggaaacaatgatctaaatgatagccaactttgcaggccagaagacagtgaaatgatacctttgcagtactgaatgaaagacaaagtcaacatagaattctatgtccaataaaaatatcctaaaaaagaaggcaaaataaaaacatttctagtaggcaaaagctgagagcactagtctttggtagatttgtactacacaaaatgccataaggaggttttcaggctgaagaaaaaaataccagttgcaacctaaatgaagcatgaagagtactagaaacagcgaagattaaagactattttaacatctttatttttaatacatatgtacctataaattttaacttcttcaaaaaattgactttttaagatataaataataacaatgtattgagctgcagcatatgtagaagtaaaatgtgggaaaataacagcacaaggaccagaagcatagatacatagaattatatatttaccaggttcttacattgtttgtgaagtaatataatattattttaatgtagattgggataacttaaaggtatatatctttaagatatcatatattctatatatcatatatatctttaagatatcatatattctatactgagcaatctataaaaaacaaagaagcatatctaaaaattcaatggatgagattaaattaaatactaaaaactactctattaacccaaaataagacaagaaaaaagggatgaaatgagagacaaattttgcaaatagaaaatcaatggtaggttataacccaatcatattaataattacactgaatataaatgaactaagcgctcaccccaaaaaaagtgattgtcagataggaaaaaagaaaaacctatctatatgctctttataagaaacatatttaagacagggtgcagtggctcgcgcctgtaatcccagcactttgggaggctgaggcaggcagatcacgaggtcaggagtttgagaccagcctggccaacatagtgaaaccacatctctatgaaaaatacaaaaattagccaggcatggtggtgcacgcctgtggtcccagctacttgggaggctgaggcagaagaatcacttgaacccaggaggcagaggttgcagtgaaccaagatcatgccactgccctccaatctgggcgacacagcgagactccatcttggggaaaaaaaaaaaaaaaagaaatgtatttaaataaagtgacacagtcagatcgaaagcaataggttggggaaaaaaaaccatgaaaaaatgaagtataagaaagctggtgtggttatataaatattagtcaaaggagatgtcaagacaaagattattaccagagatagagaactatatgcatgatgataaatggattgattcatcaagaaaacataacaatcttaactgtgcacctaatgacagagcataaaacaagaggtgatagataggacaaaaggagaaataggcaaattctcatttagttagtgtgatggtttggtttatatgtcaacttggctaagctacagtgcccagttatttaatcaaacaccaatttaggtgttgctttgaagatatgttgtccatgtggtgagatctacaatcagttgactgaaagtaaaggatattacttgatgatgtgggtgtgggttcacctaatcagttgaaaaccctagagtaaaaccaggtttcctggaacagaagatattctgcctcaagattgaagcactggctgggcgccgtggctcacgcctgtaatcccagtactttgggaggccgaggcgggctgatcacgaggtcaggagatcgagaccatcctggctaacatggtgaaaccccgtctctactaaaaatacaaaaaaattagccgggcgtagtggcgggtgcctgtagtcccagctactcgggaggctgaggcaggagaatggcgtgaaccccggggggcggagcttgcagtgagccgagatcgcaccactgcactccagcctgggcgacagagcgagactccgtctcaaaaagaaaaaaaaaaagattgaagcactaacacctacctgagtttccagcctgatggcctatcctattgatttcagactcgacagctcctaaaatcacatgagccaattcctttaaataattgtcttaatacatagatatgtatatcttctattgtgtctgtttctttggagaaccctgacttacatagtgctgttaacatcgctttgtctaagtagacaatataatcagtaaatatagaaaagatttgaacagcattattaaccaagttgatctaattaacaaatgcagatataaattatttcaagtactcatggaacattcataaagatcaacatgtgctgcatcaaaaaacacatctcaacaaatatcaaagattgaagtgatacatagtatattttgtgaccacaacagtattaaagtggaaattagtaataaatgtaagtagaaaatccccaacatttagaaattcagcaatatccttttaaataacccatgtgtcaaatgagaaattatgttggggattagaagattgtttgaactgattgataatagaaaacattataaatgggtgagatgcggctaaagaagtgcttacatggaaagttatagctttacatgcttatgtttaaaaagaagaaaggtttaccatcaatgacctacttctactttaaaaacctagactaaaaacttctctggtttccattgtaacatgtaaggagtttggaagtcattactgcatcctaacaacaaacaaaaagctgaaaagggcctggaaaataaaaacttgtctcagatctatcagagaagtgaggtcacagggcaaactactgtcctaaaaattagagagactgaatacagagaattacaacttaaaggagaagaaacccacaagcagaaacctccacaggaaccagtgctgggctatataaacctaaactctaattgacaaattcttagagccttagtgtagagaaatctaagagttaaaacaccatgggaacccagtcatatgggaacccacacaccttcatgagtttaccattcagagattgaccctattctcccagtagatattgaagaaaaatcctctcatgcttctgtcaggggaagggggaaagtaatcatttaaaagtataccagagcatgccattcttcttaacaaggcctgtcctcaggagaaactatttttaccagagcctaacctattggagtttttcagagcccaactgactgagggaaaggaaatattcaactctaccccactctagccatcctcttctacctaaaaggggagaaaagtgagaagcacatacaaacttcacagtccagaggcacaggctcactaaaacattgagtgctcatcacagtactaaagaaatctaccctgacccacactgtcccaccacatcactaaaggcctatttactgcaattccttttacccagtccatgttcacctttcaacaaagaaattataaagcatacttagaggcaaaatgtgcagtttgaaaaaagtaagcatcagacccagagttggatatagcaggatgttgcagttaccagattaggaattttaaaaaattatgattgatgtgttaaggactctactggacaaaatagagaacatgtaagaatggatgcatgatgtaagcagagtgatggaaattctaagacagaataaaaaagaaatactaaaaaaagaaatgctagagataaataaccctgtaacagaaatgaagaatgactttggtgagctcattagtggactggagatagccgagaaaaaaaactgtgagcttgaggatatgtcagtagaaactttcaaaactgaaaagcaaagagtaaaataccaaaaacaatgaaatggaatatctaagaaatgtgataaaactacaaaaggtgtgaatacatgtaacggaaatatcaagaggagaaagagcaaacagaagcaataattgaagcaataaggacacagttttccccaaattcctgacagatatcaaaccgcagatcccggaagcagagagaataccaagcaggataaatgcaaaaaacaaacaaacaaacaaaaaatacccaaaccaaaaaaaagcctatacctaggcatatcatattcaaattacagaaatcaaagacaaattcttgaaagaagtcataggaaaaaaataccttatctttagagaatcaaaagtaagaattacatccaattttctccaggaatgcatgcaagcatgaagagagtagagtaaattatttatggtgtgtattagttcatttcatgctgctgataaagacacacccaagactgggtaatttataaagaaaaataggtttaattgactcacattctatgtggctagggaggcctcacagtgatggtgggaggcaaaagtcatgtcttacatgcagcagagaagagaaaatgagagccaagtgaaagggtttccccttataaaaccatcagatcttgtgagacttactcactaccatgagaacagtatggggaaaactgtgtccatgattcagttacctcctatagggtccctcccatgacacatggggaattatgacagctacaattgaagatatgagatttgggtggggacacagccaaatcatataattctgcccctggctcatcccaaatctcatgttctcacatttcaaaaccaatcatgcctcctcaatggtcccctaaagtcttaactcatttcagcattaactcaaaagtctcatctgacacaaggcaagtcccttctgcctatgagcctgtaaaatcaaaagtaagttcgttacttcctagatacaatgagggtacaggcattagatagatacacccattccaaatagaagaaataggccaaaatgaaggggccaaaggccccatgcaagtctgaaatccaacaggacagtcaaattttaaagctccaaaatgatctcctttgacttcatgtctcacatccaggtcagactgatgcaagatgtgggttcccatggtctttggaagctctgcccccatagctctacagggtacaggctccctcccagctgctttcacaggttggtgttgagtgtctgtggcttctccaggcacatggtgcaagctgtcagtggatctaccattctggggtctggaggacagtggccctcttctcacagcttccttaagcagtgccccactggggactctgtgggggcttcaaccccacattttccttctgcacttccctagcagaggttcttcatgagggatcatccctgcagggaacttcttcctggacatccaggagtttccatacatcctctaaaatctaaccggaggttcccaaacctcaattcttgacttctgtgcacccgcaggctcaacaccatgtggaagctgccagggcttggggctttcaccctctgaagccacgacctgaaccataccttgaccccttttaaccacggctggaatggctgggacacagggcaccaagtccctaggatgtacacagaagaggggccctgggctccacccgcaaaaccattttttcctcctaagactctagacctatgatgggagggtctgctgcaaaggtctctgacatgccctggagacattttccctattgtcttggtgattaacatttgactcattattacttatgtgaatttttgcagctggcttgaatttctcctcagaaaatgggattttctttcctattgcattgtcagtcctccaaactattccaacttctgtctgttacccaattccaaggtcacttctgcatttttgggtatcttttcaggagcatcccactctactggtaccaatttgctgtattagtctgttctcatgctgctgataaagacatacccaagactgggcaatttataaaagaaagaggtttaatgaacttacagttccatgtgcctggggaagcctcacaatcatggtggaaggcaaggaggagcaagtcacctcttacatggatggcagtaggcaaaagagagagcttgtgcagggaaactccccttataatatggtcagatcttgtgagacttattcactattatgggaacagcacaggaaagacctgcccccattattcaattacctcccaccatatccctcccacaacatatggaattcaagatgagatttgggttgagacacagccaaactatatcagtgcattaaggattgtcatgtctttatggggtattgacccttttatcattttgttatgtccctctttatccctgataactttccttgttccgaaatttgctttgtatggaattacatagctactcctgctttcttttgattggtgttagcataattatcttcactcgttttcttttaatctatatgtgtctttatatttaagatgagttttttgtagacaacaatagtttggccttcttttttgatccactttgatatatatattttaatcagtgtatttagaccattgagttttaaaatgattgtcaatggatctggactcatatctaccatatttgttaatgttttctattcatttaccttgttcttattttgtcttcttttctgtttctgccttttgtggttttaagtgagcattttatatgatttcattttctctcctttcttagcataacacttgtacttctttttgtactttttaaagtgattctcttagtttgtaatatacatttacaactaatccaagtccaatttcaaataacactttaccacttcatattattaccagtactttgtaataaaatattccaaacttctctctcccataccttatattattgttgtcatttattttacttatacataagcatacataagtatcataagcttaaatatatctatatctatacatatgtacccacataagcatacataataaaatatatagattttttaagcaaactactatgttagatcaattaagaataagaaaaaataaaagtttgcattttacttccacttatttcttcttgatgctgtttttctcttttcatagatgagagtttctgaactatatcatcttcttctctctgaagaacttctcttaatgtttttgcaaggcactcctagcaacaaatgcactccatttttgtttgctgagaaagtcttgatttctctttcacattttcttttcttttaattcttcacttttgaaagataatttcacaaggtacagaattataggtggtggtggggtttctcttaacatcatgatatgatttggttgtgtccccacccaaatcttatcttgaattgtagctccatgagcggggctctcatgaagaatctatgctagggcagtgaggaagggaaatgtggggttgaagcccccacacagagttcctcctggggcaccacctagtgtagctgtgagaagagggccaccgtccagaccccagaatggtagatccaccaacggcttgcaccatgtgtctggaaaagccacagacattcaacaccagaccatgaaagcagctgggagggaggctgtaccctgcaaagccacaggggcagagctgcccaagaccatgggaacccacctcttgcatcaatgtgacctagatatgagccatggagtcaaaggagatcattttggagctctaagatttgaccaccccgctggattttggacctgcatggggcctgtagcccctttgttttagcccatttctcccatttggaatggctgtatttacccaatgcttatacctccattgtatctaaaaagtaactaacatgcttttgattttacaggctcataggcagaagggacttgccttgtctcagatgagacattgcactgtggacttctgagttaatactgaagtgagttaagactttgggggactgttgggaaggcattactggttttcaaatgtgaggacatgagatttgggaggggccaagggtggaatgatatggtttggctctgtgtcgccacccaaatctcatcttgaattcccacatgttgtgagagggacccagtgggaggtaattgaatcatgggggcaggtcttccccatgctgttctcgtgatagtgaataagtctcacaagatctgatgatattataaggggagtttccctgcacaagctttctctttttgcctgctgccatccatgtaagatgtgacttgctcctccttgccttctaccatgattgtgaggcttcctcagccgtgtggaactgtaagtccattaaacctctttcttctgtaaattgcccagtctcaggtctgtctttatcagtagtgttagagcagtctaatacgtgcacataaaaacagagtgtcaaaatatgtaagcaaaaactgatacaagtgcaaggagaaatagttaaatccagtattattattggagattttaacacacccctctattagaaatggacaggtccagtaggcaagaagatcagtaacaacagagttgaactcaacaacaccatcaatcaactggttataatggatatctattgactacttcatctaacaacagcagaatacacattcttccaagcttacatggaacattcaccagtatagaacatattctgggccaaaaaacacataccttaacaaatttgaaggaataggaatcatacaatcaatgtcttctctcagactgcaataaaattaaactagaaatcaaaaacaggtagttggaaaatccccacatacttagagattaaacaacatacttctaagtaacacataggtcaaagaagaaatctcaagataaaattttaaatactttgaactaaatgaaaatgaaaacacaacttatgaaaacttgtgggatgcagcaaacatctcacaagtttttaaaatgcgtaaagggaaatatacacagtagtacttcctcatttgcagttttactttttgtggtttcagttatctgtggtcaactacagtctgaaaatattaagtgaaaaattccaaaaataaacaattcttaagttttaaattgaatactgttctgagtagcatgataaaatctcttgccttcccacttcatcccctatgagatgtaaatcctcctttgttcaccttatatacattcactacctggccattagtcatttagtagcagtcttttttttttttgagacagggtctcactctgtcacacaggctggagtgcagtggcactgtcttggcttactgcaacctctacctcctgtgttcaagtaattctcctgcctcagctctgcccccctccccccagccccccaccgtccctgagtagctgggattacaggcaggccaccatgcctggctaactttcgtattttttggcagaggcggggtttcaccatgtgagccaggctggtctcgaatttctggcctcaagtgatctgcctacctcagcctcctggagtgttgggaatacaggcgtgagcagtcttggttattagattgactattgtgatatgaccgtgcttgtgttcaagtaacccttattttacttaatggctccaaagcacaaaagtagaaatgctggcaattcagatatgaaggaagccataaagtacttcctttaagtgaaaaggtgaacattcttgacttaataagaaaagaaaaaaattatatgctgaacttgctaacatctacggtaaaaatgaatcttctatccacgatattgtgaagaaggataaaaaaattcatgctagttttgttgtcacacctcatgctgcaaaagtatggccactgtaagtgcctagttaagatgaaaaaagcgttacattttgtggctggaagacagaaatagaaacatattctgatttacagcatttaggctgggtactatccaaggtttcaggcatccactggaagtcttggaacatagcgcctgtggataaggggaaactactgtagtattgaatgcatatattaggaaagcagaaagatctaaaatcaatcatgcaagcttttaccatagaaaactagagaaagggcaaattaatccaaagtaagcacaagaaacaataaatattagagtagaaattaaagaaattgaaataggaaatcaatagggaaaatttttgaaaccaaaagctgggtctttgaaaagataacaaaactgataagcttctagccaggctaggaaaaagaagggcacaaattactacttttggaaggaggagatttcacttcagagcccatggacattggaaggataataaaggaatactatgaataattctgtgcccacaaatttgataacctaggggaaatagatgaatttcttgaaaaataaaatctgataaaactcacacaagaagaaatagacaatccagataggcctagatctattaaaggaatggaattaataattaataaccttccaaaacagaaaccatgagaccctgatcagttcactagtaaattctaccaaatacttaaggaacaaattatatcaattctctacagtcttttctaaaatatagaggcatatggaatatttactaactcattctatgaggccagcttcaccataatgtcaaaatcagacaaaaacattatgagaaaagatcaatatttcttatgaatatagacacaaaagtcctcaacaaaatattagcagactgaatcaagcaatgtataaaaataattatattccatgactaagtgggatttatcccaggtatgcaaggttggctcaaatttgaaaatcaattactgcaatccatcacatctacagactaaggaagaaaaatgacatggttatatcaagagatgcagaaaaagcatttgtcaaaatacaacacctatttgtaataaaaactcagctagaattttagaggggaactccctcatcctgataaagaacatctacaaaacccctacaactaacataagacttaatggcaagaaactaaaagcttttctactcagatcaggaacaagacaaggatgttccttctcaccacttcttacattttactggaaatcctagctaacacaataagacatgaaaaggaaataaaagatatattgatcgagaagaaataaataaaacagtctttgttcatggataatatgattgtcgaggtaaaaaatctgaagaaatcaacaaaacaattcctggaactgatatgtgattatagcaagattgcaggatacaaggttaatgtacaaaatttaatgtcttttccatatgccagaaatgaaaaagtggaatttgaaattaaagacaaaaatcctttcagattagtgcatccccaaaatgaaatagttaagtacacatccaacaaaatatgtacaagatctatatgaaaaaaaactacataactctgatggaaaaaaaaatcaaggaactaaataaatggagagaaggccaggtgtgatgtctcacatctgtaatcccagcactttgggaggctgaggcaggtgcatcacatgatgtcaggagttcaaggccaacatgaccaacatggcgaaaccccgtctctactgaaaatacaaaaattagctgggcatggtggtgtgcacctgtaatccaagctactcgggaggctgagacacgagaatagcttgaacccgggaggtggaggttgcagtgagtcgagatcgcaccattgcactccagcctgggtgacagagcgagactccatcaaaaaaaaaaaaaaaagagataaattaagagatatttcatgtccatgcaaggaagagtcaatattgttaagatgtcatttcctcccacattgatctacagattcaatgaaattccaattaaaatcctgacaagttattttgcaggtatcaacaaacagattccaaagtttctgtggagaggcaaataacctgaaatagacaacaaaatattgagtgaagttggagtactgacattattcaactaggttacaaatgaaatgggaaaacagtttcatagttggctttgttctatagtttacattagggttaactctaagtgttgtacattctgtgggttttggaaaatgcataatatgctgttttggtgaaaccaaaagcagtaagtgagcaatatatgccttagcaatctatctttattaattcacatatttagagctgacttattcatataaagctttgcttcttataagaaataactggctttctctttaaaataagctgaagctgtgtgagattgtataaaacattatatattgactaatagggaaaaactttcttgtgtatacaggattttgtaattaaggttgaaaatgtaatctttaaacctgaaaggcttaaaaaaatttttagcccccacatgtaaagtgaaaatgtgatgtttgtctttctgtgcctgctttatttcattcagcatgagttccatcatgctcattcatgctgcctcaaatgacaagattttattatttttatgcctaaatattattcaattgtgtatatataccacattttctttatccattcatcctttgatagacagttaggatgattttatatcttggctattgtgaatagtgctccaataaacatgagagtgcaaatatttctttgacatactgatttcatttcctttggacacatacccagtagtggggttgcttgatcatatggtatttctatttggagttttttgaggaaacatcacactgttttttataatggctgtactaatttgcattcttatcaacagtgtaagagttcccttttctttgcatcccacttgcgtttgttattatttgtctttttcatatgaataatagccattttaactggggtgagataatatcttattgtggttttgataggcattttccttatgattagtgatgttgatcgttttttattatacctgttggccatttgtatgtcttcttttgagaaatgttcatccaggtcctttgcccactttttgatcaggtcatttgttttcttgctactgagttgagttccttaaatattttagatatcaaccccatatcagacatatagtttgataatattttctcccattctatagattgtctctttattctgttgattgtttccttctccgtgcagaaaatttttagtttggtataatcccgtttgtctatttttgcttctgttgcctgtgcttttgaggtcttacccaagaaatgcttgcccagaccaatgtcctgaagcctttccccagtgttttttctagtagtttcacagcttcaggtcttacatttaagtctttaatccattttgattttatttttatatattatgagagaaagaaatctgatttcaaatttctgatttcttttgcatttagatatctagttttacagcaccatttattgatgagactgttctttcccttatatattcttggtgcctttgttaaacatgatttggttgtacatgtctggatttacttctgagttctctattctttttcattggtctatgtgtctgtttttgtgtcagtaccatgctgttttggttactatagctttgtagtatattttgaagtcataaagcctatgcaactattatcaatctgggcacatggatggcattcaatatacattttttctttcttaagagtcattcaatcatcaaaatttgggaagtttttggtaaatataggactttaacttttgtgaaagttaaaaaagcaaaagaagatcttcccccaaataagaaaggatctagtgttggagagaacagaaacacagctgaaaatattcatgaaaagatgtggaacgtaagctcagggtcaaccaaggatattaatcagactattaaatgtattctcttctaattagatctgaagtgtgtttaccctgcttaaaaaagtggaccagctgataagtaccaaacaattctggagcgatataaagagaggcatcacccaaagaaggtcatgagttcactggaaaaatgaagtaacactgttgtcatgagtggccacagtaatagccagaagagattgaatgtgccttaagtttaaggataaaaatgtaattgtgatgggaggttggagaggaagctaggcctgtagccaaagtatggaaaaaaaaaaaaaaggaaatacagacaaaggtagcaatagagttgggtgatttaggaagctaggtctgtgaacaaagggaatgtaccaggttcctcccttcatgcggtgcccagggaacactttccagggctcaagtgccctctaaaggcatcactctgccaggttggactcagagccaaatgtaattgtgctgctctcttccattcaagtaggtgcctttgtttaacataagtgaccacttttaaagagctcagtcttcttggttccactcttgaactttcagtgttatcaacaaaaacctgttttgttttcgcattttcccctcagtgccttagcatggtgtcccaaacacttcttgatgatttttaatacttggattatacacataatgcccttctcaatctcccttttacttcccctcaaataaaataaaaaatttaagatactgcattcctgagtccaaggattgttacagttgtcacccccaaaattaggacaataatcacacaaattacaattcttctattcagaacataaatctgatattcttgagctcatttgataaatattaagtatcctcatatggtttctggtttacatacatttgccatgtataatatccataagccattctgggtgtgtgtccctattttataatctctagttgggagggagagcaccaagcctttaaattacgatctcatgcagaataacagctcagggtcaaccaaggataatgatcagaccattaaatatgttctctactgttcggatctgaagtgtgttgaccctcttaaaatagtggaccagatgataagtaccaaacacttctggagggatataaagagaggcatcacccaaagaaggtcatgagttcactagaaaaatgaagtaaaacttattcatttcatgtcagctgctaaaggatgtgctgcagggtgtagggtgtggcttaactgattacccattacggtgatcctaatagttttcatcaatgagaatattgtcaccgaatcttagcatttttgaaatgaaatgttgtggctctattatgtagttctttttgccagtctctgaaatcagttttttaaataacttacctctaaactctcgctctgcatttccttttgtttcctggatgtgaatgtggattcattggtagatgttaggcaaaggctaacttatcagtcatttctaggctcttcaaggtgaagcaatgcccacagacagtcttagaagggaattctgttctctcctttccttatttattcaaagactttcagattgtatttcactattactagagaattctttagtaaagctggatggattcttcaatgcattgggaacattcattcatggaaattggctctattgcagtgtttctcagacttgtgtatgcatacgagtcccctggggatcttgtgaacatgcaggttctatcctgtaggtcatttaatttcactgaatttgtgcaatgcaaaaagtccctttctgaacctgaatccacagataccagcataacctggagcctgttagaaaggcagactttcggatcctactccagatccatagaatcagaatctgcgttttaacaagattccagagggaattcatttgtacaaaatttgggaaacatcatcctgaaaatcacgtaggatcagctatgtaatggcaaaagcaaaagcaaacttatggtaccttctcttttttatgttattctctgattattccctgaggatgcagctgcatataatacggaatcattcatgtaaagagaagcaacctgtccaaaataccttcctttttgtattgaatcttgaaacagtgatgtcatttcctataatataccacatactaacagttgcaaattggtatctgagggctgtgtctagacagaagatatgttttgttggttattttgtttgtcctgtggatgattaaaaggcaatgttattgggcaggtgtgagcagttagcagctattttttcacatggagaagataatacagaggtgttatgcatagtatctataggcatttgagtctggaatccttaagagtaataattcccaacataaattccatggaacagtaatgtaagaatgattaacaggtattatttgaaaaaataaaaaaagtttctgtgatgcgttggcatgataaacagtgaaacaaaagaaatttggggggaggatattacagaggctttatatcataatatgcagtttgaacctccactgcaacatttctcaagcttatttactcaggaaattctgtgtctcaaatgattagagttctatagaacatactttagaacaggagtcagcaaactatagcctgcagactaaatccaacctgccacctgtttttgtactgcctacaagctaagaacagtctttatgtatttacatgtttaaaaccaaaagaagaagaatatttcattacacatgagaattctgtaaaatccaaatatcggtgcttataagtcaagtttttttggaacacaatcacactccttggtttacattttgcctttggcagcgatcatactataagggcagagttggcagctgagacagtgatcacatggcctgtaaagctgaaaatatctattatctgaccctttaaaaaaaagtttgccaacacctactttagagcacactgcgattcgattaccgcaactttttttttttttttttgagacagagtttccgctcttgttgcccaggttggagtgcaatggcacgatctcagctcactgaaacctccacctcccaggttcaagcgattctcctgcctcagcctcctgagtagctggaattacaggcacccgccaccacaccctgcttatttttgtattttcagtagagacgggatttcaccacgttggccaggctggtctcgaactcatgacctcaggtaatccacctgcctcagcctcctaaagtgctgagattacaggcgtgagccaccgtgcctggcctgcaattacttttgcaccaaccaaataaaaaggcctggcttcctcaaatgggaaatgataatgataacatagtgtcttttttgatgagtataagtgtactaacgataacattgtgtagcaaataaatattttctcttgtagacactttgaaatcaatgtaaaatcatatcaaatattcattttactacattataataagaattcctttctggggattaccactgttttcagacttttaagaaatagagtttagatttgataacaaatttttgcaattttcagttattacaacatgtgcctaagtatattttaagctgattaatcttttcaaactttttagtctcaggagccctttacactcttaaaaattattaagggcctcaaagaaattttatttttataggttatatctatcaatatttcagaaattaaaattgagagaatttaaaaaagtattacgcattttaaaataataataaaccattttatataaatatcaataacatatctcttgtgaaaataactatatttttcaaagagtggcatttttgaaaaaatctcattaacatctagtttgataggagatagctaaattctcatattacttctttatttaactgttgtgctattacacctcattaggcccctggaaaactccactcattctttgtgaaagaataaaagtgatctcaaaaaattttttaaaaataaatcgcatcaagtatcttatctgaccacaatgaaaaaaacctagaaataaataataagaggaccatgggacatttggaactgtgcaaatacatgtaaatgaaacaaaaagcacctgtccaaccaatgagtgaaggaagaaattaagaaggaaatgtaaacattccttgaaacaaacgaaaatagaaacacaacataccaaaacctatggggcacagcaaacatagtattaagaggcaagtttatagcaataaatttttacataaaaaagaaagatttcaagtaaacaacctaatgatatacctcaaggaattagaaaagcaagaacaaactaaattcaaaattagcagaaaaaaagaaataatgaagttcagagcataaataaaatcgagactaaccaaatagaaaaaaactcagtgaaacaaaaagttgctttatgaaaagataaacaaaattgacaaactattagctagactaagaaaagagagaagacccaaataaataaatgaaatcagatctgaaaaaaatgacatcacaactgatgccacagaaatacaaacgatcattagaaactattatgaataactatataccactaaatttgaaaagagggagaaaatgaataaatttctggacacatacaacctaccaagattgaaccaagaagacagagaaaacttaaacttacccataatgggtaacaagattgaatccataataaaaagtctcccaataaagacacgcccagaaccagagagcttcaatgctgtctaccaaacttttaaagaacaaataccaattgttctcaaactattccaaaaatttgaagtggagagaattcttccaaactcattctatgaggtcagcataaccatgataccaaaaccagatgaggacacaacaaaacaagaaaactacagaccaatacccctgatgaatatacatgtaaaaatcctcaacaacagactagcaaactgaatcaaacagcacacaaaaatttcaaacaccgtgatgtagtaggatttatcccagggatgcaaggatggttcaacatacacaaatcaataaacatgatccattacaataatagaatgaggaacaaaaaccatatatcatctcattagatgccaaaagagcatttaataaaattcaacatttcttcatgataaaaactctcaataaactaggtaatagaaggaaaatacctcaatacaatcaaggccatatgtgacaaacccatagctaacaacatactggacagggaacaactggaacaagacaagccactcttaccactcttattcagtatagcactagaagtcctagccagaacaattaggcaagagacagaatttaagggcatccagattggaaaggaagaagtcatattgcctgtgtttgcagatgccatgatcttatatatagaaaatcctaaaggctgtaccaaaaaactcttagaattgataaacaaattcagtaaagttgcagggtacaaaatcaacatgtaaaaatcagtagtgtttcacacataaactagctgacaaacaaatgaagagagtaatttcatttccaattgctacaaatacaaattacccaggaacaaatttaaccaaagaggtgaaagatttcacaaggaaaactataaaacacagatgaaagaaattaaagaagtgcactcaaaaaaggaaagacatcccaaatcatcccaaattcatagactggaaaaattaatatgttaaaatgaccatactatccaaagtgatctatatatttaatgcaatccctatcaaaataccaatgatagtcttcaaagaaatagaaaaaaaatcttaacatttgtatggaaccacaaaataccctgaatagccatagcaatcctaagcaaaaataacaaagctgaaggcatcacattaccagacttcaaaatatactataaagctatagtaaccaaagcaacatagtactggcattaaaaacagacacatagaccaatgaaacagaacccagaaccctgaaattaattgacatatacaaagccaactgatttttgacaaaggtgcaaagaacattcattgggaaaaagacactctttcaataaatggtgctggaaaaactggatatccatatgcagaagaataaaatcagatccccgtctctcactatatacaaaaaccaactcaaaatgggttaagagctaaatgtaaaacttgaaactatacaactgctagaagaaaacaggggaaatgcttcaggatgcttgtctgggaaaatattttgtgaataagacctttaaagcacaagggacaaaagcaaaagtaaacaaatggaattgtctcaaactaaaaaccttctgcacagcaaagtaaacaatcaacagagtgaaagagacaaccaacagaatgggagaatattttttcaaactattcatctcacaggagattgaaattcagaatatgcaagaaactcaaagatctcaatggcaaacaaaaaacctccaatcaaaacatgggcaaactatctgaatagataattttcaaaagaagatagacaaatgaccaacacatacatgaaaaagtattcaacatcactaatcatcagggaaacaaaactagaactacgatgagatatcatctcatcccaagtaagatgactgttatcaaaaagacaaaaaatgacaaatgccagccaggatgtggaggaaagggatttcttacacactgttggtgggaatgtaaactagtacagccactacggagaacagtatggaggttcttctaataaatcaaaataggactactatatgattcagcaagcccacaactgggtacttattgaaaggaaagacaattattatattgaaaagacttctgcaccatcatgtttattgtagcactattcacaatagccaagatataaagtcaatccaagtgtccaacaacagatgaataaattaagaaaatgtggtatatacacaatggaatactattcagcctttaaaaagaataaaatcttgtcatgcatggcaacatggctggaactgaaggacatcatattaagtgaaataggccagaaacagaaagttaaacatcacatgatctcatttctatatgggaacaacaaaaaaagttcttggaagtaaaaagtagaagagaggttactagaagctgggaagtgtaggggaaaaggggagatgagaagagatttgttaaagtatacaaaattacagctagaaagaaggaataagttttaatgtttgatagcactgtggaatgactataattaaccataatatatatttagaagtagctagaagagagaatattaaatgtttccaacacaaagaagtgataaatgtttgagatgatggatatgctaattgccctgatctgatcactaaacattgtatatatcaaaacatcaatatgtgccccacgaatatgtacaattcttatgtgtcaattaaaaacataaattaattaaaaaattaaaaaaactagttagtgttgagaaggatgtagaccatatgtaattttcacacattgatggtggaaatacaaaatggaacagttattttggaatacagtttagcagttctttataaagtcaaacatatatttaccatatgccccagtcatccatcttctaggtattcatccaagataaatgaaagcatatttttgtacaacagtttgttccagaagcttcattctagccacaaactggaaacaactcaaatgtcttatagaagataaatggataaacaaactgtggtaaatccatacaatggaatactattcagtaacaaaaaaagaacaaaatactgatacacataacaacatggataaatttcatttctgttaagtgaaagaagccagacgtaaaagatacgtactgtataattcttttatgtgaaattctagaaagcgtgtaagtatagtgagagaaagcaggtctgtggatgctcacagccaggaaagaaggggttacctataaagggcacaaatgaactttggggggtgatggaaatatcctataccttggtcgttgtggtgattgcacagctacatacattgatcaaaactcaccagacgtatacctaaagttggtcaactttagcctatataaattgtacctcagtaaagctgatattaaaaatcaatcacatggctatacagcagtgtgaatgtacttgatgccactgaactgtacaattaaaatgaataaaatggtaagttttatgtcatgtatattttatctcaattaaaatacatggataatatccctccctaaaaatgagagtgaaaaaggcaaataatgtcttagaattgttatgggccctctgaaggtgtgtcaggggcccccagggttccctgtaccacactttgaaaagtgttactcttttgtaactaagaatgaataatcatatacatcacacacacacacacacacacacacacacacacgtgcacactcatacacacgtttatactggtaaaaattatcaacaatcttcaatttaggaatgaagtgtttcaattgtttgcttataagtatcctgtttgcttgttgagcccaattgacttgtactaatagtatttcagaacccatctgtttaggtatttgtgattctgtgtataaatatagagagagtccaacctgggtgacaggaacatgactcccttcttgctgactagtaatggtgctggaacctctatccccgcatcactccttacctgttagtgaaatttgggatttcttcagccccaagctactactggggttcccctggccagggttggaggtaagaacctgatgaaaatagggacttgggatatgagtaggtaggtgtgaaaaacttttcttttatgaaatgcagggattagtgcaacatttttttcaccctcttgcttctgtgttttggatcaagtcctgtcttgttctctcctgtttccccatatcctcctatatttgttagacctcttacaattcaaactagcttacttaaagacaagataatttgttggttcacattccttgaaaagtccaggtataaaaggtagaggagctaacttcagacacgtttagatgtcatcaggacgttttctctctgtgtctctaaactctacttctctgtgttggcatcatttctagttaaactggtcctttccgtgtggtgaaaaataaggctaactgaatgcatagtcatcgtggaaggaaagaaacctgcttttttaccagtgattaaatcagtcccagattaaatgatgccagctggccaaccagggtcacaagccagtttcttagtggaaaaaggaagtccttgactggaaacccctccagaatacatggaaaggtgtaggagaattggagaagggattcaggggagacagcaagggaaaaatttgtcctgcaattcttgtttctaagtgaaatcaaggaccttttgaagttttctgaatgtctttgcaatttttaaattttcattgacaatttgaattaatttgctataataattaattgctttgaaggaaactgagaaatagattccaaactgtagataagatacagacttttagaaatgtcactcttcaactaacctagtattcttcaaccccagctaatcatggctgcatgctccttagcttcatgatcaatgtatgtagctgtctgtttctgtcttgatcatttctgaagctgctgtttccttatgttttctcaacacagaggctaccatgccttttttattgagggggaagctgagacttagtgaagtcaaataatttgtccaaggtctccattagtaagtgacattatagaactgaatccttttcaccccaagctaattttctttccaccataggctctaccttccaattaaacctcttgctagccaaatatgttctaaatttgtttattcattttccaaatatttattgacaggcactcttctggacactgagggaggatacacaatgaagaaaatagacaagttcttgttctcatggtgtgaataccctagcggaagggcagaaaataagcaaataaatatatatgatgtcacatggcaacactactggcaagaagaggattggaaaagtgtgctttttaattaggatgattaaagatgacgtctttgaggttacggttgaccagagccctcattgaagccaggaagcatggcagggagatagtgaaggaagggcatcccagacaggagaactggaggacaaaggctctgggtgtgaaagtctttggcatatttacagggaataggatagaggtggggggacctggaactgttaaggggttggggtggaagcagcaggagattaaatcagagaggtagccagaggaggttttatccagagagaccagagagatggcaaatattcaactgtgtgttctcattctctggaagaagaaaacactttatcattttacagtgcttaccttgagaatatgaaaaaagagaatcttttatcatttcagtcatctataagtgagtattcaaatttatatgttcaatcatttagtagttcattcttacagtcaacatttactaggcacccactgtaccctagatactccgccagatgttagagctatgaaaaaggaaaagagataccattttctatcctccagaaccagatgtgagtatgttgtatacaactggaggatgatcaggttgacaagagcatcttgtattactgtccacacattttttaccccccaaaatgtgtggtttccacaagaactagctggaagcctgccatttactgacacattgctacaaatttttaaattaaatgttttactagaaatggattcaatgtggtaacggatctgtctgactacgtttcagaagggtttaaaagcatttaatttccatgtcacatccattaaaagttaatgatgtcatgcactccagggagcaatccatttcataatttaaagtggaaccaacaaaacacgactcaaaagggaaatgaaggtgacaaggtacagaataacatgaaccagtgtagctgcacctgtcatgacccttcccggggttaacctggcagagaacagagagtttaagggaaatgaatcagagaaccaagccacattccatcttcctcagagagaaaagagcataaatcaggaagaaataaagtttatgtgatatgcagcacacatttttagcgttggtttccttcacactgaaatgaggaaaacagagcataaggaaagccacgtgaggggactgcataatgagctgtgggattccagaggatgtagatctccacgaaccctctgactccacacttgaactgtgaggccaactggcaccctccctccgtctccacactgcctgaggctctttcctgtgcctgcgcttctgaacaacagaggaaacccagggatacgctcttcccaatactcactcccctgcccttccagctccttccaccttgtttacatttgtactcgcgtatttcatgtgggttgtgaaagctggtaacgttatggctacagagtgctctattatattttcaagggcggaaaaaggctgtatgtgaagctgccaaatcaaatccttgccaaaatggtccaagctaatgagaaggtttgtaaattacagttcaatggatgagacgtggaggacaaggaatatcatgcccacccagcaaatagaatcactgagcatcactagcttttttactggtatatatatatatatatattatatatataatatatattatatatataatatatatatcttttttgcactatatatattttgcactatatatatactgcaaaatacatatatacatattttgcactatatatagtgcaaaaaatatatatacatattttgcactatatatatagtgcaaaaaatatatatacatatttttgcatgatcttagtcaaagtattcaaaaatttaagcatttatagagtaaagtttcatcaattcctatacatttaagctggaactagatcgggtgttacttaaactgacaactaatgcaatgttttatataatacagatgatcaataaatttctgcttaatgaaagaataggtgtctacaaaaataaatagacacatttagattgcagaaccaataattaagggcaactttaccatttgagtctacttcctgccccacttcctccccacagtaaagtttagaattttccacatattctgatatgatttaattttaactagtcctatcacttatcagctcatttctagactgattaatggacatcgaccaattttaatttataaattggtcttttccctgtttctttagattttggaagttttgtgtgcatttgctttggagccaaacacgagaagaaattttaaaaatcacagctctttgagtctttaaacatttttcaagttataaagtcatttagtttcagagacttttccattttctagctgaaagcaatcaactttaagaatccctatataagaattcctagaagtgcctggtcagaaaattaaagcagaggaagaattgatttctttgttatagtttccataatcatttaatcagaaacaatacaaaaaattaatccatttcttaaaatgtttacatgacactttctatgcatattcattaaaaagtataaaatatttttgtaatggatcaaaatttaacaaaatttaatttattttattaaactaagttttttctttaataaaaacaatcatgataattaagaaaatagaaagcattcaagttaaaataaagccagtaatattccacactatcaagcttaaaacatcattatgaaaattttgaagacgttaattttagatgtagggaatggtaattgcttgggctttgcctgcacatcagtagcaatgatagtcagatacaaatttagactttaacttaattcctcttttcctgcaggtcctttctcctgtataattatactcaatcattaaaaagaaatgaactcaatatcttaatatacatggaattactctgttgtatctacaagaagcacatttcctattttcaataagttgagttgaaaagaaaagaatgcaactttttgaattattttgtaaaatgcagttagtaaaagctttagtgttgctttttgtctttaatttgttttgttagttgtttctttctgtggtattcactatgatgcattttgtgttgctggaagctagtggtaacaatgcaatagacaaaaatacaggggagtaaagaatgaagggaacagaagaaaaaaaggaactatgagacttttcatgtgacatgttctagagctcagtacagagtactgtggagtttggttttaggtggagttacctctgcctattggagtcaggaatggcatccacataaaaaaaatgtatctgaaaaatgtccaaagcaatctacagattcagtgaaatacctatcaaaatcccaattttctgtttttacagaaaaagaaaaaaacaatttcaaaactcatatgggaccactgatgaccaccaatagctaaagcaatcccaagaaagaaggacaaagttggaggcctcacacttcttgatttcaaattacattacaacgctgcagtaattaagagtatatactatcataaagatggacatactgcccagtggaacagaatggagaacccagaaataaattcacacatatatggtcaactgatctttgacaagggtgccaagaatacacaacggagaaaggcttttctcttcaacaaatggtactgggaaacacacaaaagaatgaaattgtacctttctattatatacaaaatcaaatcaaatatattagaaacttaaacctaagacccaaaactgtaaaactccaagaaaaacatagggaaaaactttatgactttgtcttggcaatgacttcatggatataacacgaaaaacactatcaacaaaaacaaaaacaacatgagactacatcaaactaaaaagctcctgtgcagcaaaggaaacaatcaacggagtgaaaaggcaattgatgaaatgaaagaaatatccatgaaccatctatctgataaaggactaatctccaaaatatataaggaacttctataattcaatagcaaaaaaaccacatgacctgatttaaaaatgagctaaggttttgaatagacatttctccaaagaagatacaaatggccaacaaatataagaaaaaatgctcaatgttacaaatcatttggaaaatgcaaataaaaaccaccatgagattttacttcacacctgtccagatggatatcatcaaaaaaaaaaaaaggacaaaatgtactgatgaggatgtggagaaataggaacgctggcacactgttggtggaaatgcaaaatagtgaagctgctacagaaaatactatgaagattcctcaaaaaattaaaaatagaacttccatatatatgattcagctattccacttctggatatttatcaaaagagttgaaaccaggatcttaaagagatatcagcagcactattcgcaatagtcaagatgcagaaataacctaaatgtccattgacagatgaatagatacagaatatgcgatatatacattgaaatattatcagccttaaaaaggaaggacattctataatatgcaatgacatgatgaacctggaggacatcaagctaagtgaaataagccagtcacagaaagaccaatactgcattattccacttatatgaagtatccaaaatagtcagattcatagaatcaaagaatgaaatggtgtttgccagggaatagcaggaggggggaatagagagttatgaatcaacaggcataaggctccagtcaagcaagatgaatgagctctagagatttgctgtacaacattgtacctagagtcaacaatactgtattgtctgtttaaaatttgttaagcagtaagtctcatgttaagtgtttttaccacaataaaataaaatagtaaaataaaatgtacctgagatgagacttgcagtcctgtgtgagggacaggagtttgcccacagaggagagtgaagatggagagaatgttacagacaggccacagcctgctttgggacctagaagtgagtaaacaggctccctacaggatgtgcagacagctgggcctggggagagagtgccggggatgctctgagggccactgggaggtgaggctgtaaggcaagttgtggcagaccatcacaagcccttcatagacctgcaagagacttccaggtttatggtttgcctaacatgaggggctactgaagagttttgtgcaagacatgtgatgaagtatttgtgacatgataaaatgtcgtttcagccatcttaaaaccactcaaagttgacggtctcctctcctgcctcctgcggcttccattaccatggcagagactgtggtgtctgaggtggtgtagcgtactgaagcaaggctgtcttgaagaagaggagacaactcagtaagtatgttagtcagcataagctaggttatgatgcagtaacaaacaatgcttacatttcagtggcttagcacaacaggagggtatctctcactctttctggatgccctacagaagacagcgggaggtggggtgggtctgttccacagtgtcactcatggaccagactctgccatcttttgactgcactatctccaacacacgacctttttagtcaccacatcaggggagagacaactgcaagggtttgcagtggctcctttatgcttcacaatggaagtaacacatgccatttctttttgtagtcacagccaattccgtagctttgcctaaccacaggaggctggaagacggggtgggggggaagcagatgggtgcttgctgagcactgcagtctctgccatggtaatttcaggtagctagatggaagccacaggaggcaggagaggagaccatcagctttgagtggttttaagatggcagaaacatcaggccacagagactgaggcaatttggtgggggtgagagaggagtggcatagggtgattgctgggtactcactggtggcagcatactcagtgagcaaaactggcagagagtaggtgtagggtagagataaggctcatcttgaccagcactgctatctgcgaagcctaattaaacatgtccacggccggtcgcggtggcttcatgcctgtaatcccagcactttaggaggccaaggcaggcggatcatgaggtcaggagatctagactatcctggctaacacagtaaaaccccgtctgtattaaaattaaaaaattagccaggcgtggtggcatatgcatgtagtcccagctacttgggaggctgaggcaggagaatcacttgaacccaggaggcggaggttgcagtgagctgagatcatgccgctgcactccagcctgggcgacagagcgaggctctgtctcgaaaacaaaacaaaccaaaacaaaaccacaacaacagcaacaacaaaaaccccaaaaacatgtccactaggaactgcaagtcaggagtgcaaaatagagtcaggcctagctattgatatttggacatcatcacccagttataggcagaggttgaaaacatgtaggtgaatgagtctcccaaaggagagaatgtataataagattaggtgagagtttaaaaagttgaattgctcgtgcagtctggatccagagtcatcgcacccagatggattcaagaaatggagggtcagaaggtcagcttccacaagtctataattaactgggttttgatgtatgcttgcagaggctagagacacactgagagatttatcgagtgcaatatttgtttgacatccaaagaaataagacaagccttcttatgaactcttggcagagatttactttagatagcgaagaacagcttgacactacagattattagacaccacaagagtttattaaataaaatgggtggaagcattgattctacatcttaaatatatctctttggtccaggggttgtcaaactgtgtttcttaggggggtctcaggggctgctgcaggatgccaggagctggtgcagagcagagtgactcacgtcttccacctctccctccatcagctctgcggttactggttttatattgtaatgtttcacataagatttcattggagaaaaaattctgcaccacaaaaacaaaaagtttcctttccatctccaatgttaaaaagccttaggctgaggctttcatcatttcctgcttggatcgttgtatttttcttccctgggggtctgtctcgctgcctctgatctcgtccctttgtcatccaccctccgcatggttcccaaagtgatcattctcgaacacaaatccaaatctgatgttggcttctggggcatttttgacttcctatcaccaattgtagaaagttatactctaaagaatggccccaagaaagcatttcatgatttggccttcccttacctttctccagcccccttttcaggatgtccccttttgttccttgtgcctcagccataaacaacaactcatgcctgcagtgcgctgaaggtatagaaggcctttggtttagtgaatccaacttctcagctgcagcttcagcataatgacatcttagaagactccccagcttccagtagtttagttagaagtcctcctctggggctcctgtcatgaagaatgtgtacccctctgacagcacattgcccgcagtcttgtgttaattgatatttagtttatctccctactggataatcagcaattgccttcaggaaacggactggctcatcagctctatctcctcagactttggctctgcacttgaccctctaccatgttgttaaacaagaaatgagtgtcctcctttctggaaatcattaaaataatggttttttatctgctttattcatttgaaaagctttggtctatgaatatagactatacggctccttaagatttttgtctatattatttttgatttttttgttttttaacacctttagaatttcacagcctttataaatataatacttaaaagtaacatttcagagtatttggaaatactttttgactatttaaaacaaaatatgaaacatgaagtatagtaaagatataaaacgataatttagataaaaattctttctttcatggaaaacaccactgcattattcctgtttcaaatgtcctacagcattacatttttttttttttgcagcaactccactacacatttgttcatggtgttcacttcctacaagatacagtcaaaactccttagcctgatttccagagcctctgtaatctgacccaactgactttctcaaccacattacacactaatctttcacagatttttttttgctttatttaaaccttttcccctcatatttctatttattcttcttagcctttggtgaatgctttctatcagaggatttgtaccttcggatttttggaaaagtctgtaccattatatcttagcatattgcttatttgctgtttgtttatttatgtctttggaatttctctgaggcagatactagagcatttatgattcctaacttctgttttatatcctccattcctttatttttgtcctccatgtcacagagatgttctgttccatcttctaactcatcttcaagcatgatttgtcttgtataatccatttgcttagatttctaaagagatttaatgactgtacttacacttgacttttaagagcctgtttcataacttgctgtttttattttacagatgccatttcttcctttatattttaaatactgtaaacatacttattgtcagctctctttcatgttgttctattcttgttggttcctcatgtcctgtaagctgtctttcatgatgctaagtgtcctattttttaaaattctgttttattttgcttacgagtttacttcagaaggaagtatcttttctagagatccggataaccacctggggtggtttccactggtgttcctgtcagcaccttcaagacacactgattctgaattattttttgtgttagtttttcagcctggaattctgagtctattcctactcccacctgttgttcagtcttggggttcttatatctctagaagactcctattttacccacatggtggggctattggctcatttccagcagttatcttgggtatgcaggcagagatgatctggttccttcaaggttagtgcagtgctttctagggttctgattctgcacaggaagcccagttcttattccttctataaacatattttcctggccagcttctggccttgaatagccatgaaaatcccagactttgagacctgtaatctcccttagttccagatacattgtcatgttggctctatgttctagcatttggagatttcctttcttgcttttgtgttctgctatatatttaatatgtaaaaaaatgcttttaatccctatatctaaatgtctggaaatgttgtgttcaattccatcttatcctgttatttcttgactgtctgaatatgtagttcttatttctctcgttctctccattttgaataatctcccaaatgctctctgccttttgcaaattcactcattcttccaggacttgaggagtcactgaaggtaatgcttttttcctccagggaccaaattaacccctaggaagggtcttctatgaactcctttgacatccatttgacacttaatcattttctgttataattattatatggctattatttgttttcttgtgaaattataaaatctttgaaatttggggccatttcttaagcttcttgaatttcttcacctggtctcacaacaaattcttcctaatggaagaaaaacagaaaagaaagacacactaggatagagtaatttaaaatgttttagactttatttacgagggtccaagcacctaggaaaacaggatttgtttaaattttgcttactcattttattcaggattcatgaatttataaggccagagagatttcatataagatcctagattactaaaggaaaactgaaagattttatgtcaagcaatataaaattaatatgacagatgcaaccttagaaaatgtgtttcctgagattcctaaattagctacttttgtgggtgtctgcttagtatttggtcctgagtaaatgaataaacaaacagctacttctgagagctactttcacagggaaatgtttctgagttccagttcatgggagtttaggaaggtatgggatgcaaattacatttcaacactgaaccagccaatcaatccttgaacacttttgaagtctttagctttgcctgtgaacatgggaacacccaagggcaccttcaaattaaaaataaacatacattctaaggagtcctagatgtgtaatttggtagaaatttaaggggtgtctttttatagtaacggagtctataaagaaaatacaattcaggtgaggttacatcctttccagtcataaaagtgtatgtgaatgacatttaactcgaaattcaagtactttgggcatatcattcccgctccctgccccaatcccataatttcttggtagaaactcatagtgcatttttttttcagttccagccagatttttatatctattggatggatattacattaataaaaaaatagctaacacttattgtatgattgtctaatgccaagctatgttcgtataattatctaatatgttggtatgatttgactctgtggctccacccaaatctcacctttaattgtaatcccttatgttatgggaggaacctggtgggaggtgattggattatgggagcggtttccccatgctgttcttgtgatagtcagggagttcttaccagatctgatggttttagaagtggcaatttcccctatgcactctctctctctcctgccaccatgtaagacatgccttgcttctccctccccttctgccatgattgtaagtttcctgaggcctccccagccatgttgaactgtgagtcaattaaacctctttccttcatgaattacccagtctcaggtattctttataactgtgaaaatgggctaatacccagataaccctatggtgttgctgctgttattattcttcccttgcagatggggaaaactgagatgaagagttaattaatttaccaaagtcaaaagagtagtcttaaactactgtgaaatttctgtaggcctccttttttttccttcaaaacctttaatatgctaatacacatttttgtattttttttttaattatactttaagttctgggatacatgtgcagaacatgcaggtttgttacataggcatacacgtgtgattgtggtttgctgcacccatcaacctgtcatctacataagatatttctcttaatgctatccttcccttagccccacaccccactgacaggccccggtgtgtgatgttccactcccagtgtccatgtgttctcattgttcaactcccagttatgagtgagaatatgcaatgtttggttttctgttcctgtgttagtttgctgagaatgatggtttccagcttcatccatgtccctgcaaaggacatgaactcattcttttttatggctgcatagtattccatgatgtatatgtgccacattttctttatccaatctattgttgatgggcatttgggttggttccaagtctttgctattgttaacagtgccacagtaaacatacgtgtgcatgtgtctttatagcagaatgatttataatcctttgggtatatacccagtgatgggattgctgggtcaaatggtatttctagttctagatccttgaggaattgccacactgtcttccacaatggttgaactaatttacactcccaccaacagtgtaaaagcattcctatttctccgcatcctctccagcatcttttgtttcctgactttttaatgatcgccattctaacgggcatgagatggtatctcattgtggtttttatttgcatttctctaatgaccagtgatgatgagctttttgtcatatgtttgttggctgcataaatgtcttcttttgagaagtgtctgttcatatcctttgcccactttttgatgaagttgtttttttccttgtaacattttttaagttatttgtagattctggatattagccctttgtcagatggatagattgcaaaaattttctcccattctgtaggttgcctgttcactctggtgatagtttcttttgctgtgcagaagctctttagtttaattagataccatttgtcaattttggcttttgttgtctttaggcctcctttctattcatgtttctactttagaagacatatatatatatctacatatatatatattttatatatctatatatgccttctaaatatatatgtctacaaatatgtatgtcttctatattttatatatctatatatgccttctaaatatatatgtctacaaatatgtatgtcttctaaagtagaaacatgaatatatgtatctagaaacatatatgtcttcagaagacaaatatatatgtatatgtcttctaaagtgtgtgtatgtgtgtatgtttatatatgcgtgtatatatatatgtgtatatgtatttgtccagagttctcctggggaatctatattttattgagatgagaaggaaacgtggtagtgttggttaacttatcaccacctggttgctgtctaaactcaaccacttcctattgtgtcatggtttgattataaatttcctctaagcctctttttctggacactcgcttatcaccgctaatcctacatacaaaaggttgaatactggccactctgaaagttgacaatctaatatggattaaatgtaaaaataaagctagtgactccaaaacccaccactagctggttcatcacagttgtatatttttacactttctcagtccaccctctaacccaactcatcttcttgtaagcctagcacctattgttggctatctagtggcacactgcaaaggatcttatgtgcctggagccccggtttgcaattttttttttttttttttttttttttttttagagatagtgttgtatacttaaatcttgacaagcaaaagaaaaagaatgaagtttggaaaccatcacttctaaaaagcttgtattttattatttagaacagacttgcttaagggaaagataaaatcaatactttttccccctgttttcaataagtgcctagatattagattttatgtttgtttgttttaaacaacgttttaaacttgagagaattttgggtaagaaaataaataaataagttggatagaaataaaccttttaaaattaaattctcttcactaaagaatgtattactgggaaaggttttaaaaacttcactagaggtccctccaatttttttcacctgtttcctcaagatggggtagtcgaggacaaattgattactgttttaagcttccttccaaatttccattgctgttatttatggttctattccaaatgtaaaatttaggcctttccaatatttgtttttaaaatgaagagactttctgattcctatgaataaaaatactccatgctaatggaaaaatcaagaatcttggtgccaaagtgcttcattcaaactcttagacaataaaataagcaagacattaaattataacaaaggttccaaccttttactaaactagactcaccttgaggagcttataaaagtacagatttctaagttttcccaatctactctttcttcccatcccaagattctgaaattaattggtttggctgagcttgatccaacacattttactaaatatatatgtttattatatatagtctatattataaaataaatataattataacagaataaatataataaatatagtataaagtatatttattatataattatttaaggctgaagatcagtgtccacaaaggcatttcttgctctttgctaatgccagacaaattaatgcaaaagaaatggttggataagaagaaaggaaaatgagaaataatattcctatttataatttctatctattttcacaaaaatcacaagtagctaaaggtagtcattttgcctcaaattgccaatcaggtttaagaagttttttgtctgaatttcctaattctaagtgagagactgaaaatgcaaatgaactatgaccagaccacctatgacaacagaaccctgacccacaatctctgtggccaccagcccaggaagcaaaaccccacttctgtggccttcagcccagagtggtcagggcttggtcaatgactgccagctttccttttttttctttttttttttttttggcttctgcttccaactcaggaccaaggagagaaagccaaatatgttacccttctctaaacaatcacttaggatgccccacttctagttagtgcacttccagcttccctgaagccttcctttttttttttactgtaaaacgttcccattcccatctgtctttgagtctttgtcaaatacaggtgatggtggctgactcacttgctatggcaagctctgaatcaatagcttctgtttgttctcattttggtggtgtttatttagttccacatagctaaaaatggggaaaataaaaatgggaaaaaataaattatccttgtgcatacatgtaaggttatttataccaatttatgcaatttcagaaaatgagaggagaaagcagataccatcaccaaggcaagtgttcaaaagggcaataattacagtgacaagaggaatcccaataacttttattctcagtaaatatggctacacagtcaagagtgttgaggacctgagaatgggaagtcactgctttggctcctgtgattccaccaatacttgcctgaattctcttgaatcaatgaatcaggcgtggaagactagaagcaacaaagagaggagcaggtagtagagggggtaacttttagaaggctgtagagtggtcccttgatatccacagaggattggttccaggaccacccacatatacccaaatccatgcatacttaagtcgtgctattgggactttagaatccaggtatatgaaaagtcaaatgtgtatatgtgtgtgtatatatgtgtatatgtacatacatacatatatgtatatatatacatatacacacacatatgtgtatatatatatacacacacagagactttttccaaacaaaagcagatcaaaaatactgtatatatatatacatatatgtatgtgtatatatgcatacatatatacagtatatacatatatacacatacatatatgtatatatgtatgtgtatatatatgtatgtgtatatatatgtagtatttttgatctgcttttgtttggaaaaagtctgtgaataagtagacctgtgcagttcaaacccatcttattcaagagtcaactgtaatttcaatattttgtaacagtttagtcaccaatattgaagttgagagaaggaagttctctcttgtggacaatatggaatgctctaaaacttgaatccaaatgtacattcttggcatcactcaaataatgtgagcgtgtaacatttatgatatattcaagaggcaaaacccaattctttacactgtagacctgttttgttgttattttagttttgtgaaggcaaggttttaaggcaatttagttctaaaagcattactgagtatttactatttgcaattcactgcacttggtaataaactagagggagatgcagaaactctcttttctccaccaattcttcgaaggaaaaaacatttccattatcattaggtgacaatctacacagctaattgtacatatgaattgactgataatttacagttgcaatatggtgtcataaaaggagtcataaaactttgtgacttcgtttgctttttctctgtaagatatgtgctgcaaatgcaaactaacatcaaataaataactcctgtctttatacatacatgatctaatactttccacaactctgatatttaaggtacttccattatgactagttaattgcataaattcaataattaattatattctaatgatcaagaagaatatttatcaaaaataaaacttgcagacattggggaggaattaaggcatgttaacacattttctatatcaatcaggtacttttagtgtaaatgtgttatcaagtgaactggaacattaaatagaggaatttggtatcattgtgggaaaaataatctaatcacttttcaaacttggctgccctttggagccatttgagaaatttttgagaagcaagatacaggtattctaatttacttggtctgcagtgtggcccttgccaggtgatactaacatgtggcatagagtgagaaccatcattatataatctagaatttagtgtattactccttcaatattatacttctcctccagctcttgggacttttcctgatttcataggttggttgagcagtttttgttattgttgttgtttgtttttttaatgttgacttgttttcccaagtaggtattcttcctggaaagagatagtactcactataaataattaattgacttcctagtcaaattagtccttgatgagtctaaacagtgggtggtagacatatctcatctccccagtttgatcacgccatccgtccttaagataacagacctatagagctagtaggccaaccctagaaacaaaaaaggcaacagttatgtccaggtcattacagcttgtcaatttgcttctcccaaattactgcacttcttgtttcttcattgggttacacgcctgcttattcacgtccctcgatcagtttttcctcaatcctgggtacacaacagcatcacctggggagcattttagatgcctaatgcctaattacatcagtctctgggggtagtacccagttatcagtgttctttaaagctcctcagaagacactgtgaaccattgccttaggctgtagtgctctcaatatttacctaagacattcatgaatctgcattttctttagttgatattacagagctacagaccagctctgacccaagctcatttatataatggcagatagatactattaaaaacctaaaaaaaaatttaatagaagtctttggtaatgtacttacagagcccttgtactttgggccaggggctcttgtaagcactgtacatagattgaattatttattctagccacatcttacagatgagaaaatttcccagtgttacacacttagcgtttgggccaagattcaaatgaggcactctggctccagagtcaccagttaaccacaggtgaccagcaatgtggctgttaaaactactagatgtgatttgataggtgatattcttacacttccattttacaggtaaagaatcaaggtacagagaaagtgtcctaggatcacacagctagtaagtggcagagctgggatttgaactcaaaacagtcccaccctaaagatgatgttctgttaataatctagccttttttttcagacaaatattcaactgacccagctttccataaatttatattactgcagattggaatttggtattgcaagtttcatttgcacttctgaacttattcttcatgttttacccagaaatttattaaaaaaaaaaagaaataaaactggtggatttttcaccctactacaactgactgcactggagaagcaattactacagagatgctacagctgctttcttgatattagtccacggttttaaaatgtttttgatttgtaaatatgttaggcaccacaagtccgtcaagatggtatgtagaaagaagaaaagattctccactccaaatctttatgtgcctgaaaatccctttgatttcccttattagtttggtatgtctttaattttatattaaaaatacagatttcttccagttatgggacattgtcccacttcaaacttttaaaaacaaattaatcagaattttatggtaattgttatgtaaataggacaaatatatctcagccctttggcaagcagccttgacaactgaaacagtttcacactgtggatttcaatcaatgtaacaaagttactgagcacagtctaaaatcaatgaattctagagtgcaggagttttttaaaagtttcttgcttctcgcattttaatataaaaatcatcccaggctattgttaaaatgcaaaaatctgatttgggaggctttaagtgagatgctggacttcatatttcagtaaggtctcaagtgatgtacatgctgctggtctgtgaaccacactttgagtagcaaggacacagtgctggtaaactcgttctccaaaggaggaaaacaaagccttggcttgtagtatttgctaatttccatgatataaatgttcccacaaagaccacattcaagctaccaacgtgatgtcattgaaaatggagttgggaagagacattcagcacgctgcccacaattagctctccaaccaggtacaagccagttccagcacaccactgatctacataagtataagtacatgcaccttcaagatcccacaacatagctgtttcactctgcaaaggatttcaggaggtgagggagaataagaatgtcacaggaaaaaatgacaagattaattacaaagttttcagaataggtgcaaaataatctagttccaaggctatataggctgatgagagggcatgtttaagaagttaaaagacgtgtgtggccaataatggagcctttggggaagatctgaacccggtttggactgtgatgggtttggatgagtgggaaaggagaacacgcacagaaaaggaagtgggataaacactagcaaaatgtctgatgctaaacaaaattgaaggaaaacttggaattcctaaagagttgggagtacagtcattggtccagcagaatgagggcatcctgctttcacaaatgttttattctctggcatgattgaggaataacatattcagattaatcaaacatccaggttaacagagagttgacatatgtaccaaaaagagatgccaatgtttaaagtaatagaatatattagagtacacagaacctaatttctttcttctttgatgaagaaaggactttgagatcttccatgtctcagagccatggctttgagcacctttggtcccttctggtagggttctgtgatggagcctgcaaagttttgtttgcagtgtcctgtaagaagagtgtattttcaagtctttctctagggctgtagaatgagagcatcctaagaaactgactcccttggagagaatttctaactggcagaaatgctctgccttgtagtgcattgagtggttaaaagcccagactcatttccacatctgtaattggggctaataataccaatctcatatggttttggtgattattaaatgaaacttggtcaagaaatattggtgctcaatatttgaatgagcactacaaattagtgcaggcgttgtagccaggcatacaccgttactaatttttaaatcagaattgcttaacagacactgattgtctacaaggccataaacaggatgaggctgtggggagaaagtatggactggtccccaagcctgcagagctaaggtttctgcattctgcacacatctttgaaagaatctatgaccacctgtgcacaatgtttaaatgcctaggaaccttcccttgctacccagggagaggttttccctagaccctctgacagttccctcagtcagcaactatatgaaagaattttcttacatttctgaaatctgaatagaggtttatttgggaaaaaatccttttccctcctgtctcttggaataaatgtactatttcgttttcttaatttgtactatgttaagaaccagtagagggaacttaaggtcaatctgtctctcaggttgagtaactctaagctataagctccagaatcttgtctttgtctctaattccaaatgggcttgtggggaaaagtgatataaccatgagatcactgtgttcttttagatgatttcctgtttcctgtgtatttaaatacacagggaataatcccgctattaaaatgagaccctgtatgtgtgtatgggcagaagttcaatgaaaaaggaagaaaaatatgcttgctgaataccagatgtagaatgcataaatcctgtcagaacaagtggggaatagcttttatggctgacttgcaagaaacctaagggaattgggaaatcagataggcatgtgtcaagcagacttatttaaatcatccacttcctcagcaaaataaaagtttgagagggttctgcttccttttgtggtttgaaattacagttgtaggcctcagaagtcctgcttgattgagggcttccaagcaaagacgttatacaacctagttcaggcgcccgacaacactggggtcacccaatgcctctccctgaggtctccaaccttgccttgtttgtactttgtgtcctttgtcatctcagaagcaaattgtagtgcagctgaccactgcttcatggacctccagcttgtccctactaaaaggcttttgcatctgaaagagaaagatgcccactggcttccttcttagaccactgctgtagatcctgagcacaaaccttagctctgcaggcttggagaccaggcaatgctttctccttgcagcctcattctgttcacagttcgcacagggtttatggccttatagacaatcagtctgtggtaagcaattctgatttaaaaactaataatctgtgtatgcttggctacaaggcccacatgaattcgtagtgagagataaactagataccaattatttccaggtataatatcctaacaggtaagtttttcaggaggccacattgtagttcagcaggttactggtgtgtatagatacaaagcaaaggtatttaagtacaaaccatttcctttaaggtgtggtagctccctaaattgttcttctcaggatatttctgttttaaaatgtcctgttaaatatattatttttatgtacagtataattttttaaaagcatgctgacatgggaaaatcatggactttgcagacccaggtttaagtcattccaaatctaccacttactgatgtgtgaacttcagcacgttactgtacctctttcagactcatttccttatcttcttgctgagaatgtgtgtgtaaaaatattaatatggaatctagcatggtgtctagccctttgtgaaaccctgacaaattcttattcctcaccattcatctgttcatctgtattagtttgttttcacggtgctgataaagacatatccgaaactgggaacaaaaaaaggtttaattggacttacagttccacatggctggggaggcctcagaatcatgatgggaggcaaaaggcaccttttttttttttttatggagtttcactctgtcacccaggctggagtgcagtggcacgatcttggctcactgcaacctctgcctccagggttcaagcaattcccttgcctcagtctcccaagtagctgggattacaggttcctgcctccatgcctggttaatttttgtatttttagtagagacagggtttcgccatgttggccagactggtctcgaactcctcacctcaggtgatccactcacctcggcctcccaaagtgctgggattacaggcatgtacaagtatgcccagccccaaaaggcacttcttacatggcagcaacaagcgaaaaatgaggaagaagcaaaagcaaaaacccctgataagcccatctgatcttatgagacttattcatgaccacaagaacactatgggggaaactgcccccatgattcagttatctcccaccaggtccctcccacaacacgtgggaattatgggagtacaattcaagaggagatttgggtggggacacacagtcaaaccgtatcactacccatccatccatccattcatttattccttcactaaatgcctgttgaacaccttttatgtgccaaccactgtcagttagtggaggcacagacaaaagtgagaggtgaactcagttgatggtatgtaggtgggtctatttctgggctctctatgcttctccattgatttatttgtttatttttttctctttgtttgccaaagactttcttaatctttaacaatgtaattccagtgagagaaaaagaagtttcagaagtaatataccaaatcatgggatgggactgtgggggtggtgagtgagttcaggagagtgagtgagttcaggagagagagagagagagagagagagagagagagagagaaaatgaaggccatataaggtaaagtgttgaatgttacgtgctctgttgactgtgggccccaggatgtgtatgatggaatttactgaaacagaatttgcacatttataaaaaggatgcagttttagaaaatagctagttatgctagcatcttgtttcttcattgatgctgcaatgttatataagcactgaatcctcccacatttccagctcttatctaaaagccagaatgtgtaccacctgggttgagaggaagatgaaatgaaattggggaagtaaatggtaaaaagcatcctgaaagaaaccaactagatatgttcaagtcagcaggttatttagtattttgagttatttagtaatttgagtaatgtgtaaggggtgtactgacatgctttttctctcattttctccctgttctgcctgtagcaattctaccacctttgttgacctcttcttccccccaacttattgctgtagaggctacctgagctcattgtccctggagatggaccaaatagaagaataagcagtgcctgtgtggtgagcttcaagaggcatctgttctctggggagtgggtgggtggtaaagcaaagacgggagatgtgtatattagctatccattactgtataattaattatacacaaaactaaactatacactaaactaaaacttcacagcttaaaacaggaaatatgtattatctcacacaatttctgagagtcaggaatctgaaaatggcttagctagtttggttctggctcagggtgacctatggagttgcagccaagatgtcatctgggactactatcattggaaggctcagctggggctggaggctacacttccaagatggctcacttatagggctattggtgggaggcttcagttcctctccacatgaaactttcctcatgccatggaactggcttccctcagagtgaaagacccaagagagagactaagacagaagctgcaatgtttttatgacctagtcttggaagtgacttactgtcatttctactgtattttattcattagaagcaagtcattaagtccagcccacattcaaagtaagaggatttaagctgaacctcttgaaaaaatggtatcaaagtatttacggacattttaaaaactaccacaatacatataggtgaacttcacaaggtgtagacatgggctgagacagaatattggataatatctcattctgcaaacagcagcctcatctgtaataaaatcccagcattcagaaattatcacgatcaagtaggaaaagggcttgttggaaaaaacttatcaaagatgttacttcatttatccatttattctgagccatagcataatagcgacaaattgtgtgtcctgtgtaatttggatacctctgctcaataatagctgaacagattttatcctatttttagaatagttaatatatacacatggcacaaaatttaaaaggtataaaagtttctggttcaaaaataagattccctcattttctttttttctgattctttgaatgcaattcgatttactgatttctcatgtagccttagaaagtattctatgtacttacaaacatatatgtacacatattttttctttcccacaaataaaatactgtatgcattgttttattcttggctttttttcaatggacagtatatcttcaaggacttctacaatagcacatatagacctgctttatctttttttaaatgtctgtctagtactgcattatatttatttaagcagtcatctattgacagacgacattaggttgtttccagtctcttgttactatggacaaagctgcaatgactatctctgcacattcatcatttctcacacaggagtagaattcttcttcatttgtaacattgacagatattgacaaatttctctccaaaagggcttaccattttgctctcactacaatatgaatgcctgtttcttcaacccttggcagtacaataggttacccactttttgatatttgccaattaggtaggcacaaatggtctgcagttgcagttttaatttttattatctttatgaatgaggttgggcctccttttatatgcttaaaatcatctgcatttgctttactatgaattatttgttcttaatctttacccgtctttatattgagttggtgggtttttattttccttactgatgagtgggagttccttaggattaaagaaattagctcttctaaagaatcggtatacatggacagacagagtggaataataaacattggagactctgaaaggtagggataaaatactgcctactgggtacaatgtacgctatttgggtgatgggtatgctaaaaccctagacatcacctctatgcaatacatctatgtaagaaaactgcacttgtacctccaaatctatttctttttaaaagaaattagctcttcatctagagtgtgagtggcacgtattttttcaagtgtgttttttccatttgttttttgactttttattggttttctttttctttttccatgtagtaattttaaaaaatatttttctgtggtcacatttatcagtttttttctcttatagtttctgggtttgcatcattcttagaaagtcttcccactcctagggttactaagaatcctcttaaggtttcttttagtaccatcataatttgatttttacatttcaaatttgactgaattggttcttttaatgctttacactctaccgaagtataaaatactgcactgaccatgtttgttttgtttctggttcagatatttctagtttattctcagttttcttcgtttgtgaaatagagataataagtattactgagtaccatccatgacttttagtggagagatgccatcttgatgactgaaagctaaaccagagttttcttcctcattctcattacttagaaacctttgctgatgattaggtttggtgccctaatgggacaattgagactaacacggtctataagataacttgcttcaatttaaaaaggcaaaatcaaattagccatttcatatctgcctacataggggctactgctttcatttgtaatgtttaattacatttttttccccaagaatacatacacacggctatcacttctaaaataattttggctccctatgaagcagaattggaaagtgtcttaaagttagttttgaattggttatttggaattcaaaatgatacttcattaaaacaataccttaaatattggttaggttcttgagccttattacaaattccatacttatgtatttatgattcagaataggaggaatggtgctatgtcaatgacatgtaatgatatttaataacagtgtgtccctgttaatatgtgtctgagtggcatatcaggaatcccaaatatgtcttccccagtccttcccgtgcatcctagcagcagatgtgagaaccccaatagcccactgggaactggttgcaaggccagaaaggacactctggtcaggagaatacctctttatattagtaccagggaaagctgttttctaatatttggcagttgtcctgaataggataactagagaaattaggtctgtggtgtagaatttcagaggcgtatcatattttttcttggcaaataatatggttttgctgtatccccacccaaatctcatcttgaattgtagctcccacaattctcacgtgttgtgggagggacctggtgggaggtaattgaataatgggaatgggtctttcctgtgctattctcatgatagtgaataagtctcacaagatctgatggttttataaggggaagttcccctgcacacactgtctcttgcctgctgccatgtaatacgtcccttgcccttccgccatgattgtgaggcctccccagccatgtgcaaccgtgagtcaattaaacctcttttctttataaatcacccagtcttgggtatgtctttattagcagtgtgagagcagactaatacagcaaacaattagctttagggaagctggcaagcatgaaatagcgtcttagccatcaaggtgggttttaagggaagggaggtcctggagaagagaaggcagaaggcagatccccaagacaaggattcagccatacacagaaagaagatagcaatgtaggtgtctggcatgggaagcaaggtgggaattgaggctcgagaataagaaaaaatctagatatcaggactaaagtctaagactacctagaagagtgaaattatgctgagccccacactgatggtttggagataattcatctccagtgtttaaggtagggacctgggaactgggccaaagcatgggtgaaaggtgagaatgaagcgggtctgactgtggggcaaggagaggacagtggctgattatgggacagggaagatgtttaccacctctgagtggaagtttatcaccaccgagaaagtggatgaccattatttggtgaactacttatactgctgtattttgtgtatagtactaaatatatatatatatttgtttcaggattatttaatggttttgcccatgtggaaagaggcatatgcttattctatttctcaatgacatttatgagtgctataattataataacaatgatgaaagtttgactaatcaatatgtaaatagtacttatagtgagccaaatctattagaaagccagccagtctaaaagagaataaagttcccatattgcaaatacaaattatgatagtttggaataaaaatcaaattatattttgctctgtgatgcattgtgcatgctatctatgttctttgcgtctccttccatctgtcttcccgctgtttccctgctcattaacacctctactagaaagtgggcagggtgatgacaagaaataaaaatacaagttgaactgcaactaagaatttaacatttaaaaaatgccaacgtaagaatgatataaatatctcaattgtgaaaatagactgcgaccctggttagtatatggtattttaaatatgtgaaaaatgtgaggaattggagcacatcccataaaaaagaacaagttcacagaatgttatcaagggaaaggactgcagagatagactgcaggagcatctttccatacaggtgggaaatgcagaaaaattcattaaaaaaaaaaaaacgaattagcaagtacgcgtaaactctgaagacctaaacacatttctggaagctaactgcaaagcttggcctaaacatggaaatgctgaggtcacttgctggagtcaggtacggcatctgcaatggaaagatttttttttttttaaagaaggttatttcaacattttcaaaaaggaggctggggtggaaatatatgacactaggtaaatatacatcaaaatatttatatcataataggcatgtagtttatttaggctacttttattatgtttatactttacatctcaagatttctacaatgaacatgtatcaattttattatgggaaagtgggctttaaataaaaaatttatgttctgctctcatttgcttatctgtcagtggagtttcttcagtgaattttactagtcaacccgtttttacaatgggattgagacagggatcaatgctgggaatttctgacatgcaaatgattttaatgatgaaagcatggagtttagtcccaatgaggtcatgtatgcatgctgattagatttatcagactgcttctaagcaggaaggacttttaaaatttaaagattgagcgacccaacttataggaaattcagtggctcaaactatattttccaagtggtgtgataagataattagacacaattaacttgcagctagaagacaattaccaccacaaaatgttaattgtttgttctagaaattcctgcattcagtctcaaattagaagtatgtattaatatatataatattatacaaatatattattcattacatattacatgtaaaagctaattgagtattacacatattatttattagtgaatctccctgagcttcaaggaaattatagacttcaaaaaatttttgtggcctttggtacaaatgaagccgattttagaatttcacagattcttttatgaggataaataagtttttgtttatatttttgtggtacaaacctaataaagtgcccaaatcatcggcctaaacatggaacttatttcaagatgtattgattgatttaataacacaaagttgctgaagtttttaagatatattatctgaaaccaactggaaatttctgattatatttccaaatctgggcaaactttggtgaaccctatgtctgtgaaaatgcacacttgcttatgaatctgataagctttattctgagatccactgtgagtaatgcaaaactgaattcagaattgaggatgtcctgagtttaccccagaattcaccaaaatattctaatttgttaaatacaaaaactctcattgaaatggatgaaaatgatcatgattagcattaaagccgtaagtgtagattaagtagctttctgtttaatgcttctaaatagaatgcttctaatggtacacccatgttattttctattaagatatattccactcatgtttatcaataaaagctatatgtatcacacacatactgatttctgaaaattgaagtttatacaagtaaagtaattttttcaaagttacagcatggctggctagaacctaggtatgcaaaatcatacataatcagtggtcattctacgaaacaatgctacttctccctgtcgttagagaactaggagggacctttgaaggaatttgataggaactgaaagtattgtcatgtataattataagaaagaaaggttaaagtgtttcccaaaataatttttactttataaatgattgattacaaaaagattagaagataagattaattaggtttgtatgcctcttttacaatttattacttgtcattgtacaagttttaaaatttctgccttttgcttttcatttttaaaatggggataataactgtgcctgtatcacatggttgtattggtgactatgatttaataatataaaaggcttggacaatgcaatatatcagtgtagcaaaatttcatttataccccatgattatatacaaataaaaaagagaaaaataacaataataaaattaaaataaaataaaaaatagctttgcagtgaaaaataataatataaaaagcttgggacagtgtttgacacatcataagtgttcaaaaaacattagatgttattatcactatatgtcaagcactatgttttgcccttagtatacataattttaatcattccttacaacagcagtgggaggataaatattatcattcccacatggcagttttcgtaagtgaccatttttgcatggctaatatgattaaaagtcaacattcatacccagatctgtgtaagtctagaacagcaagttggtaaattaaaaactattttacattttcaaagagttgttaaaaaaatgggacagagaccatctgtagcctgcaatgcctgtaatacttactgtctgaaccnttagagaacannnttgctgactgccactctagtgcagttttttcttctgtaatatcagactaggctgcctcctgaaaaccagatgcctattttaattgataaaatcattcatgttttcatttatttgacagatatttattgagtacttgatatttgtgaggcgtgtgtcaaagtttgttcaggctgctctaacaagataccttagactaggtaatttacaaacaacggaaatttattgctcacagttctggagcccagtaagtctaagatcaaggcagcagcagatttggtgtcgggagagggttcattctctacttcatagatggtatcttcttgctgcaccctaacatagtaaaggacaaacaaacttctttgtcctctttcataaaggtactagccccatgaccgaatcacctcccaaaggccccacctcttaaaactattgccttgggaattaggtttcaacatacaattttttttgttgttgggttgggggatacaaaatttagatcatcacggcattttctagacctgtgggtaccaggtctaggaaaatgagtgagataataacatttccatcaagaaagttgcaatcctgtgaggaagtctaagagaaaatagacaatcatgggacagggtgaaaggtattttggttcaatatcacaggcttctgtggaaacacataggagggactttgaatgtagcattaaggagtcagatataccttcctggtggaactgatacttgaaataagtccgaatttttagtttaagagtaggtatagagtattctaaattactggagaagcaaataagtacaatgcaaaaagaagtatgagaatctgaaacgtagttgaagtttatggtaatggtggaacttaggaggagggtccctgttaaaagagagggtgagaaagaaagagtgcaaagtataaatatcatgcatgtcgtgctactgtttaaaatttatcctgaaggctatgaacattgtcacactgtgggattattggaaactttcagcagggaagtgacacactaaaatttacattttcgaatgatccttctggaagcatgggagatgaagaacaaggattcaagagtgaggacagggcttgcagccatggagttaaagggcctggatttaccctcatgtcttgatcaactctaacattacatgaagaagacttctcctcagacattggacaataggcagcacaagaaggactgtgaatctcgggggaagagaagtaagtgaggtgagccctgcactgcaattgcctaggattttcgcctggaggcacattttagactgcagagcagagagggagattccaagcaaggaaaagttgtcttatataattgaggaggcagaacttgaagtttaggaagtctggtgtctgtaaatggtgaggcagagatctacagagtagggagctacacagaaaacgggcttgagaaatatacacagtgggtcccatgagtctgaaaaatatcaagacaatgcacagcgtgaaatgctacaaggctgggcaaagaacaactgtggagttatgagaggagcgtatttccacaatacacacagactgcggaatcatttgcattaccaccagatagcatggagagccctcattgagcctctttacttggagaatgcagtaaagactccatccagaaggactactctgcagtagtgggctaacccattcctagaggaaaggtttctctagccctgcccaagcacaacttaaaagcaagtctcaaaaccatctaactaaatacttatattagaaaagaagtagtatcaacaatcaatgatctaaatttattagagtctaaattcccaccacaagaggctggaaaagagaagaaaagttaaaccaaagtaagcagaaggaagagaataaaaatgataacaaaaatagaaaacccaagacaaactgagaaaatttatgaaaccccaagctgggtttttgacaacatcagtaatattggtaaatatctagcaaaactgatacaggaaaaaaagggaagacaaaaaattatcagtcaagaattaaagaggggacatcattaactatcctatagattttacccagataataagggaatattagtaacaaatttataatgacaaagttggattgttgggaaaagcatcctgtggtagcagtaagtagccatccaacaaaagccactataacaataacaaaaacacatcattcattaaccaattttatgtggcaggtcctggttaaagacagtggaaagaaaccaaaaccaactaaagaagaaaagcaaggattatttattcagtgtttgctatagcaaggggagtctgccactgtcacttgtgttttgggagagaatcaaaggcaagcagaggagtgggaagcttcatagtgagaaataaagggaaggcttcaatcataccctgactggaggctgttgtcttggggaagttggaggtaggctaaccagaagcagaacatcctctgtgattgcttaggggtgcatatttggctttctctggtttgtcctaagtttggagtggggacagatattgggaaagctgtcagttatgaatcaagtcctggccattttgagccgattgttacagaagtttttgcttagcttcctatattgtttctacagatagcagcctgacttatagcaggctggcttcctggactatttattgaagttaacagattggctttctggacaagattctggaggttgatggtcaaagttctatttttatacatggattagttcatgtcagtttgtatattcagtccctcagtaataaatgatatagtgatacccaattcattctgaaagcataatgaaaagagtgacccagtcttcctgggagcatccgagaagcctttacagtgaagctaatatttgaagttgccttaaattctgaggcaaaaagaagatgagaagaaattgctaccagagatgaccacattaaaaaaaataataagcaggtgggtgggtggtgtgtttgaagattagtgaccttttaaagaagcttgaacataggcgggtggaggcagacagccaggaaagaaaggtggaaccaaaatgtaatggactttgagtgttgttctaagatgtaatcttatgggctccaagggagacaggatgctttaaagccaatagttataatattagacttgtattttaggaacatgatccttttgatagtggaaaatatgcatggggtgggtcaggaaactggaaacttgcacacaagctaggatggtattttaccaattggaggaagtggtgggaaaggccttgatttgggcagggacggtggggatacagcaaagggcagatagaacaaccagggcaacattttggacatgcagtgcgtgctccgtaaatatctgttatatttttaagtgaataaatgggacatttaggaagtggaatgggttaggtttggtgactgattggatattataaggacaggaaatagtcaagaactactaaagtttttagcttcagtgactgattgtatagcaatgctatcagccaaagtgtgaaaaataggggtgtggcagtttatgagtgaggatgccaagtttcatttggggcatgtctttagggcttataaaattggaatcagggtttgggggggtcactgatggcacataggtaatagctggaattatgcaaagaggtgggattggtcagaaagactttccaaagctaggggagagggtccagtccttgaatgcactgattctcactttttaaaattatttatttattttttttgagccagagtctcaccctgttgcccaggctggagtgtagtggtatgatttcggctcactgcaacctctgcctcccaggttcaagcaattctcatgcctcagcctcctgagtagatgggactatgggcacatgcccaactaatttttgtatttttagtagagatggggtttggccctgttggacaggttggtctcgaattcctgacctcaagtgatccacatgcctcagcctctcaaagtgctaggtttacaggcatgagccaccatgccagcctgcactgatttttaaacagtggataaaagaggaagaaacagtgtttgccattaaatactgttgtgtgctacttctttggaatttttcctttagtttcttgcacacagtttaaccattcatctacttgtatgtagggagatgaaacagaataccttttaaggaaaactatggaaatcacattgggtggaatgtacagaattcggagactctgactctttgagtcctgagctttgcgtgagggtgaatgacctgttgcacaaagggacctgagttaaaatccaagctcacctaatttctgtgaccttggccacattacttttctcagttatacactgaggttaatgatatctattttaaagagtttttaggattaaatgagataattctacataatatatgtaaagtgcccactggtgtcttgcatgtagtttgtgctcaataaatataagttgttattatttttgaagacctagaagaatgacactcaagaaaagccatcaatgcaatttttttaaataaaataaaattatggtattatttttgttgtttatattgcaaagttgatcatgtgaatttcacatttctctcttttaattctcccctacctaagaaaaaacaaaatcaattttttttctagagagggattttgaaaaagtttcaaaatagcattttcaaaatagcattttattatttctttggttcaacacgtgtttatccttatctaaaattaccctgaagattatttcctaatatggaataaatgcttctaggttacaagcatttattgggtgccttaccatgcatcagttactgtgctcaatgccagaatacaaagatgagtcaggagacttctcttgagaaattcattcattcatttactcaattaattatttatgtaactccttctaaagggcaagtgcttatctcagtggtaaaggtagagcagggatagaataaatgcacaaaaagactcggagctttggcagactgtattaaagtgaagggagacatgagagaaaataataaacaggtaaatcgagaaggtaagtttagatgttgcttagtggaaaaaaagtgaaaagaaataataggtagagattgattggaagagaacagcatgtgtggccagatggcctctggggattggggtaggattggggaggaggatgagagaaatgagtcaaaataattattataaaacaaaaatattgcataattgggagcaaaggaaattatagacatcacgcacacaaaaaaaaacagcccaaggaggaaaaagctataaatgcttaaaatatattaatttggaatcacattttaatcattttagaggttttatatgctcatgactcccactttaacctcattcttgaactaatgataatacttaaggtagggggaaaaaaagatctctttctctgttctcccaaatactcactttgggtaaacatcctgattgcaaattaacctcagtcatgttggatagaatttttgttataagtaagatttttgtgttggtcattctcccaaccaagtagatcttcattatctgtatccttgaagttctagctacggtctttaaattatccaaccagcatgtagaatcaaagtgatactgaaagtcataagactttgaaactagaaaggaccattttgtctaattcatccttaattcgcagcaggtggaatggaggctcagaaataaataacagagagtgaaaaacagtaattggcagagcaagaacagaaaccctggtttcatatcaccagattcattgattgagatctttccagtcttcccatctattcaagaaactagcacttcctaaatgccaggcactgtaaagctctgggttcctggatgagtaataagtttctctgcaagaaaacactctctcattccctagaacattgtagagtactaaaagatgtctcaattaagcaaatgataattcataacctctcaaagtacaatagacattattgaaaatgtctaattgtcacttgagagcaaatcttcgacatgcttattctttacccttttgcatcaagagttttaaaaatgatatttcaatggagaaggctttggaatgatagatttggagcttaatctagactgagacttaccaccttttgacctaggaaaagttgttgagcttcactttctagtggcaaaatgtgaccaaagttaccagcccaatgccagggactcatagaacttggtgtgttgatggaactgtccttcagttgcactgcttgaggttaggaggctgcaggaggttgggctgagaaggcccttgggcccacagtcttcaaaccccagtacacccagctcttctctacttccccaaagctctcagggccctttgcaaacaagaactcatgcaggacagtgaactctgccctacatccaagggagaaacctgaacttgggagttggaggttgcaatgaacactacatcaccggccactcctactcagcctctgtgattagttcttctcatctctgatctctgaatgctgtcatgttccagggctcaatctctgtagtgcttttcttttctgtctacattaccctttgtcatatcatccagccttctgattttaaatgccatctatacataattctgatgtatatattaactctagagttggaagtctcaactcatatttgactacctcctcttggttgtctaatagtcaattcaaaattagtaaatccagatcgagctcctgatttccctcaccaaacttcctcctgggtggtctttcccaactcactaacatggcaactccacttgttttttcagttgctaaggtcaaaaactgtattcttgatttctttttcttacatccaacattcaacctatcaggaatcttgttggttctatcttcaaaatatgttgaaacctatcttttaaccactttcaccactaagagtctggttcagcccccatcatctcctgcccagatgacgcaagagcagcggtctcagtttcagtgctcagtccctctgtttctgtattttccctcttactgtctactttcaaaagcggccagagtgatcagagtgaaatggaaatcagatgttcctcttctgcccaaagttctctactggttttctatctcactcagtgaaagccagagttcttagaatgatcccaaatgattaacagggtctgtcccataacaattctttatttttctctgctgttattctcctacccaatctctctacttcagccacactggtcacttaatttttttttttttaacattcatggaaacttctgtctcagggcttttgcacttgctgctgcttttgcctgaaatgattttccctcagaggtttgccaagctcttcttccccaccttctgagtgaggaatttcctgactatcctatctgaaattgcaaagctccctccaaccccagtaccctccaattctctttgtaactttatttttctctctatattatctgcctatgtatctatgtatctatctatctacctatcatctatctatttttctatttatctgttgtttatatttccccaataaaatatgagcaatgtttttttcctttgttttccgttttatccatttctatatccctagtgcctagagctaagtcctgatgggtgggaggtgttttgtaagtatttgtgtgataaataagtggtgttatccttaatagttgtacaatatttttttataaaaaggcattttgggccaggcgtggtggctcatgcctgtaatctcagcactttgggaggccgagatgggcggatcacgaggtcaggagatcgagaccatcctggctaacacagtgaaaccccgtctttactaaaaatacaaaaaaaaattgggcgcacgcctgtagtcccagctactcaagaggctgaggcaggagaatggcatgaacctgggaggcagagtttgcagtgagccgcaatcgcgccactgcactccagcctgggcaacagagtgagactccgtctcaaaatataaaaataaaaaaataaaaataaaaagacgttttgcttcatttttagtttatctgtttttaaataaattctaattctttagataatagtgggctttagggtcaaggataaagtgggaggatatatcaaaaccacctgcaacacaccaaaaacagaaaaaatcatagacagtgaattttgcaaatgttaaaaataaaccattctactcaaaaaggagagagagagagaagagggagagagacagagagagagagagagagagagagaaattcccaggggctagaacagagaaagtccatcagagttggggttaaagtgtcatgcccaatggcaaagaggaccaaattaggaaaaaagggactgaggtttcagtgcctgttcaggaggtggagttaagggtgtgttggccaaggtggaggaccacagtggagccaccagtggaaggctggaggtgggcaggggtgaggtgttgagttagttccaatcgatgtagaggaagaataacccatgaagggctggagcctggcccatatcacttgcatggggccccaaattgcacaattcaggtggagcagtagccttcaggttctaatttcagggtgggtttagagccctgaaacccagagaaccagactgtgcacatcaaactcatgatggtcttgcctctaggaagggtggggaagggaggtggcaaagaggactttacctacagtgtttattgaaaggaacaatacagatgtgaagaaattgttatcaattttcaattattgtgaaaatgtggattttttctgccattctaagtacttttctgtaattattttaatatcacaattattttcaaaagaaaaaaattaaagaaatagggtagtcttttaaaactaagagtatctagtctttctgtgatatttctagtgacttaggtccacttcccatatactttaactggtagtatcaggagtgattttaaaaaagagcaaatgtctattaatatatgtttttcctattttgtttgaatgataatatatgacaatctgttaaaaagtactttcttgggttaaaagtaaaaaaatgaaatctgattttttccttttgttaccttgatcaattgtgatagcactgacttagatagaatgcaaaccataggacaactcatacaattcccatcctatggcattttatagtgaaggagaattaaagtcaaaagaggcagtcaagtatctttggatatttatacgtaattgtcaagtagactttatattaagtgcatagttgtatgtgttagtgtattgctttattatttatttatttattaaattccatttttattttagatttagggggtacacgtgcaggtttgttacaagggtattttgcataatgctgaggtttgggcttctatagatcctgtcacccagatagtgaacataggatc

SEQ ID NO: 59426 - DNA, 492 bp, Homo Sapiens
ttttttttttttttttttttttttaatataattatttattgtaatcatggtttatagaaatcacattttttatagattaaaaaacttaaaaataaaaaagtactaagttaaaaaaaactccactaggagattactaaaactgtaggccacattcatcttcctacaattcttcacccacaaaataaaatccaatttaggaggctccattaactcttttaatatatttctaaatcttaaatctatatttcaaaatgaacatggtacttcatatgggcccacttttcataattctttcaactcaatgttttagccaaaactgcaaacatttgaaatttaattttgaataaaaattacagcttatgcaccaagataacattagaaagtgtcttcagacattttatcaggtattttcctcattacacccaaccaaacacagaaagaaatatatatttttgaaatgtcaattactgctatgctatcaaaagctgacat

SEQ ID NO: 59427 - DNA, 371 bp, Homo Sapiens
  misc_feature (14)..(14): n is a, c, g, or t
  misc_feature (44)..(44): n is a, c, g, or t
  misc_feature (193)..(193): n is a, c, g, or t
  misc_feature (203)..(203): n is a, c, g, or t
  misc_feature (217)..(217): n is a, c, g, or t
  misc_feature (223)..(223): n is a, c, g, or t
  misc_feature (292)..(292): n is a, c, g, or t
  misc_feature (298)..(298): n is a, c, g, or t
  misc_feature (304)..(304): n is a, c, g, or t
  misc_feature (359)..(359): n is a, c, g, or t
  misc_feature (368)..(368): n is a, c, g, or t
ggtgactacaatgngtatttcaaaactgctataaagactatttnccatgttttcaccacaaaaattatatgaggttataaacattaacttgatttaatcattttacaacataaacatatatcaaaatattacactgtagacagatatatacaactattatttttcaattaaaaatagaatttttttaaaattnaatttttctntttcaatgaatctntgattncttcactttaaactcttaggtattaagcatacaaatgtttaatggcttagaatagttacctaacacatnatatgngccaantactaactactcctccaaactatctttttttcataggcattcttcaaatacaagnttatcctgnata

SEQ ID NO: 59428 - DNA, 320 bp, Homo Sapiens
cacgttttaacacaaagaaataataagtgttagcatcgtgtgtcttgaagtatacttttgcactgtaacttgggttacgttaaagagagcttagcaccaaaggtagataatgaagaaatggcataggaaagtggagatgataaaaagttgattgttgaaccaaaaagggtttgaagggaagcttcgactgagtatcagaaattacttaaggcacataggacctgaatcaggraaccagcacttcttacaactgccagttttaaaagrggraatgattctgagatgtgctcattttattttaatttggtggttggtggttt

SEQ ID NO: 59429 - DNA, 551 bp, Homo Sapiens
gattttctaaataaaataaacctcaactttattcagctgatgtgcttccaaaacaatgggtgtaaatccaaatttgcaaatcaaacccattcaaattcatcagggcaaagggtgtacagaactccgcagtgaagtctaaaaaatcaagactcctctaacttacttggtcttggagtttggcttttcttacagtggtccccctgaagtaaatgtccatgtaataaagagatctcaagttcctttttgataacccacctgttttaaatcacagtaggcacaccaaactcatgtacaaggtcacagaggctggctaccggagtttcttgcatcagctcgacctaagaattcacccccgcctccactagagggtgctccttccctggcctggacccttccctacactgaggcggtggagagagtcacactgttaggccaaggtctatttttcaccaggcactgaaagcagatgtgtgaagagaagtggtcatgtgacaacatgcagtctcaatgcccctgggtgtccagacacactggctgctgtacaccagccg

SEQ ID NO: 59430 - DNA, 852 bp, Homo Sapiens
  misc_feature (416)..(416): n is a, c, g, or t
  misc_feature (590)..(590): n is a, c, g, or t
  misc_feature (667)..(667): n is a, c, g, or t
  misc_feature (681)..(681): n is a, c, g, or t
  misc_feature (789)..(789): n is a, c, g, or t
tttcactcattctacagttatttattgaacgccatggaccaggtaccgtgcccagcagctgggatgcagcactgaacacgagacaagcccctgccctggaggggcttacatcccggcagggtaaacagccagtaacttcagaaaccaaacatccagtacgtcagagtgccatgggaaaggtacgctgagcaagggcgggcagtgccagggctggggtgccactgtacagggtgatggggaggccctcctccctggagagggcggcatgatcctagtgggccgaggtcaaccgccagggtcaaacggaacacaacccactctcaggaagacatccctaacacaaatccagggactttgtttcttaaccttaaaattggaaacacttcttgctaccagggatggggggtggggctcancgtttggggaaccggagtgggagtcttttgctgaacagacttttgttttcttaagttttgaactacatgaatgtatttccttttttgaaaggaaaattgaaataggaaaaaattttaagtctgttggaaagaattaatcattttcatggaactggctccctataggggcctggnttcgtatctgccaacttccactgaaacacgcagatggagaaacccctcagtgctccgagaagggagacagtcttacnccagagacagcatncatcagcctgcaagcacgggactccgttgctgggtgtggatgcagcacacactgggctaacccatcacacagtgagactggcacccttctgggggtggtagacctcangaagtgaaaattacgatgctggcacgagctgacaaatcctcttcggactctattactcagagg

SEQ ID NO: 59431 - DNA, 564 bp, Homo Sapiens
aataaatacacattaatgagcaactgagagaaacaaggaaagtgagatcaacattaggcatcatggacaggaatccaaaatctacattctgcccagaaagcaattaagaagcctcagccagagaaattacaagtcaaacttcattgccatcagagatcagagaaatgtatttgtatttttttttccccgagatagtgacaatacaatcagactcttgctaaagtcctgcttggctctgaacacacagattatttcatcactgtatgaggctaaggatcaaccttctaaatcacttgaaaatgaccataaatttcaaaaaatgtattcattttcagccacaaattggccccagtcatcagagtgcttcagcctagccccttcatgccctctcctatgttccttttgaatggtgtaggtggaaaatcccgacggaggcagggtgtgaggcaggtggagggaatcaagagacaaacaccaggtagccacaggtgtgcagaggaaagttagaaacctcaagtctcaacccccagccacctcacagccttcccctctggtatcagtgtg

SEQ ID NO: 59432 - DNA, 4114 bp, Homo Sapiens
gggatgaatggcagcacactgtggtctagtcttctccctgaggaggctcgagatatcacatgtttggagctgatgccaggaagcttggctgaaaccatctgccttgtgacagggacacacaagatgctcagcgcattcaatgcaacgtcagggaaagccatttggactttaaacccaaactacttgtccaacggtaccttggctgccccagttgtggtactgccagacttggatgaagacggtgttcgagaccttgtggttctggccattggggaattgcagccagatctgtgctttctgctggtgtctggccggaccggaaatccagtgggtcgacctgtgaagtacaacatcgttggagttgggaatctgattggtcctcaggtttacatcaccacaaatggggctgtctacatcctgtttggctttggaaatatacaagctgtcgcactgcgggacatttttgttcaggcccaaaatcgagacagctcaccaccttctctgcagatagaagagccagaatgggaaaagcgaagatccatcaacctgtctgagctcattgatgtttacagtgatggtgttgaactactccagatggtgaaggcaccagattccaactgcagcaaccttctgattacaaccagacaaagccttgtgctgcttcgggggcaaaatctgacaccttactgggcattgagacttcaaggcctgcgcagccagcctactcctggatatttcactgatgatcagacattagacttccttctgcagatacaggatggagttgggatgaaaaagatgatggttgtggatggtgactctggctccattgtttggagttaccgtgctccgtgtcacatgaaagaaacgccagccacctcagcagttacttcagaccagaagtctgtcttcctcttctgggccgaagggctgtcagctgcatctcccaattccgatatcatcctaggaactgagccgcccagccttcaccacctttacctcctgcatcctgcgttcccctccatccttctggatctggccaacaccaccggcacagtgacggcttcagaggttggaattaacgacctctggaaagatgccttttatgttaccaggacaacagggccaagctccgaaggccatccagcagccctggtggtcagcaagcttagtctacggtgggcactaatggagggccagatggctcagctacaggagtccacccccaaaattggccgtggggagctgcgaagatttctctctaggataaagtttgttgaagctccctacgagatctaatctgatggaatcttcagttgcagaagaagtgaacagagtggataccctctctactctcctgtcactgtaaaatcagttctatggagagaagacttcttcgtcctcatttaccacctccctgatggttgcaaaggcttgggaaggcatgttggagtctttgacggcagcatgatctatttggctggggcatcttacctaccttttcagtccctgcattaatcccctctaggaactctgcgtggaccgtttggaaatgtgaatctcttaagtatttaatttttttggtatgtctaatttatgaagtcttgctgggaaagccagtgaagtctatgactaggaaacattttgttgtacattgtgctgtgtgtgtgtatattttagtgttgtggtgaagttattttccaggtatgtcctaagcttcagggatccagtttcttgtccttctgaaatatatctggtttgtttggtcattttgagacttccagatgccctacctctgatgttgagggccacttatttctctccttattctttcccacctgtaccttggctacttccaaattgtagacagaatgagaaagatttatagtggaagactgagttagccatccaagcattttcatctctcttgttttatatcctatttccttagattttccatccatgtctattaagtgaccacaagaataactatattcctatcacaaggggagcaagaggatgtagtctcagtgacccatctctgaccaagtccacatgttgtgttatatgtggctctgatggttctgccagtcatgatcttttttctgtggcgacatcagaagtgtatgtttgcatgctgtcttcaacttagaggagaactggaagtcaggagcctttgatgtccttatcctgctgtatgtcttctctgcatctttttctatagggcaccctccttagctcccctcactctgttttctcttctattcagggatatgtttctggactttttcttctgctacttgagtccaggatgcaaccattttgtcctgcatctcttctttcctgtagagcctttgaagcattgtattttgggaaaattcttctgtaaatactataacttttataaatggttaagttatttagaattatctccagtgcttacttctcccttcttctgtataaatctgctacttcaattaagttctcctctaaacttttaggtcattgtttatatagcagaaaattcaatgttagcggatggaaaactgcttcttgaataaccttgataggtcatccctgagtgcacctcaggttctctctttacctgggcttgtatcttttttttttttttttttttttttgagacagagttttgctcttgtcgcccaggctggagtgcagtggcacaatctcggctcactgcaaccttcgcctcctgggttcaagcgattctccagccttagcctcccaagtagctgggactacaggtgcccgctaccatgcctggctaatttttttttttgtatttttagtagagacggggtttcaccatgttggccaggctggtcacgaactcctgacctcagataatccacctgcttctgcctcccaaagtgctgggattacaggcgtgagccaccatgcccggctgggcttgtatcttttagcttgtgttagtaaaaggattctagaaaattatgaagtccagattcaaagggatctctgttaattacccactgacaggcattatgacctaacaggaggttggtagcagtagatccaagcatgcatgttgcctggcctgtagattggccttatcaggtttctgggtgcctctgccttaagatcctgaaggcaaattttgtttcaacagtttggaagtcatctgtgggtccagcttgactttggaggaataagaagatacttctagagtatgggaatgattccagataatttctgggatttgaatctacttgagtttaagggcctgggacctaatttggtttagtatagaatttgaagaattaatttataggcagctgaatacccaaaacttgggtggtggtcctgtggtttggctgagctgtccgggcataacctggttctctgttatgttaaggctttctgggaagccagccactctgcgcaggagtgaaacatgaagttgttttctgaggacctgttttggtgggattgtttgggcagaggactgtgtttatgcagggcaaatcccagaaagataagaggaagctagagaaacttaatgtacctgaattcttcatggtgtatttgcaaactaacttaacatagattcttttgactatggtaagtttgaatctctccttgccaaacaacattataagtttagttttcttcttcctcttgcagccggtacggaaaggtgtaagtggtggctgaaaattgaggaagcttcatctgaccaatgtgggtgctggtttcttgtgaaatgtgtccctaagcctccttctccttgcaggcagccacccacccaggtgtctaagataggacatgctcctttctttctctaatcccatcctgaggttgccggcaaagccaatatgaccactactgagaaatagtaatgacttctacaaatgcaagggtcttaccctcctctttcccttaaacaccctcccttttccttagaccccgtttttgccatcccccaaatgtgtggtatggtgaaactaatcccctgaatgtgaattgctatccttattgccctattaaagaagagccagctggtatattgtcaggaagcactatttaaaatgtgaactgttatagagtaaataaataaatactctacagg

SEQ ID NO: 59433 - DNA, 625 bp, Homo Sapiens
  misc_feature (614)..(614): n is a, c, g, or t
aatgtaaagaaagagcttgttaaatattagttaactcatattactgcagatgtgtgaaacaaatgtccccaatccccttaatgtcttccctctaatgaaaaaaagttacaacaatttaatacatgtttgagggttttcaaagatcaagattatacaagacaaaaatcaggaacgcacacaagcaaaacatttttagcagagaaaaggaaatgagtacgtaagccaaaatagtcaaactcccaaattatttttaaaacgttggctaaaacagcaatgaagtaccacttaataactaactgttaaatcagaaatattaaaattaacagcaagtactgactaatttgtatactatggtatactttaatattgacagtgtgaattggtaactgttttggcacagtctgtaatacatttgaaaggaaacaaaaaaactatatttgacattggactttctgtaactcaacatttacagcattatttcctctcccttcacagtggacagaactaattccagattcaatcctttcaatggggcccataatatcaattactggatggtttctgactctcatatgtatggagaatgaaaggtgggaaatggcaagcccagggcnggaagtccgct

SEQ ID NO: 59434 - DNA, 526 bp, Homo Sapiens
ctgaaaaagttaatatgttaactacaatttaaaacagctatttctaatgttaagcacaaatatttgtaatacaactcttaagcaaaatagtatttttattataatgaaacatcagctaacttgatatttttaaactgtaagtctgggttacaaagtaccaactgctctgtaactgaatgcctactgcttgaagggtcctgaactcagtccatttttgcctacaatcttaagcctacatgaagcccataaacatttttgtttgcagaaaacaacaatgacaaatatgattgttaaggaggtgtaacttacagtatctaggtaaaaacctttcatttccagaaggtcgacaaatgactttactgatgtaaaaacatgctttaacatacattttgcttaaaatcaaatagaatgtttataaagaaatacttcagtccaacatacatattacatcagtaatcttactgctcacaattattttctaacgcccaacacctttagttgttttcagttatccagaatacataag

SEQ ID NO: 59435 - DNA, 676 bp, Homo Sapiens
ttgatctgagcctccctttctcacccacccaaagcagcgaggagagaatatggaaacgtatgacaggatgtatatagcaatacaaacatattgaatgaataaataaagacataaatatgtgggagagtggaccacgcaagcacaaaaagaggagagaaggcagcaagaattatgactaattcaaaactgggttcctgagatagttaaataaatcctgcaccaaatccccaggggggagaaattaacaaacaaaagacagccccacacggaccagtgtgcagaaggctccagggaaccgccagattattggttaatccaattctgtgcacctgaggtccataaataaaagaataagtattgaaatgaaagaatgacagaaagaatgaatggaccacatgaacgactgaattagaaatggaaatgcctggcacagccaggaaggagctgcccatgggattgtcattcatctcactctggggcaccctgaggtccataagcgtgaaaagaggcaggaagagaaggtgtcagggagtcaaagatagagctaaggaaaggcaaaaatgaactaaatgaaagcgaagggaaataagaaaaccaataaaaagagacgatacgtggtgttctgtaagagtaggatctgtaggttacgcctaagatgtcagtatcctgaagagga

SEQ ID NO: 59436 - DNA, 211 bp, Homo Sapiens
tttttttttttttttttttttttagataggaattgggttgcaaaaagccccttttgtttattttattttggaaaaaaattttattgggaaaattcacatatatatataaaaaattcaatcaatacaaaaggatagacaatgaacaaatgaattccccttccactccagatccccaccccagatccagacctcctgagcccactttccccat

SEQ ID NO: 59437 - DNA, 443 bp, Homo Sapiens
tttgttccccacattatttagttggagctctggggcttttttttttttttttttggagacaaggtcttgctctgtcacttaggctggaattcagtggcatgaccatggctcactgcagccttgccctcctaggctcaagcaatcctcgtctcagcctcctgagtagctgaaactaaggcacatgccaccatgcccagctaatttcttttcttttagagatgggagccttgcccaggctagtctcaaactcctagcctcaagtgatcctcccatctcagcctcccaaagtgacaggattacaggtgtgagccaccatgcctggctgctctgtaagtgtctgaatttcattttgtatttatcagtctgtttagattttctttcccttcttgggtcagttaggccattggtttctttttaaaggttttcaaatttatttgcatcta

SEQ ID NO: 59438 - DNA, 469 bp, Homo Sapiens
  misc_feature (321)..(321): n is a, c, g, or t
  misc_feature (352)..(352): n is a, c, g, or t
tttttttttttgggagcagggagaactttattgaggttatgaatatattctacttgaaactggaaggataagtggtcatgaatttgtggcttatggtaacctttgttaagcatctttctttttctttttttttttggtgagacacagattcactcttgtcccccaggctggagtgcaatggcgtgatctcggctcactgcatcctctgcctcccaggttcaagcgattctcgtacctcagcctcccgagtagctgggactacaggcatgtgccaccatgcccaagctaatttttgcattctcagcagaggtgaggtttcangcacgttggccaggctggtcttgaactcctngaccttgtcatcctcccaccttggcctcccaaagtgctgggctcacaggcgtgacaaccaacggccggctgttatgctcatcatggcacttaagagatgctcaacaaacctttccta

SEQ ID NO: 59439 - DNA, 674 bp, Homo Sapiens
gcggccgcctgcgggctgccccgctttgcggacgggctgtccccgcgcgaacggaacgttggacttttcgttaacattgaccaagaactgcatggacctaacattcgatctcattcagtattaaaggggggagggggagggggttacaaactgcaataaagactgataattgcttctgtagtactccttaagaacacaaaacggggggagggttggggaggggcggcaggaggagagaaagaagagggaagggtgggggaggagaggaatgagagggggaaaggggaagaggtgagaggggggaggagggagagtgggaggaaagaggaataggagggaagagcgagtggtaggaaagagaagtagaaagtggaggaggggagtattgaggggagagggatgagaggggagtggatgtataggaggctgtgtggcgacggtagaaaaagatggaggggagcattaaaatggacgtcagaagatagagtgtgataaagatggataagttgaagaatgattcagtggtaatacggaaaaggtgagatgtgaatgaagagggatacggaaggaaagtgtaggggggaggggagggagatgaaaggagaaaggaagagaaggaaggatgaagaggaagatagagggggtaagaagggaagagaggaaggagagagggg

SEQ ID NO: 59440 - DNA, 837 bp, Homo Sapiens
cctttaatctcagcacttgggaggccaaggcgggcggatcacctgcggtcaggagttgagaccagcctggccagcacggtgaaaccctgtctctactaaaaatacgaaaattagctgggactacaggcgcctgcaccaggcccggctaatttttttgtatttttagtagagacggggtttcaccgtgttacccaggatggtctccatctcctgacctcgtgatgagcccgcttcggtctcccaaagtgtggggattacaggcgtgagccaccgacccagcgatttagtatattttctaatagactatgttcaacaaataagtaattctcgaatagttcagattaaaacatacaggaaccaagtacatacccagcatagaagaactttactaaaggcttctgtggaaagccctttttgaaacgacagtatcgtaagtaacatatcatttataatagaaatctgtgacccagtgcagaacaaataactatagtacacattatttatcttgggcagtttcaaacaacccggtattaggccttgaagttggagagatcaggtttctgtcttattatctttcattgtgttctacaattaaaggtctggtgtgagtgtagataattatagaatttggtctcaaaaaaaatgttgattaaccgattataaattggggtggaagctaatgatgacagagtcagtgagggcacattaggagtttggggaaagaggaaacgtacataggactgtggggtggaggaaatgaaaggggatacgggaaaggcgatgggtcaaggggaagataaaaggcaaagagaaaagaagagaaaaaggggtgaaata

SEQ ID NO: 59441 - DNA, 758 bp, Homo Sapiens
gaatgaggttgttaaagtcttttatacaatgtattgtctgtctgttccataaaaagtaaaactactctattcgtgaccagcttgggcaacatagtgagactgtctctttaaaaaaaaaaaaaaaattaaaaattagcaggtgtggtgatgcacacctgtagtcctagcaattcgggaagctgaggtaggaagatcgcttgagccaagtgtttgaggttagaatgagctatgatcgcaccacctacactccagcctgggcaacagagcaagacccaaatggctcatggttgctttgtttgttttaccttgttgagtgccagtgtgtattttgagcaaagcagtgtaaatggccttcttgccctagagtctttcataattgagccttatttaatctaccacttttgaccatgaaatttaacaggtgacttcttctgggtatctactccaggtgaagtgatattttttttgactgagatgtctaaagctcttggattcctggtatctcaccaggacatcttagtaaaacagcaagtatcagatgaggaatcagacttgagttctagctctggtctggccactaacattgatatgatcttgggcaagttagttcctgcctgggtttcattacctttaactgaggagggtggatgatttctcatgtctcttctactcctaaattctatgattgtagggagttcctattgacgataagagggctgggggaggctacaagagatatcctattttctcttctttgg

SEQ ID NO: 59442 - DNA, 539 bp, Homo Sapiens
tttaaaccaactgaaggccagagaaatgaaaggcatacccgtgaattaaattaatgctttaaaaaaaattgactttacttaaaatacaaacaaacatcaactaatgaatactttattggcagaaaaaaaagacaacttggctggaaatgctgagtgtcttggactggtctgaaggaagaacatctgaaaggtctgaatgtcaaagtcagaacagtctctggtcaatcctactttgcttaaaatccaacattttacctttcttcaaattcctcaagactaaggaaaacttggttttataccaagaattatgaatcaacctacacttgctatcccttacatcacattttcattctagcttttctgaaacacattaccagataaatgccatataacctaaattcacctcaatgctttcattttgcctttacaattaccttaggacagatgccaagtttttataacttcaggccagaaaatcctcaagtggctcacctaattgtcagaaagtgagtgagtgacaacagacctcaggcacctcg

SEQ ID NO: 59443 - DNA, 181 bp, Homo Sapiens
ggtcgacttttttgtttttttttttgagagacagcccagactggtgctactgggcattttctgtgaatctcaaataactaacactaacaaaggaacatactttggggatgcagatctcaagccttacaggtaactgtaatggttgtaacattcacatcttaaaataaaatctcgtcgacgc

SEQ ID NO: 59444 - DNA, 928 bp, Homo Sapiens
gggcggggtggcctgattggctcgcctgcccctgggggcagtagaggggccccgcccagctaggggagccgctccgttccactcccctccctagccctccctccccacggcctgggcagggaatgtcttgtgcccgccgtccctccccggggccagagggcaggggggccgggcgggtcctaccctcttctcctcctccccatctcctccccgcccaggtgcgagccggagccgctcgccactcgctgccgcccctgactcacgccgccccgggctggcgcagcgaagggtgtgggacagggtaaggggttggaagagccttgtggagagcgggcgagccggcgccatctggcggcatgctctgagtgggcgagcgcccccgggcactggagcgagctgtcttcacgctcctcatccaccccagctggtgagcggcgcccccttgccaaggcagtgggcacagaacattctcgcttggcgcaggggaaggggctgcggagctgtgggaaagtgatccccttcccagatccttgccagccgggcttcctgtcaggcaggggagactaatccccactcggtcttaggattgaatccacccattctgtacatagctcttctgttggtcttgttgaaatctagttcagatataacctacccaatctgctgggggtgggggacacccccccttctcggcgggtgctgacccttagcgctgggtcgcttgcctatttcccttcggcgaggtctcccctcctaaaggcaggcagggcccggacacaccctcaggacccagcaatgaagggcagaccaacgggggggacagagggacgcaccgcacacagagaaaacagggggcagggcgcacactagaggaccggagggccaagagggcccctgcgcaggccagagaagaaacacaacgcacaac

SEQ ID NO: 59445 - DNA, 534 bp, Homo Sapiens
tttttttttttttttttccagttttgggttttctctttttaattaagatacaattcgcactctaattcagagtctcggcattaacatatattttgttgatctggttgatgattttaaaattatttttcctttgtattctttacctacggctaaatttctaatcttcaaaatgcctacattcatttcatttaccttacattttatcttactcatttttaaagccttcaacattttttgagttttgaaataattctcaatttcttagtctcttaattcttaaatttaaaaaggttgtttcttaccttttaaaatttttaaaaataattatgtcaagtaatttttgaatatagtaacctgattctacatttctcatgggataaattctaaggtaaaaaaaattgcaaataaatcttaaactttatttagtaggtttattattagcagcagatgtctagccagggtagattacttttatcagaccaacctctcaccaacaactactagaagagctagagagggagaaaagtctatttg

SEQ ID NO: 59446 - DNA, 584 bp, Homo Sapiens
tttttttttttttttttgaaactcaaaattatttttaaaatagcaaaagaactgacagcacttcacaaaagaagaaatacagatggtcaacaaacacttgaaaatgttaaactttacttattatgaagaaaaactatcaatgattcatcatttgtcattatcaaagaataaaagactcaagaatatgcaatactggggaggatgggatgagacaggcactctctgaaactgctggtggaaacataagttgattcacaaaaatattcaccatagcattcatagcattataaaataatgttacaaagcatctatgtataaactataaactatgatacagctatatgcagcccttaatgtttaggaaccatttctagttcacatagaatgatgttcacaaagtgggatacaaacatatatatttatgtaatcccaacagtgtaaaacaatagtgtaaaaagaagtgtgctgttcagagtggttatttctacgacctgaagtatagatgacttttagtcttttctctgcactttcatgtattttctagtttcctacaatcagcatgtgttattataaacaggaaaagg

SEQ ID NO: 59447 - DNA, 3743 bp, Homo Sapiens
gcaaaggtgactggcttcagtgaaggtgtggtggatagtgtcaaaggtgggttttccagcttctcccaggccacccattcagcagcaggcgctgtagtctcaaagcccagagagattgcctcactcattcggaacaaatttggcagtgcagacaacatccccaacctgaaggactctttagaggaagggcaagtggatgatgcggggaaggctttgggagtgatttcaaactttcagtctagcccaaaatatggtagtgaagaagattgttctagtgccacttcaggctcagtgggagccaacagcaccacagggggcatcgctgtaggagcatccagctccaaaacaaacaccctggacatgcagagctcaggatttgatgcactactacatgagatccaggagatccgggaaacccaggccagactagaggaatcctttgagactctcaaggaacattatcagagggactattccttaataatgcagaccttacaggaggagcgatatagatgtgaacgattggaagaacagctaaatgacctaacagagctccaccagaatgaaatcttgaacttgaagcaggaactggcaagcatggaagaaaaaatcgcgtatcagtcctatgaacgggcccgggacatccaggaggccctggaggcatgccagacgcgcatctccaagatggagctgcagcagcagcagcagcaggtggtgcagctagaagggctggagaatgccactgcccggaaccttctgggcaaactcatcaacatcctcctggctgtcatggcagtccttttggtctttgtctccactgtagccaactgtgtggtccccctcatgaagactcgcaacaggacgttcagcactttattccttgtggtttttattgcctttctctggaagcactgggacgccctcttcagctatgtggaacggttcttttcatcccctagatgatgctggcacagaaggcattgttccctaccctctggcgagtgcatgcagcagagagttagacagcaacttacctactctgaagttttctacaacaaaaaaagagttgagtgaatctgtttacatttagaataatgtttttttcttcaagagacgcaattgcaatagtattttttagattttatccaagaagttttttgggcgaaaatcttggatcatttttatgtagcatgattttccttgggatgcaaatcttaaaacagtcctttaatatgaaccaacaatctggagcacaccgaagggcaatctaaattgtggcttgaaggactgcactaaaacccactaaaaagatgcgaaaacctgatgagggcaaaccagttaaacctaacaccctgccttgtctgggctcatcacctctccctatcccagactaactttactgtgaaatcctaccacattccatgtctgaatttttggattcggggtggattttcgttgtccgtggaagaacacatggatctctctggctttctcacccaagttggccacttacgctaatcctggaagtatgatcacttttgaacctgccccttaaccttgacgaggatacaaaagtgaaagcatcatcccccaaaggatcactgcacagtcctactacagtatttttaagtagccctctaaatacttaattttaagcaaaatcccttggccgcacttttaaggtttttttatatgtgtatagttaccaacctaaaaataaaaaatccgaacagcatacttgaagaatgtaatactcaaactctcagtgcttccttatggtttctaataggattttttattattgttattattattattgggtttttttggacagggttgggagggtcttttatttttcctttgaaataaagaagtgatgtttttaaatgaagaaatgtgtggatatttaagtgtgctgctccctcttgtcttgaaacagtttgagtaagaaagtcttgctgtaaatgctgccctctgccgcctttgttttgagatgcagtttaaactccctctggctgctgctgctgctttttggtgtcccgacatacctacgcccccgttttatgggtttggcttagttgaagaggaaagggttgtgcaaggagagcaggaggctgtttccaaaaaccagtgtagtaggatagggatttttttttttttttttgccccaagaaaacgttcacccagtgatcttgggctggggttgtctttaggaaaagttgagactataagagtcataaataagtccttgtgtttccttaatttattttgttaacacccctaattacaaccaaagtgatgatgtggagtcttctgtcttcattttggccccagcattcttaatttcaaagctttattctgtctgcctaagagaatcaaccaaaggtgattctcctaaagagcagtgaaggaaatgtcaggttagcaggacccaagttttgggtgtgaaatgttgccagcttcctataatgtaaacggacttgttaacctaacctaattatgctcagtggacttctatagatggttttgaaaaatgaactgagctgccttcccgcatcgcataaccagttccatcatcctggtggaacttgaacatttagagtttatctagagagcttggttaatctttccatattatttgtagtattggtcacaaatgctgttccctcttagcctcattctgtgcaaccaagtgcatataagatgccctgaaaagagtaacaaagtatgctttgcctgtttccacttaccaggaaattccttcagaactagattagcattgccctgcctgtctgaaaggacagtttacctaatggtgccagcctccttttgctttggcaagctggatttctcagagccagcatgttgtttccataactactttgatattttaactcaggtactccagtcttcaccccaacctcagctgattgtagtacacctgctagctctgttgccccctcaaaactgcacccagagcagggccacaagggtgcttttttttctttaaaaaaaaaaaaattagaaccaattcatgttcatgccaaaaacaaattgtccccaagcctatatgtattaaaatgttaactttgcctaaaaatattgcagtgactttttaggcaggagtgccaaaggacactatgaactttttgaactgacagtttctcctaactttctgctttagcgtaattgctcagagtagagagcccccacaaagttatttaaaagatgccctagcagcaatccaccagtttttctaagctagaacctttgagtcccccaaactgcctgaagacttaagttttgtgggcactggaagtcactttgatagatggattgaaactgttcctatttgccctgggacggtttctatctatcaaaggaaggttttcacctgtagaaagccccctgcctccagccaaatagtcccatgctgactttctatcttcctttctcaaactgtcttaggaaggaccttcagtgcagatcaggtgcagtaatggctttcttgtcccttaattattcaccagacccagaagttgtacgcatttaatgctgtttgtaaccatgcatctgttttcattctttgctgtaccttttgctgcccatcctgttacttttgagtttctttcattgtggttgttcttgggttcttttgtcttgtcagagctcttctataacctcgctctaatggcttaacagttgttctgggtggaaacgtcccctcatttgaatgctcctct

SEQ ID NO: 59448 - DNA, 529 bp, Homo Sapiens
ttcattttaaatgattttaattttctgaatattatgttccaactcaagatattgcacaatgctttaatattacacttgttatttttctcacactagtgagattttgataaacatagttgactttggaagtaacagagaatgttttcattggttaaataatttcaatgacctgtgaggaactgaaagcaagctattacattcatataaaagataagtacatatccataaattcacttggattcaatgaaaaataataaacttctcgtgtacttaataaaacttaaaaggaaacaaaattttaaatggtgcaaaaatagaatgtatttcttaaagttttgaaaacacttagacctaaaagaattctaagaatatctggccacattataagcctcttatttgtaaaagctaacacttgataattttaaaacaaaatctagattaaataaatatagttctgcattattaaagtaacaaaatctgtgatggtaaggtaaaatttccctaaataatataaacaaaaaacaacacc

SEQ ID NO: 59449 - DNA, 698 bp, Homo Sapiens
  misc_feature (292)..(292): n is a, c, g, or t
  misc_feature (294)..(294): n is a, c, g, or t
  misc_feature (665)..(665): n is a, c, g, or t
tttagtaaaaatattaattttattaaatctcaaccttgagtacaagtcttgtcgttgactgtacttaaaagttttgtcctccccaaagcatatggcgtcaaggctgggcctaacccagtctcatgaccttgtgaatccagtccacaaacacagagacacgcgtgaagacggctggccagcgcgaccttgcgcatactcggttggggattctaattcctttcaggacccagcagttgtgggtaaagcaggcaagtgggcccccgtagtcactctcacaggcccccacaggganancaagtccctcagtgcacatctcgctctcccgcacatgtcctcggtgcttgatgttacactcctggttggagatgacgttcagcaaggccacatttaggactgtgtcattacccgtacctttggtctcaccccagcctgcaatctcacacttggtccctggaggcaccacataccattcaggcggcaggcagatcagggccacacgctggttcagggtcacagatctctccagcttgagcaggacaagctgggagcctgagggcccacacagcatcttggctactgggacccgctgtaggcctggctctccatgttgtggggtctggaacagggtggccaaccatacctcatagcccgtgagaggcatatgncaggaggagaagcattgccgggcatacagtatc

SEQ ID NO: 59450 - DNA, 1461 bp, Homo Sapiens
caccccacagggccagggctgagagcgaggagatccgccaggttagagttgatggagaacttggcggggtgtggaggaaggccagggccaggcagggctccttgtggaggtctcagagcctggggcaaaggggcctgcaggggagctcctcctttgctgacccctcctcccccagagccagctgcatctctttctgggtttctaggtgacttggctggcccctctggatgagttctactttaaacctgctgctgttactgcctctgtattgggggggctcccacaggggcccccaggcaggaaccccccccaccagctaagccctgcgggaggggctgcagcccccacccatcccattgcccatgcgccttccccgctcccatctctggaacgcagatttcagggcacctgctgtgggccaggcactgcagagcccctcctcaaccctcctgtctggggacatccacaaagcttctgacccctctgggcagacaacagcgttccccccgcggttcccagccaagaggctcacagtcaggctccagtcatgggagtctgcagcaacaagaagggggctgttctagggctcactctcgaagaccaggatgcttgggtccttaaaggaggtggcaggcgcccggcctccctgggctagggacgggggaggggtgcctgccggcgggaggtccattagccggctaagtgctcccagggaggggggaccgcgcggcataagagtgggtgaggcgaagccagggcagaggggggcggaagaagcttttcctgcattcagctaagtgcggcagaagagggtgggcgacagggctgtgcagcgaccccccggcccaagtctagccctccgctggtactgcagccctagtcgctcggaaacctcagtgggctgatcccggaccgccttaagcagcgccctctacacccagtccctccagctgctccccaacagccacttcggcccccagcgccctccttccaccacaggcctgaagaatcaggttctgctgagccccgcagcaaagcccccgacccgtccgcgtgcccctgccccaatccccgctccggctgcagtcgccgccccggccgccagggggagccgacgcggtgggagggggcggggcccgggaggccccgccccgtccccgccccgcccgggccccgccgaggctctggtcggtccgggacagactggcgggcgggcgggcactgacgccgcggggccggagcgggccgcgcggtgggagcagcggcgccgtcggtccccgtcagggctccgtgggtccccgacccgcccctggccgggccatggcgggcgcccagcccggcgtccacgcgctgcagttggagccgcccaccgtggtggagaccctgcggcgcgggagtaagttcatcaaatgggacgaggtaagcgcgcgggcccctgctccgcccaaatcccgggactct

SEQ ID NO: 59451 - DNA, 478 bp, Homo Sapiens
tttttttctgtagagacagggtctccctgtgttgcccaggctagtgtcaaactccaggcctcaattctcctaccttgacctctgaaagtgctgggattacaagcatgagccaccatgccccacctaaaacattttaagtgccatcaagagaaatcacagtattttaaagctggcttatttcagatgatgtttcagaacaaagaattttcctattttgaggcaaacagaagcagaaaagaaaactgcattagccaggaagatgtgaaagacacaaagattttataaatctgtgaaatccagaaaggctgaaggaaaatttggaattgctgaaggaaaccaaaaagattatatcaataatacaattaatagggtatatgagagacatatttttaaaataaatattctctatataaaacaaagcatgcttcaaacaaatacaatatatttattacacaaaaatgtcataactgacaaactg

SEQ ID NO: 59452 - DNA, 668 bp, Homo Sapiens
  misc_feature (519)..(519): n is a, c, g, or t
ttttttttcctattgttaccctctttattccaaaacaattacacatttcaacttttcaaaagcaacatctgggtaagttaggaatattcacagcttcttacacagtgtcagagaaagagactatctgagctcaccaggtatctgctgtgtgttggggaaactgaaaaacaagcaaaagtataactacaatctggacttttttcttttttaaataaagttttttttttccatttttcttctcatactggggaattgttcttgactccttttcttgacattcagttttcagaatttccatctttcttctggaactaatgtgctgttctcttgactgcctgctgggccagcatccgattgccagccagaaacgtcacactgcccaagatggccaggtacttcaaggtctggaacatgttgagctgagtccagtagacatacatgagtcccagcatagcagcatgtcccaggtgaaatataatcgtgctaggagcaaaagtgaattggagacattggcaccanatccgatccacagagcgaagagcagaagcaacggcggagagatccaggcagtgaatgattggacaaccacggtgggggcctcttctcagctcgcgggacaagtgctgaatttctgttttggagtgaaagtcctggacaagaagtcgagg

SEQ ID NO: 59453 - DNA, 525 bp, Homo Sapiens
  misc_feature (521)..(521): n is a, c, g, or t
tttgcatcttttaaattttatttagcaaagttaaacatacatatattttaaaagagaaaaagaggaactcacccaaccctcatatccaagagcttaaaatcacaggaactcaagacccatcctcaacttcaaatgccagtcattattttagaggtaactcagatttctaagtaatgcttctgtttctcgatttatcaaatagacattatgtattttgttttcctacatgagaattgaggtagtaacagaatacccatctcttatcagtaacaaagatttacaaaataacttttgtttttcataattacaaaagcaatacattattattgaagaacatgttttaaaaaaagacaaaaagtaacaaaactctccattatcccaacaggcagaggaagttattaccattttaatgcatatccttaacacatacatgtaaaagatacatatacacataaaaatataaatgtttaacagaaattactttgtacacaatatttgattaaactatgatctgtcttctntcat

SEQ ID NO: 59454 - DNA, 577 bp, Homo Sapiens
  misc_feature (244)..(244): n is a, c, g, or t
  misc_feature (256)..(256): n is a, c, g, or t
  misc_feature (287)..(287): n is a, c, g, or t
  misc_feature (301)..(301): n is a, c, g, or t
  misc_feature (310)..(310): n is a, c, g, or t
  misc_feature (398)..(398): n is a, c, g, or t
  misc_feature (404)..(404): n is a, c, g, or t
  misc_feature (429)..(429): n is a, c, g, or t
  misc_feature (450)..(450): n is a, c, g, or t
  misc_feature (455)..(455): n is a, c, g, or t
  misc_feature (464)..(464): n is a, c, g, or t
  misc_feature (515)..(515): n is a, c, g, or t
  misc_feature (541)..(541): n is a, c, g, or t
  misc_feature (554)..(554): n is a, c, g, or t
tttttttttgtaattttagtatacagtttgatatttattttcctctgcaacatacctacttgtacctgtaacacccgatccaaactccagaggcatcttctccttagtaattctatagtgtctcactgaccaccattctctagttgttttattgatagattcatccaggctgggccaatgggacagcgggataagaaagagagagggagggtttagcatactggcaggagagggtctgaaggantgaatcatggantcccaggtaataggaagcctaaggaggagantaagacagcacagntcaggaganagagagatagtggggatatgctggaacaggtacagtgaagataactcagtgagagagctgggaggaaggaggcagcagtcagagtttngagggnctaaagtttcaaactttcaaaggtnggagcagttttcaggaggttngccangcaagaggntgcatggttatccgtgttttccctggtccccttccagctctgtatacccgnttcagtctgttttcagccagagcaancacattcacctantctcaggttgggaggtaagggcc

SEQ ID NO: 59455 - DNA, 554 bp, Homo Sapiens
  misc_feature (108)..(108): n is a, c, g, or t
caaaataacataaatcttttattgaaagtcactttactaatgttacaatgggagtaacatagaaaaccatggtatcttattagcttccgaagtgaatactaataaaanctgtgccagagaatttgaaccttaagttacagtgacctttaaaaacatcaagattttgtttacctacaatgtaagaacaattttataacttgaacagccataaaacaaatcacacttgctcaggaaagcagttgccatatacatttccattggtgtttgccataaccccagtaattattaaaatagcttaacgaacctgaagtgcagagtagcagagaaatgttaaaataatgcgaatcttagtatatacacatgattacctgattaccaaaagtgaaaccatgctgctattaacacctcctcatggggtggcttccactatctatagatgcacatcacctgtcaaaggtgataaccgtggaaaacactagtgccgacctactgctggctaacatgtaagctactatgtttaggtaaaacaccccgtttctgaaagaagttgtctt

SEQ ID NO: 59456 - DNA, 226 bp, Homo Sapiens
ttttttttttttttttttttttttttttttccaggagagattagagtattttattttgcccaatcagagcccttcagcaaaaagagacattcatatacatatatatgaacattttccagaaacattaattaatttaaaatacattttttaaaaaaccagcttaagggtatttatttacaaaaatatttcattacctaattttaaactttttgcggggaggacagtt

SEQ ID NO: 59457 - DNA, 353 bp, Homo Sapiens
  misc_feature (146)..(146): n is a, c, g, or t
  misc_feature (317)..(317): n is a, c, g, or t
cagagttcagaccctgctacagaatcaacacaaaataatcagtggacggaggtgatgttcatggcaacacgagaacttctgcggattccccaagcagccctggccaagccaatctctatacctacaaacctagtgtccctcttttntcgctatgttgaccggcagaaactgaacttgctggagacaaaactgcagctagttcaggggatacgataaaagatctccaaatgtgtcctgtacctccttttggctgccacctgcactgctgccatcaccaatggagtgtttttaatgagggaaggaaggtagcttttttncccaaagcaaagtcttgtgggatcgattcctgttta

SEQ ID NO: 59458 - DNA, 286 bp, Homo Sapiens
ggccgtcatttttttttgttttttttttttttttcgagccagcaaaccccaaacaggaacctatggttggtgatggatgtgcgttcagagagcagggagggagggggagtcagaggtgagggggtcatcagccatagctgtccgctgcatcaccccctggctatctccaggaagcgtgttgggcttttcctgttgtgcagtgtggaagtgatcgttcttcattcatatcaaggaaagtcaaaggacaaactaaagccggcagcgtctttctggcttcctagtcagg

SEQ ID NO: 59459 - DNA, 721 bp, Homo Sapiens
  misc_feature (509)..(509): n is a, c, g, or t
  misc_feature (524)..(524): n is a, c, g, or t
  misc_feature (682)..(682): n is a, c, g, or t
  misc_feature (691)..(692): n is a, c, g, or t
tcagttctttagtatctttattatccattcccgggggcactcctggctgcccaactcaggggtgcagatgtctccctgcaccatgccaggtgtggtgcagaatgggaggcagggggatggagcagagagaggcctggactgcctgtggcctttgtcgagtcactgcccttctgtaggctctgctctggaaatgctggggtcagaggcaggtgttggggagcagccctgtctccctctgtcctccaggggagcagctgggcctgaggaggaagcacccctgccccagggtcccgaaggccccagaggacccatatccccctggggcagttggttgcccctccctgaccttgggctctggaaggtcagagcagcagagcagactgcccgttttcccccatctcagggcctggctgaggcagggcaggcaggagagaggcccctgagggcgggtttcaggccctgggccaggcactcagatggggtgcacgaactggtagacgaggcgctgngagatgtctggcttncggatgatgcccttcttgtatactggcggatggagcggctcagcttgtcgtagttcattgcgggacggttcttgcggatgccccacaggcgggccacctgggctgagtcctcaattttgagatgcccttctcctttgtgagccaccttatgaagcggncatagctgnngggctgagtagcaaactcttgaggaactg

SEQ ID NO: 59460 - DNA, 560 bp, Homo Sapiens
accttggtataactttattcacaaacggcagacacccaggcctggcttagcacagagggcatgttcttgccagtggcaaaaaaacccgatacagcatgtttgttaatactaaccattttaatttaaattaatagcatgtctggaagacaaatgtagttgatagaaaatataaaaactttactgtacaaattttacatcacattcaaaaaaagcaagtgtgtggcttgtggccacagaagatgctaggtttgcacgctgatgagatcctggctaacactgctgcatagcacaaactccaactggcttcacatttacgtctccaccctccccccacaccaaatcaacacagaataacacaggtttccagggcttgccattcctctctgtgacctcaagaggaaatgcccgtagatgacagagggtgttttgatttggtgacatggagagatcaactttgctacacactgctcacaaccccaaactagctaggattcaagacttcgagttagacagaaacccagggggctgcggctctggtggttaaaggcagcagggcttca

SEQ ID NO: 59461 - DNA, 527 bp, Homo Sapiens
  misc_feature (386)..(386): n is a, c, g, or t
  misc_feature (468)..(468): n is a, c, g, or t
  misc_feature (524)..(524): n is a, c, g, or t
acataaattaacccatttattataggccagtgatgtctcaaagagtagaggagcgtctactggtctttcaactccttcagtcttctgatggcggactttaccgtgacagcggaagtggtactggaaagaaagattcagtttccaacataattaagcatgttaacatagaaaatggcaaataagtaaatctgcctcgtttttgtgttaaagtcgcttcccaaattttcctagaaagaattatactgagatagactgctctaccaatactttgctgcagtcaatccaaagatctaaccaacattagattactcctcggaaattagtggcttctaaactacatgatggcatcctttaagaagccatgccttcaggatcttgcagaattngacatacaatctcatgcatctgatttctcaacccagagttgcttttttttttataagttactccagtttgtggacaagccangctttaactcccccctacccctccattgaaaaaaaaaattgggtcctaaaaaggtngaa

SEQ ID NO: 59462 - DNA, 467 bp, Homo Sapiens
ttatttataaattttttattttaaaattctaccttggtaaaaattaatcagtaagtgtcctggtaactataccaaaacatattttgttacaagggcaagcttaattcagtaacacaaaaaagtatacatatgtattaatatgaagaaataaggaattaaaatagattcttatttagatttacttattcagaaatgattcaagtcaaacagtttattttctatagatttataatattttgccctcaacagaactaaagtactaaacagaaagcgattctgtacaactggccataatatgtacaaagatgcctccagttgtttttaaaaaacttataacaatacttagttacttctaatagtcattaagattttagttctgttccttgaattacattccgaatcttctcagcatcaatttgtacaattttgttggatggatcaatcttaagtgccgcttcataatcctg

SEQ ID NO: 59463 - DNA, 555 bp, Homo Sapiens
  misc_feature (365)..(365): n is a, c, g, or t
ttttttttttttttgcagaacacattttggtttaatggacagacatagaagtggctcaaaaataagcaaattcatttgtaataataccagcaaatacctattgttaagcatttatatgtcagacatcccaaagatttgtgtacatatttagtctttataatagctttgggaggaaagaaccaatatcatactctacaaaggaagaagcagaaccaggattcaaatctatttggcaccaaaaatctgcctcttgctacactgcctctattcctgtttctttggaccttttccagaacatgttacttccctgcctcagttagaagttagtgactacgaatcccctgctgacttggcctcaaggcagntattgcaccgcaggaccaagactgctgggcattcctcttttgcctgttgtatgcgtcctctcttcccggtcactgtcaatgagtttctcattgcggtcagtagattctgaacaaccacaacatcatctttccaccctcattgggtgaacgagataaacagcctgcctcggcaaaaaaagggaatggtggt

SEQ ID NO: 59464 - DNA, 1218 bp, Homo Sapiens
attttcttgatcaagatatgtttttacttaatgcaaataaatgtagtctgttgcttgcaaggaaaaaaaaatggcttctgatatctggtataaactgctaaataggataatacgtgcctcttttgttaaaccggcatttaaatgctggactgcttctaaatctgtttgtttcttttcatctgtgccatacactaaaaaacaactgttgccttcatactatatttgttagagcagaatacaaataaaatttgagaggataatgtgaaaaaaaaaaaaaaaaaaaaaaaaaaaaaaaaaaaaaaaaaaaaaaaaaaaaaaaaaaaaaaaaaaaagagaggggggcgcgcgcgcacaaaaactatctccccgggggggcgccaaaatacacgcgccccccgattttttttgcaaacaaggggggccccaataagaggggagagcgatatatatatataaaaaaagagagagagggggcgggggatcaaaaaagagagcaagggggaaaaacgtcgtaacaggggacattgggggaaaagagaaaccacaacggaggggggggcgcggacaatactgcggcgacacaacacacaaacagaaaatactaaaaagccccacaagggagaaaaaaaaaaagctaaaagacgagaacaacacggtgaacacacaaacgcaacaaatcaactcgcaaggaaacaaactttgcagacaacggggaataaacaagcacagacaggcaaatctttcacacaggggggcgtccgcacgtgcaaccaacacaacgacaccaggacacactcagatgaaacaaacaaagacagaaagaaagacaagaaaaaaacaaaagaacaaaaaaaaaccacacaacaaagagcacaaaagaccaaaacacacaaacaagaagacaacaatcaaaaaacagaaagaaaaaggagacaaacaaaaagagtaaaaaagaaaaaaaaacacaaaaagaacaaagaaaaaaaaaaagaagaaacaaaaaaaagaaaaaagacaaaaaaaaaaacacacagacacataaaataaaaaaaaacgaaaaacaaaaaacgcagaagagaaagcgcaagaaagaacaaaaatgagcaagcgacaacaaacaatatcaaagcacaagacacacaaaacaggaagaaacaacaaacagcaagtaaccacgaatgcagcaaacagaaaaaacagcaaaaaaacaacaaagaa

SEQ ID NO: 59465 - DNA, 609 bp, Homo Sapiens
  misc_feature (442)..(442): n is a, c, g, or t
acgtccacatctgggacatcaatgtccactttggggcccttgatgtcaacttcagggcccttgaggtcgccttccactttgggcagagaaacgtccacgtcgcccttcatctttggacctttcagattcaggtcaacttcaggcatagagatcttcggtgccttgaggtgcaggtcaggcattttaaatttggggcccttcagtttcccttctggaccatgaatatcaatatcaggagtgtcaatgtccactttgggtcctgagacatcaatgtcagctttgggcaaattaacatccacttctgggccctctcctttaaatcctggcatgctgaatttgggcattttcaccttgggcatcttcaggtgccagtctgggccatgaacatccacatctggggcatcaatgtccactttggggcccttgatgtcaacttcagggngctttagatcaccttccatcttaggcagagaaacatccacatctcctttcaccttagggcctttcagatgcaaatcaaagtcaggcatggagatcttggggggctttgatgttcatctctggcatctgtatttagggccttcagttcgcatctggacttcatattca

SEQ ID NO: 59466 - DNA, 447 bp, Homo Sapiens
gcaaatgattctcagataaaatgatgttgacagtatttccttaacaatttatgtaaaactatgcataattttcattctaacttttgacatttttctccataaataaaagtaatgcctgatgtttagttaaagtagatccacctttgcttgattttattagtcttgttctatcctatttctttttaatacactgtttagacttgccaacaactcttaactgagaatctcttttccttcctaggctaagtaattgtgagtgggggaggaagaacattaagagaaataatctaaagactttgttcaatattgtcgaagcctaagaatatttgtgtgtccttctgatgtactgaggctttgcgtttaccacaccatctttggattaccataaggttatgtagtaggacttaaaagtactagggcaaacatttgatttttgagaaagatcaa

SEQ ID NO: 59467 - DNA, 674 bp, Homo Sapiens
  misc_feature (4)..(4): n is a, c, g, or t
  misc_feature (10)..(10): n is a, c, g, or t
  misc_feature (24)..(24): n is a, c, g, or t
  misc_feature (655)..(655): n is a, c, g, or t
  misc_feature (665)..(665): n is a, c, g, or t
  misc_feature (667)..(667): n is a, c, g, or t
tacngtaatncttcgaatccgtcntagaagcggccgccctttttttttttttttttttttttttttttttttttttttttttaatttcaaagtttggctattttaattcaatttcattgttcaaggtagtatgggtatattaagtggttcatttccctcctgaagaaaacaacttctgtctgatgtgattttgtgaaattcaaacatgactctttgactgtttaaaaaaaaatttttttttctttacgtatcttggtaagattttttttttttctgggacatattttttgtaaacctccaagtagtttggaaacacttgcctatttgctcattcctctgggcacagcctttcagagcatttatcccacctgtactgaaaaatctgttttcccaggtggtggtggggccactggatagaagggatcacagagaaatgaggagtgagcgagctttgtaaactacttctaattctcttcattagtatgctatgatccaccccagcttctgcaaggtcagacatgcaagacaagtacttggccaaaacagcaggattctaactagtgtaaaaatagattttaaataaaatagaatctctataggaaagagaattaggttatgctttacattcccactcttaagatatctgtattatatnagtccaagananactcaaa

SEQ ID NO: 59468 - DNA, 360 bp, Homo Sapiens
aacaaaggtatcatgggttttttttttttttaaagtaatccttatttctaagaaatacatactgatgtttttacagagaaaaattatgtaataactggaatttagtaataatacagcaggagagaaaaaagtggaaaatgatacacacaaacaagatcggccatatagttattataggtaaagtggggatggatttcattactctccctatgtttgtatatgttaggcaacacaaatgtcaaacaagacagaggaagaaaggcggcaaaatcctttgcatacctgggggttttctttctttgccttaattactaactttctgcattaggttaccttcacatgctaagaacagttgaattt

SEQ ID NO: 59469 - DNA, 493 bp, Homo Sapiens
  misc_feature (385)..(385): n is a, c, g, or t
  misc_feature (405)..(405): n is a, c, g, or t
  misc_feature (468)..(469): n is a, c, g, or t
  misc_feature (489)..(489): n is a, c, g, or t
  misc_feature (491)..(491): n is a, c, g, or t
aaagtactgtatacatctaataagcatgttttccttatgtaaaagatgcactttatggcaatgcataccaggctttcacctgctagaaacatacttgttgccaactttgccatctaccactattctcctccttagaacaggtagaaacctattttacaaaaaaaaaaaaaaaaaaagatagacttaagtttatcttagttcaagattgcactttttaaaaaaactctggactattttcagcaatgaccgaacagcttgcacacatcatagttgtgatcttttttgaggagttatttattggggttaatatctactataaataagcattcttgggcttggtacaaagcataatgcaaattactagttctatactagtataatgaanatgactagttctaaactggnaatgtacttttggcttccttcccaggacagtttagcattggctttcagtggcacttttttagnnatacattttttttcttagtncngg

SEQ ID NO: 59470 - DNA, 400 bp, Homo Sapiens
ttttttttttttttttttttttttgggtttaaagccaaattttatctaacctttaataaacaaataatggcaataacaaaaatttaaaacattcttaattttgaatgttaatatatgaatgctaataatattaatatcaattttgaatatttggacaaaaatcccaaacaaaatattcataaaataaattaagcagcttatcaaaacaataatataccacagctaagcatattatatttcaaaaatggtttaaaacaagaaatcaaaatgaattataacattaaaatagcagaggagaatgatatatgaacaaagcaaaagaagggataggatttgaaaaaatataagaagttagccctaattatagagcatacttgcatacaacaaagtaaatattagt

SEQ ID NO: 59471 - DNA, 883 bp, Homo Sapiens
gcggcgcacccggagcaacaagaagtgggagcagaagcaggtgcagatcaagaccctggagggcgagttctcggtcaccatgtggtcctcagatgaaaaaaaagatattgaccatgagacagtggttgaagaacagatcattggagagaactcacctcctgattattcagaatatatgacaggaaagaaacttcctcctggaggaatacctggcattgacctctcagatcccaaacaactggcagaatttgctagaatgaagccaagaaaaattaaagaagatgatgctccaagaacaatagcttgccctcataaaggctgcacaaagatgttcagggataactcggccatgagaaaacatctgcacacccacggtcccagagtccacgtctgtgcagaatgtggcaaagcttttgttgagagttcaaaactaaaacgacaccaactggttcatactggagagaagccctttcagtgcccgtttcgaggctgtgggaaacgcttttcactggacttcaatttgcgcacacatgtgcaaatccataccggggacaggccctatgtgtgccccttcgatggttgtaataagaagtttgctcagtcaactaaccctgaattctcccatcttacacatggcaaaggccaaaacaatcagtgaaaagaagagagaagaccttctcggccacggaagcatcttccagagtgtgattgggaataaataatgcccccctttggaaattatttcccggaggaattttaaaatggatcctcacactaaggacatggtttggataagggggtcctcgtgccggctcggcggattcttggcccgaggccaattcccctagtggggggataaatccggaccgggcctggcggtcct

SEQ ID NO: 59472 - DNA, 553 bp, Homo Sapiens
cacgaggtttttttttttttacacaaatactgttgtaaatatattaaaaaaatcagcattctatctggtaaacgtcacttttgcccctctataaaattttgaattaaaaaagcctcaagaactttttattgttccccccaccctccatttctttttctttttctcttccacaagaatatatcctgacacttttttttttttttgcaaagattgttggaaataatccttctcttgtacctagaaacataggtgcaaatttctgatatctttgttttatctgcattcctgcctttcatgaaagtccctcttgattgtgctgaggctgtggctcagcgaagacactgaataaatacgatagccactgttgcttgttgcttgtccaagtcttcctggcttctgctgcaagagggggatatggagaaggtgggccagggtgtgtggacccgggcagaatctggggaagaagcctgccattcgtctttctttcccacaccaccgaacccactgcccttcccacccccacagcccttttatgaaatcagacaacgtggta

SEQ ID NO: 59473 - DNA, 2697 bp, Homo Sapiens
atggcggccgcggcggcggaggaagggatggagccacgggcgctgcagcacgagcagaccctgatgtatggccggtacactcaggaccttggggcctttgccaaagaggaagctgctcggattcgcctgggagggcctgaaccctggaaaggtcccccttcctctcgggctgccccagagctcttggaatatggacggagccgttgcgcccgatgccgcgtctgttctgtccgctgccacaagttcctagtatccagggttggtgaagattggatcttcctggtcctgctggggcttctcatggcattggtcagctgggtcatggactatgccattgctgcctgtctgcaagcccagcagtggatgtcccggggcttgaacaccagcatcttgctccagtacctggcctgggtcacctaccctgttgtcctcatcactttctcagccggattcacacagatcctggcccctcaggctgtcggctctggcatccctgagatgaagaccatcttgcggggagtggtgctgaaagaatacctcacactcaagacctttatagctaaggtcattgggctgacctgcgccctaggcagcgggatgccgcttggcaaagagggcccttttgtgcatatcgcaagcatgtgtgctgcccttctcagcaagttcctctccctctttgggggtatctatgagaatgaatcccggaacacagagatgctggctgccgcctgtgccgtgggggtgggctgctgcttcgcggcacctattggaggcgtcctcttcagcatcgaggtcacctccaccttctttgcagtgcggaactactggcggggcttcttcgctgccaccttcagtgccttcatcttccgggtcttggcagtctggaaccgggatgaagagactattacagccctcttcaaaacccgattccggctcgacttcccctttgacctgcaggagctgccagcctttgctgtcattggtattgctagtggcttcggtggagccctctttgtctacctgaaccggaagattgtccaggtgatgcggaagcagaaaaccatcaatcgcttcctcatgaggaaacgcctgctcttcccggctctggtgaccctgctcatctccacgctgaccttcccccctggctttggacagttcatggctggacagctctcacagaaagagacgctggtcaccctgtttgacaatcggacgtgggtccgccagggcctggtggaggagctagaaccacccagcacctcacaggcctggaacccaccacgtgccaacgtcttcctcaccctggtcatcttcattctcatgaagttctggatgtctgcactggccaccaccatcccagttccctgtggggccttcatgcctgtctttgtcattggagcagcatttgggcgtctggtgggtgaaagcatggctgcctggttcccagatggaattcatacggacagcagcacctaccggattgtgcctgggggctacgctgtggtcggggcagctgcgctggcaggagcggtgacacacacagtgtccacggctgtgatcgtgttcgagctcacaggccagattgcccacatcctgcctgtcatgatcgccgtcatcctggccaacgctgtcgcccagagtctgcagccctccctctatgacagcatcatccgaatcaagaaactgccctacctgcctgagctcggctggggccgccaccagcagtaccgggtgcgtgtggaggacatcatggtgcgggatgttccccatgtggccctcagctgcaccttccgggacctgcgtttggcactgcacaggaccaagggccgaatgctggccctagtggagtcccctgagtccatgattctgctgggctccatcgagcgttcacaggtggtggcattgttgggggcccagctgagcccagcccgccggcggcagcacatgcaggagcgcagagccacccagacctctccactatctgatcaggagggtccccctagccctgaggcttctgtctgcttccaggtgaacacagaagactcagccttcccagcagcccggggggagacccacaagcccctaaagcctgcactcaagagggggcccagtgtcaccaggaacctcggagagagtcccacagggagcgcagagtcggcaggcatcgccctccggagcctcttctgtggcagtccaccccctgaggctgcttcggagaagttggaatcctgtgagaagcgcaagctgaagcgtgtccgaatctccctggcaagtgacgcggacctggaaggcgagatgagccctgaagagattctggagtgggaggagcagcaactagatgaacctgtcaacttcagtgactgcaaaattgatcctgctcccttccagctggtggagcggacctctttgcacaagactcacactatcttctcactgctgggagtggaccatgcttatgtcaccagtattggcagactcattggaatcgttactctaaaggagctccggaaggccatcgagggctctgtcacagcacagggtgtgaaagtccggccgcccctcgccagcttccgagacagtgccaccagcagcagtgacacggagaccactgaggtgcatgcactctgggggccccactcccgtcatggcctcccccgggagggcagcccttccgacagcgacgacaaatgccaatga

SEQ ID NO: 59474 - DNA, 554 bp, Homo Sapiens
  misc_feature (515)..(515): n is a, c, g, or t
tttgtttgaaaattaaagtttattaggatatattaatgtatgatattatagtattactcatcacatgtaagctttacatctgaagcaattcatgcttactgggagggaagtttgagtacttacttagcttttcctgctattcctaggtaaaggccctcctgtggtcattctgaacagaagagtgagcttactgcaaaccacaggctggacagtagagggtgcatatcctcactgagtggagctcagaaaagaattaggattctgcacacatttattccagactcagttcccactgttggtttttatattgagattattttaaaatcttttcgaaatataatttatttgctctttaagtatgggtggggtgttaagctaaatttaaattgttctgtgaggcacaggcattatacttaagcatgaacctaatgaagccctgaacataccaacaggtagcagtccagttaagctctttataaggccacatgcctaagctccaaagggaatcttaattntttattggggagacatttcgttactacatttagtggact

SEQ ID NO: 59475 - DNA, 428 bp, Homo Sapiens
agcggccgccctttttttttttttttcaaactaaatattccttttaatagaaatgtgaatcttgccatgttgggcagactggtctccaactcctggcttcaagagatcctcccacccgccctagcctcccaaagtgctaggaattacaagtgtgagccaccacatccagccagtgtctttgaaaacaatcaaatataatccttaatgtttctttacattgtcatcaagtattagtaacagtgacttctagtgaacaccttaatccttaaaccacaggtctaagttcagttttgtgattcctttcatttttacactcaaccctgaatatggacaagactggttagtgtgacctgttattttgggaattacaactttaaaaattcctaatagccacaatctaaatgtgcaattcaaagcttttaacaatt

SEQ ID NO: 59476 - DNA, 3627 bp, Homo Sapiens; identical to SEQ ID NO: 29481

SEQ ID NO: 59477 - DNA, 566 bp, Homo Sapiens
tatgaacacgctccaatcagcttttattacacgccactgaagtgttggcttttatttgaatgtcaatgtgtaaagtggcgtacaggcaatttaaaataacatacatgatactgacatatttatacttagaacttatgcaatatatttacagacaaaaatacaggacaatgttttacaaaatctttcactaattaccttggttacaacattttcagaaataaaacgaaatttgctgtaaaccatctcaactgcactgtgtatatagaaaggcttctaaatatccatgttttcatttctataaccatttaagcgcttagtttttacgaattcatcaaactcattcgcatagtcacacatcattagtcactgctgagctgtagaaagtaagagaaatcgcaaactccttgattagctgtattttaaaaagctcttcagaaaagtgatctactactatgctctgtgttctagcagaatacaaaggcccctctttccatgggtcgtttccagacctggctattacaagagaacactggagtgctaaacacagattatgagtctgaaatact

SEQ ID NO: 59478 - DNA, 516 bp, Homo Sapiens
agagagtgagttttttttttattcctttattctttttccaacatggaatgcaaatgtaatgactgaagccacagcagccattatggactacaaagtgatcttgagaaggaaaccaaaatgattgaagcagcatgggtcattcatatgcgggtcattgatacgtgggtcattgatatgtgggtcattgatacacgggtcagtgatacattctctaccaccctggatcactaactccagacttcttttacataagaggtaaataagcctctatttgtataaaacactcgtcccatacaactgaacataatctcaactgatacacttaggaaatcattgaaggaataagcattctgaaatattaagtatttggtgtactaaatacaaaaggagacatacctctaatgcaattaacaatgccaagactttatctttttaagggctctgagtgaccctgtatatagaggtcacttgcgatggcttgtcattacagtaccaaacaaacccataggctcatta

SEQ ID NO: 59479 - DNA, 477 bp, Homo Sapiens
tttttaaggatgggacagaatttgcatgagtgaagtttattaaccagcagactatggggcatcaagcctggaaggttttgatgggtccttgttaacctcctcaggtaaatcagagagaaatgatttcgcattagcttcttgcaacagtgacttccttctcaccgtggaagagacgctgacgtgcacccctttcactttccattatctgctacagaaataacagctacgcaaatgctccaatgccatgtccagtcctaatctacccatttgtaaatgtctctgtttgccttcatgagttattatacccttttgtagccgtccgagatggtaaaaaatcagttttcttgtctcttgagagaccggagtcgtctgtgggtggagtacctactatgcatgagttatcacaaatgacacgactggggccttcctcttactcagcttatggtctaatagaggagtaaatgtaagagctaacat

SEQ ID NO: 59480 - DNA, 558 bp, Homo Sapiens
ttcaaaatctccaagcaaatgggacttccatgacctcaccattttggttaagaacatcagaatccggcttcttcagaagcgcatctagccagcataatgatggatagcctctgccttttccttctaaaacacgacctccttaagaagtatgtctcagcttcttcataatctcaaaaagggagaaacctgactgggggaggtggttgatacatgaaaaactttattccctccgtcacagactagataaaaattaattttgtgttcactaaatttagatgtgccgacacttccctttacttttctagaatcttgcatctcttccagagagctagatttctggctctggtaaggttagtcctatgagaccctttaatggtatctattcctggcttgccatttggatgtcttaaaccattaaaaaggaaatccctgactgacttactgtagagtcgagtctttttcatttttggctcatccttttactaaggttttgtggtgggttgttgaaccaggaaagcactggcactggggctgagtcttttgggtatggtgaggagc

SEQ ID NO: 59481 - DNA, 484 bp, Homo Sapiens
ttttttcaggaataaaatgtttatttttaatgttcaaaatacaatactataaaagactctaaagcaactgcttacagtaccattatttctacgtttctaaataaattattccttcacttgttagttatttgaatatatattttaaactacatttcaacgtattaaatcaaatgaacatacgtacttggcaataaaaaatttattaaacaggtagacaagaaaacaacttgccttcttttctaattttaaaactgacaaacactcggcatttaggtgcttatttgtctagtgttactggagtgctaaagagaagtactcaatgggaaatctttccgtatttatatccatgctgggtgtgaatatatgggaattttccaagggtagtactataaacattcaactactattatatatagccccagattgactgattagaataaacatgggttacaaaccactgatgtggccaccttgtttttaggct

SEQ ID NO: 59482 - DNA, 492 bp, Homo Sapiens
tttttttttttttttttctttttgcttttctcattttaatttaattcatcaaagcaaacctagataatttagggaaggtttgtggcacaactgcacctaaaacaccaacacggtgtattcatttttcattttatttcatcctcttgtgccaaatatcaaaacaaggaactgcatgaagtctcacatacttctgaccatcaacagaacactgaaagcacccataaactgtctcccttttgaagttccccattccacagagtatgcaaggccctttgggaatgttgtgattaagtaagttaactcggatatgggtcccttctttgagtgaaatatcagtcatgctgagaggtttgtcatagtagtcagaaaaaagatcatccaagtaaagctgtgaacgagaaatgacatccatcactcttctatttctttgaaataggatatttctcaacctgtacagcagtgcaaatgttgccgtttcttccctttcaaatc

SEQ ID NO: 59483 - DNA, 539 bp, Homo Sapiens
gatgttcttttgtcatttattcattcattgaacaagtatttacaaaacagctgctttatgctaggcattgtttctgggcactgggaacacattggtgaacacagatagaaatggtcactgaccttgtggaactttccatccaatgaaactaggatcattattcaaatgactggacaaatacataggaaataactgtgttaagtgctctgaaggaatgatatatagtaccatggaagtgtgtaactgggggacttgactgagtctaaggagttgagaatgagtttgcaaaggacacagagaaagacaggtcagagcaataggaggagaactggcagtgacatcagagaatcaaaggaggaggtggtcgactgccgagatatggggagctatgagacacctatttgccttgactcctcacccgctagttgtgagtacaggtatggaaaggctctgccattgtacctggttcacagttggtgctctgcaatgttagctcccttccccctcccaaagcagagcctccctccagggaccttaga

SEQ ID NO: 59484 - DNA, 605 bp, Homo Sapiens
aaggaatttgttttttccttttttggccaaaccggtacaagttagaaagtgtgctaaggactgaatacttgcctcgtgctttttgccactggatgatgtaagttaagaatggaattgttaatcctaagtatatattttcttgactttcatcagtttctaaagaaatctaatttaagtgttttgcggttttgtttgatctgtatttattgagttctggtcatagaccagcagcttgcacgtcatgctcatgaacagccagaacatagttattggggaacttcatggctcaaaaccttctgaatcatttaacttattttgtatgttgcaaaaaaaaaaaaaaaggttaatttggctgttgagagtcacctttttttaaaaaaaataagctgtacagctttaaagggatgggaggtgggaaaattaccctaaaataggatgtagattttgtaacaatgggtgtttatgctagaatcatttacgggtgccattaggtaattaagccctaaattggtttaaaaaaacaaaaaaaaaaaaaaaaaaaaaaaaaagaagacaacacacaagaaaaaaagaagagagaaagaaagaaaacaaaaaaaaaagag

SEQ ID NO: 59485 - DNA, 510 bp, Homo Sapiens
  misc_feature (386)..(386): n is a, c, g, or t
  misc_feature (395)..(396): n is a, c, g, or t
  misc_feature (416)..(417): n is a, c, g, or t
  misc_feature (446)..(446): n is a, c, g, or t
gatgttgctctgaagagaattgatgaccaactagaattttcatttttaaaaagggctttaaaataaaattctcctatgtgttggatgcattaaaaaaacaaaaactctacaaaattctatccttaaccttctttgggaaaataaaatattctggaataatcatataatcctatttctaataattctggagtaacaatcgaccatgctttgcacagtgccaggaaaattctacaatgcgtatttgagatgtttgtgttggtgtttaaagtgaggcaccaaatgctacctggcacatttacatcctcaattctgcttgcttgcctgtgccctgttgagtccaaagatgttattctatagctatctgaaacagacagaagtcagacctngtgagtggnncaaacagcgttctgctccgnnaatgtgtgtgcaaagcattattttcctcnacttcctcagcaattgctgtctttgcttcttttcctcatttctcaggtaaaacctgagactcgg

SEQ ID NO: 59486 - DNA, 797 bp, Homo Sapiens
actttgaagtacagaattcaaaattaggatatttgggtgttgccctagaagagcttacaatttagtttatgttcttgcacaatgattcataataaaatgactctccttgaagaaatgtgttcttagcttatttctgtgaagaagccaaactccaataacaaccaaaaagttctaaacatctcacaaatcttccagttatttttcagtttaaatgttggtggacagataatatgttaaaactgcacatctgtaagtcatgcactgctcactgaccctctgaacttaactgcctcaaaaaagggactgtggccaggcaccgtggctcatgcctgcagtctcagcacttgggagggtgaggcaggtgggtaacttcagcccagcagttcgacaccagcatgggccatacggtgaaaccccaactcaacaaaaaattagctgggcatggtggcgcccacctgtggtcccagctacttgggaagctgaggtagggggatcaattgagcctggagtaagctgattgtgccactgccctccagcctgggcagcagagcagggccctgtcttggacggggtgggggcgctgtcaacctgctgcaggttaagactaataaacttttaattattattatggtgtcgatttttaaaaacgggtctcactgtgttgcttcaccaggctgaattgcagtggtgtgaccacacgtcttgggagccttaactatggggtcaaggtatctccagccctccaaacttgggtttttttacaccaagttctccctttacagctggaatgcgggttg

SEQ ID NO: 59487 - DNA, 446 bp, Homo Sapiens
  misc_feature (391)..(391): n is a, c, g, or t
  misc_feature (423)..(423): n is a, c, g, or t
  misc_feature (428)..(428): n is a, c, g, or t
agtgggagctctatgtctcctgtgcagccagacaccctggacgaggcccttcccacctccccctttcctcacggcttcttcagcaccacatgtggattgcctgtgggtcagtccatctgtccatgggcaggggcgctgtgagagaccccatgcgcgtgggatgtggtagatgctgattatggggccagccacccatacaggtctatcaggtcgcaatggaggccccactggagcgggaggcaggctggcctgggacttctgttggatgatgggggccaggggatggtaggaggggcaggagagcaggtctgcatctgtctcagccccagggagctcctgggttttggggccagttttaaggagtttcattccctgagcctgggccgagttntaaagggggttccccggatattccaatgcttnagacntagatttttttaaagctt

SEQ ID NO: 59488 - DNA, 582 bp, Homo Sapiens
  misc_feature (145)..(145): n is a, c, g, or t
caacaggtcaaaaagaacctttattactttttatgattgccacttatgctttcttgccagatgcctttggagcaggtgctttctgggctggagctttttgacccttctgagcttttggagcaggcgctgctttctggcctgtggntttctgggcaggaaccttctgggctggagcctttttactcgcggcggtgatcttttttgctggaactttagcagcagcagcagcagcagcagcagcagcagcagcagcagtacccttagtaccaggtgcttttttttgggagaagctttcaggagagctgccttttgaagcttcttaacttcattcttggattatctgttcctcagtttctttgccttccaaactttaaacggataaaatctggcaatcttggcgttcgttctccgggcctcagcttcctgggccaaccgggtgggctgcccaatttgtatttgatgtctgccttctgccaggcctgtcggaacatacttctggttgggcactgttcgggaacttgaaggatgaaatcagttgagctgcatgcaccggaaaggcattgctgttctcctcactttgga

SEQ ID NO: 59489 - DNA, 453 bp, Homo Sapiens
ttggcagcagcagacatttattgagctcactgtggccggctcccctcttagcccggtccccacatcgctagttcttatagcgtccctatgaggtgggagctgtcgctccactttgcgtgtgggaagactgaggcaccgaggccatgcaccagcccaaagtacagcagacaggctcagaaacaggaggctgcctgtcctccatccccagggcaggaagtaaggccgagctccaaacccactctgccccagggcaaggctttaggcaggggaaggatacggccaggtcagcacattagaaagtggggccagacgtggtggctcacgcttgtaaccccaacactttgggaggccaaggcaggaggatcacttgaggctaggagttcaagaccagcctgggcaacataccaagatccctgtctctacaaaaaaaaaaaaaaaggcgggactggatgc

SEQ ID NO: 59490 - DNA, 1801 bp, Homo Sapiens
ggaggtgggaggagggagtgacgagtcaaggaggagaagggacgcaggagtgtgcaaggaagtgtcttaactgagacgggggtaaggcaagagagggtggaggaaattctgcaggagacaggcttcctccagggtctggagaacccagaggcagctcctcctgagtgctgggaaggactctgggcatcttcagcccttcttactctctgaggctcaagccagaaattcaggctgcttgcagagtgggtgacagagccacggagctggtgtccctgggaccctctgcccgtcttctctccactccccagcatggaggaaggtggtgattttgacaactactatggggcagacaaccagtctgagtgtgagtacacagactggaaatcctcgggggccctcatccctgccatctacatgttggtcttcctcctgggcaccacgggaaacggtctggtgctctggaccgtgtttcggagcagccgggagaagaggcgctcagctgatatcttcattgctagcctggcggtggctgacctgaccttcgtggtgacgctgcccctgtgggctacctacacgtaccgggactatgactggccctttgggaccttcttctgcaagctcagcagctacctcatcttcgtcaacatgtacgccagcgtcttctgcctcaccggcctcagcttcgaccgctacctggccatcgtgaggccagtggccaatgctcggctgaggctgcgggtcagcggggccgtggccacggcagttctttgggtgctggccgccctcctggccatgcctgtcatggtgttacgcaccaccggggacttggagaacaccactaaggtgcagtgctacatggactactccatggtggccactgtgagctcagagtgggcctgggaggtgggccttggggtctcgtccaccaccgtgggctttgtggtgcccttcaccatcatgctgacctgttacttcttcatcgcccaaaccatcgctggccacttccgcaaggaacgcatcgagggcctgcggaagcggcgccggctgctcagcatcatcgtggtgctggtggtgacctttgccctgtgctggatgccctaccacctggtgaagacgctgtacatgctgggcagcctgctgcactggccctgtgactttgacctcttcctcatgaacatcttcccctactgcacctgcatcagctacgtcaacagctgcctcaaccccttcctctatgcctttttcgacccccgcttccgccaggcctgcacctccatgctctgctgtggccagagcaggtgcgcaggcacctcccacagcagcagtggggagaagtcagccagctactcttcggggcacagccaggggcccggccccaacatgggcaagggtggagaacagatgcacgagaaatccatcccctacagccaggagacccttgtggttgactagggctgggagcagagagaagcctggcgccctcggccctccccggcctttgcccttgctttctgaaaatcagagtcacctcctctgcccagagctgtcctcaaagcatccagtgaacactggaagaggcttctagaagggaagaaattgtccctctgaggccgccgtgggtgacctgcagagacttcctgcctggaactcatctgtgaactgggacagaagcagaggaggctgcctgctgtgatacccccttacctcccccagtgccttcttcagaatatctgcactgtcttctgatcctgttagtcactgtggttcatcaaataaaactgtttgtgcaaaaaaaaaaaaa

SEQ ID NO: 59491 - DNA, 614 bp, Homo Sapiens
  misc_feature (545)..(545): n is a, c, g, or t
tttttttttttttttttaaaacaatagaaatttattctcttacagttctgaggccagaagtccaaaatcaatgcattagcagggctgtacttctacgggaggattgaatatctgtccttggccttctccagctttagtggctgtcagcattccttgatttatgatcacattactccattctctgcctccacggtcacaactactccctcctcttctccatgtcttctcttctgtcatatatgaatacatgtcattgactttacagtccaccagataatccaggatgatctcctcatctcaaggttcttaattacatctgcaaagacctttttatccaaataaggtaccatccacgattctaggattaggaggaaggcttaccttttgcaggggccaccattctacccctacatcttacctaagaataaaattttttcttctttcaagctttgcctcttgaagctctgaagaaatttaagacctgttcttttctcatcaccttagctttgaagacttaggtctccatttaagcactcttttggcanattcagtctattcttttgtttcagttgattttttttttttttgcccattggtgtcatttaaccaaaaga

SEQ ID NO: 59492 - DNA, 4764 bp, Homo Sapiens
gcagggatgaaggagctacttgagggtctggactatagtgtagatgtagaagagaatctgacagccagggatatggagtcagcgctgagggcatttgctaccagaccagagcacaagtcctctgacagcacattcttggtactcatgtctcatggcatcctggagggaatctgcggaactgtgcatgatgagaaaaaaccagatgtgctgctttatgacaccatcttccagatattcaacaaccgcaactgcctcagtctgaaggacaaacccaaggtcatcattgtccaggcctgcagaggtggtgagtgctgagactgaacatctaacagttatgaaggtgtatgcagaggattgtgatgtttggtttatatttaggggcaacattcttaaacctcatccagtgtaaagaaagtacattgaattctaaagaaactctacctaagggtctggtataacaagaaattgtctcatcaaaattagtggagaaatttctgttcaattttatccacagtaagtggtgaaggagatcatcagaatccctaaatcaaagttaaacagaaatactcaaactttggaatggaatcattttcatgatagcttgatttgtaaatgttttacagaaattttgacattgtgtggtttgagaagaatttcatttgaaactggggccattatgtaaaacagcatccctttttcttataattattgagggggaaattagtaaagagatcaggggactgtagaatgttgcagtgccactttgctccaaagattcaattgcctcatggctggctgaggatggtggctcatgcctataatcccaacactttgggaggccaagacaggaggatggcttgaggccaggaatttgagaccaattgtctgatagctcttgggagctatttttcaaaagaaaacagattttttttctagaaaatggtaaattcaagatgatttcactatcagtaggcacattgttgaatgacactggagagaaagaaaagtggtgtgtgtgtgtgtgtgtgtgtgtctgtttctctgtgtgtgtttgtatgtgtgtgggtctgtatgtatgaaactagtaagaatgaacattcaaaaagaacaaggtgggcaactgtgacagccattctgtgggaggcacagcagtgtgcagaaagttaatgtctccatagcaaaccgtggggaactgtgggtcagagactctccagcatccttggaagtggcctcttcacagtcatctgagaacctggaggaagatgctgtttacaagacccacgtggagaaggacttcattgctttctgctcttcaacgccacgtatgtatctttcagtggcagtaagggatttgtgggcctgaggccatctttgaatgaatctagaaaatcaagaatccctatgaaacaatgatctgatagaatgttgtgtgctctccacatattttacatgatcttatgtgtgccgtgagaacagattcctaaagcaacccgatacatggaaacccattcaccactcaccatttaaacagatgatgaattctgttttttttattaagcccatttaacattttacatagtgtttttatggattccaggaatggcttctctttctcaaatgatcaacttcaagtcttctttccatatttcacatctgattatacaatgagcagtgccattgcatgccctgctagaactgtggataccctttaaaacaagtagaaaatgatagggtggggctgattaggtctaatctcagggaacactggttagtatttcatgtctaggtaattatcttaaggagcgtacatttaactgtttttgatttgtatatttttaaatcttattttttaaaaccactttattgaggtatgattgacatacataatgttacatatttaatgtatacaacttaatgagtttggagatttctatgtactcctgaaatcatcaccactatctatgccataaacatatctctcttctccaaaagattcttacacttctctgtttattattatcatcattccgtgactgcgtgtgagaagtatacttagcataaaatctactctcttaacaaatttcaagtacataacacaatgttggttactactggcaccatcctgtacaatagatttttatcacttttttcagcttctatcactgaaacttgtcatgtgttcatctatttctattatacggtgaaagacagtgtggcataatctgcaaacaactttggagcctggtggcaattttttgttgcttactcactgtgtgaacatggggaagttccttcatctttctgtgcttctatttcttcctctgtaaagtgggataattctagttatttctcaagcccctataaaagctgagagaatgaacatgagttttgtagtagaaagccaatcccaagaatcaaaatttcttcaatacacaatctcttgcaatgcttaccaactgcaacttttgatcaccttttgctaggttttctgtttacgttctgtggaaagtaggtaaatgtcaggttgtaagtgcttcctacaaatctgtaaagataattcccaagctatgcttttctttttaaaaacattctcaaaacaaaaatatgaacaaaaacatagtgaaagtcatagcccaaggcatacccatctgtatcattatagacaacgtgtcctggagagacagcacaatgggctctatcttcatcacacaactcatcacatgcttccagaaatattcttggtgctgccacctagaggaagtatttcggaaggtacagcaatcatttgaaactccaagggccaaagctcaaatgcccaccatagaacgactgtccatgacaagatatttctacctctttcctggcaattgaaaatggttaagtattgagagttgttggtggtatgtgaaataaataagagagtgatattggtggttaagttcaatgacaaatgacagctgagtacttggatggtcaaattggtgtttttgttgatatagtctggtgattatctgctacttctttccgacttacatgtatttggattcctccaactctacaattaatcaggcaatcaatcaatcaatcaaggaggtaaggaaaaccgcagcagaatgtgatgatgaaaaaccaaggatagtaattattaaaatagaaacatgctcatgcttccattactatttatattcatttatctctcatagtctttctcttttattcccctttcttacacacacacacacacacacacagagagagagagagagagagagagacactaagtagccaaacattgcatcaaaccctaaacaaaacagagtaaacaaaggagctaactctggagaaagcagcattttgatcctctgagtgaggatgtcacagcaaataccacattactgacatccagataccattaccagatggtacagaatacatcctacactgtagagtttgtgttgatccaggctctggttctcagactgttctcacaatgcagatcaccaatcactcagggttggcttttgaatcttcaatcacagtccagaagttccttcaagctcccatgtaacttttgttattattttgaccaaaatattatagaatgggtacattgagtctggactaaatgattactttcttcactcataatagctttatttaacactagactataagactattatcaatctccctctaagatacatacttaaaattatattttatagtgaaatgtataaagttgttctcaatacttccaacatttaccacataatttttactcttggtttctgacacttcagtcacaatattgcatcatttcagcataacagctttcagtgcctaatccatccagtggggctgcatttggacattgaattgtttgttgactaatatttgccaacactaactgtgcaccaggttttgttctagatgcttggaatatgccaattaacaacgtaaatagatttcttacactctgaaagcttatattctagtgagtagaaacagactctgaagacataaagtggtaaatatatcacaggccagagagcaaaaaaaggtaaaaggaaaaataaaggaagacaaaggaaaacacagaatgatggatgctgtactcctatagatatttcactcaaaagcttttcttgaaataatgaaatcagaacaaagaatggacagagttggggagtgaataatgtggttcttatgcaggaaaagtgttccagcacagaatacagccagtgcaaatgccctgggatagcaatgcactaaacatgtttaaagaactgcaatgagacagtgtgaccaaaagagaacgtgagtggagaaaatggcagagacaaattaggagaagcagtgagaagccagatcgcgtggttctatgttatcacatggtaaacctttaaaaattattatctgagcgagacaggaagcctttctagtgctttagaaaaaagaaataatatgctttaaattaggttttacaaagatcacattttggtgaatagactaagatgtcacagatggaagtcaagggaagtggcaagagcacatggaagaggatgcaagaagaatcatgatgagggatgggatgaaggcagcaaggggtaaccatcttgaccttctgttttttctctcccctgcaggaagccacaagcagcccagccctccttaatcaacttcaaggagcaccttcattagtacagcttgcatatttaacattttgtatttcaataaaagtgaagacaaaaaaaaaaaaaaaaa

SEQ ID NO: 59493 - DNA, 521 bp, Homo Sapiens
  misc_feature (238)..(238): n is a, c, g, or t
aagttttcagttgtctagtacattaatttattaaaatattggttttgttccaatattgctcttttcttttgaaaataggtacaaactcacactcacacaaaaacagtccataactttcttgcacttaacatttatttttagagtaatatatgggtatagttaactctatgtaaaccaatactaaaattctgttatgtttgcaggcagagagacatgttcaaagaaaaatacataacanaatttttaaaatgtttaagcaagactcagaattttaagactcaggattttatttatacttgtatataatttttattatacccatgaaaatgaccctatagtcaatagcaatttacttgtacattttaaagtaactaaaagtgtagaatcggtttgtaatacaaatgataaatgctggagttgatggatatttcatttgccctgatgtgattaatacctattcatatgcctgtatcaaaatatgccatatatggcataaatatatacacacactatgtacccac

SEQ ID NO: 59494 - DNA, 537 bp, Homo Sapiens
tttttttacaacttttcagaatagatgaacactgaagcttcagtgtttaaacctctcctggtgttttgtgctcaagaagttggtatcgggttgttttaacagtcgtcatctttatcaagtaatacggaaaaactgggcagagcttttaaagaatgaatgacgatgacacaggcgttttctgcttacagatttcctcacatccttattaggctattaggatcagctctgtcgtgtgctcagttttcatgttttcttcttcatgtgaaggttgtagctcaagaaggattgctgtactctgatattctcatcagagtttcagagtccatctgatttctttcagcagtaaagattgtaactactcattggcttttagctagcatttcatttttaatggctctaccattttaaaattctccattctttcatggagatcagtttatcccagggacgtgtgtgtacacgtgtgtttataaagaacagtggatgagctgcttcactcaggttttcaacagcagcctgaaactctacttcatacaa

SEQ ID NO: 59495 - DNA, 598 bp, Homo Sapiens
  misc_feature (538)..(538): n is a, c, g, or t
tttttttttttttttttggagtttgttttttatttagacatggaattttccttttcatataacttatctaattaaaatattcatctcggtagttaccacaaaaaagtaacatagaaaattgtatttacattttgggaccaaaatacaaatgaagagcaggatgacaccttgctcctttccctcccgcttcccagaaagaaaaagccccaaagaaactgctcagtacaccaaggatcacaaaagggtaatttgtaatttggtgatttgtatgtagtgtagcacagaaaaaaaattgcacaagtttttccataaatgagaccaaaggttcaaattcatcctgtgtcaggttcaaattcatcctgtgtctgctctgcagccattttagtaagctgggcaaggaggtcatttagaaattgggtttttcctctttcccctgactcttcgcaccaagtcacatccctgatgtagatactcttgggggaggggaaaacatctggctctatgcaaacagggctcatcaaaaatctttatgtgccanaatggatactgacattgctatgaacaaatctgttttttcttccctccctgcctaaagact

SEQ ID NO: 59496 - DNA, 447 bp, Homo Sapiens
gcaattttattaagagtacccagaaaacctttcaaggtttcagtagatctgttcaatcttgccagaagcaagttaacacagtagaagaaattagagccttatcagtcaagacataactgctagagcctcagggacaccgatgcggacacaagtcaacaaacagcatacaataatgtgccaagatcttcaccagatctgtaagatgcactcataaaacttcttttgaagaacttaaaaatatttttagtaaaaaaccagcactaccaatttataaagtgattctatccaaattggctttttatttattaataataaagtctactgacacatactgcttgcaaatagtatagacacaaaaattataaaaataaaccagtagatatttagggcagatgcaaaaatttgcacattaggtcattataaactagatatattaagcaaaaaaag

SEQ ID NO: 59497 - DNA, 411 bp, Homo Sapiens
  misc_feature (316)..(316): n is a, c, g, or t
ttttttttttttttttttttttcctcatttaagtcttgattccttccccaattttattgccaaataaactggtctcttgctacaggtatgtaactggttgaactaataaatgtgaatcactggaaggcaatctgatacaagttattcttgattacaatcaatcttttaagtatgcttaagggtcctaacatccagcagccttggagttaatgatctttaatgatttctcccatttatactgtgtttttaacaagcataataaaggaaaatataccagaggtttattaagtatgacaaactgtactttaaataaatngttgctattgactttaggacttcttggcacaaagtttatagattagcaatactaatacccttaaaaatggccttttgaaggggtaattcctacac

SEQ ID NO: 59498 - DNA, 5042 bp, Homo Sapiens
agccgagactgaaaaggagaaacaagactggattgaagctgtgcagcaatcaatagcagaaactctctctgattatgaagtagctgagaagatttggttcaatgaatccaacaggagctgtgcagattgtaaagccccagatcctgactgggcatccatcaatctctgtgttgtcatctgtaagaagtgtgcaggacagcatagatctttaggaccaaaagattccaaggttagaagtctaaaaatggatgctagcatttggagcaatgaactcatcgagctttttattgtcattggaaacaaaagagcaaatgacttttgggctggtaatcttcaaaaggatgaagaattacatatggactcaccagtagaaaagagaaaaaactttattactcagaaatataaagaaggaaaattcagaaaaactcttttggcatctctcaccaaagaagaattaaataaggctctatgtgctgctgtagtgaaaccggatgttctagaaacaatggctttgctgttcagtggagcagatgtcatgtgtgccaccggagaccccgtgcatagcaccccctatctgctagccaagaaagctgggcaaagtctgcaaatggaatttctctaccataacaaattctcagatttccctcaacatgatattcattccgagggtgtattaagtcaagagtcttcccagtccacattcctctgtgactttttatatcaagctccttctgctgcttctaaactctcttcagagaaaaaactgcttgaagagacaaataaaaaatggtgtgttttggaaggaggcttcttgagttactatgaaaatgataagtctaccacacctaatggcaccattaatatcaatgaagttatctgcctggctatacacaaagaggacttctatttaaatactgggcccatctttatctttgagatctacttaccctccgaacgtgtgtttttatttggagctgaaacatctcaagctcaaagaaaatggacagaggcaatagccaagcattttgttcccttatttgctgaaaacttaacagaagctgactatgatttgattggtcaactcttctacaaagactgccatgccctggatcagtggagaaaaggctggtttgctatggacaaatccagcttgcatttttgccttcaaatgcaagaagttcagggagatagaatgcacttaagaagactgcaagagctaacaatcagcacaatggttcaaaatggggaaaaactggatgttttactcttggtagaaaaagggagaacattatacatccatgggcataccaagttggatttcacagtctggcatactgcaattgaaaaagcagcaggtacagatggtaatgctttacaagatcagcagctcagcaaaaatgacgttcccattatagtgaacagctgtatagcatttgttacacagtatggtttaggatgcaaatatatctatcaaaagaatggtgatcctttgcatataagtgaactcctggagagtttcaaaaaggatgcaagaagctttaaattgagggctggaaaacatcagcttgaagatgtgacggctgtgttgaaaagttttctctctgacattgatgatgcactgcttactaaggagctctacccatattggatctctgctttagatacgcaagatgacaaggaaagaattaaaaaatatggagcatttatacgttctcttccaggggtcaaccgagcaacactagcagctatcattgaacacctgtatagggttcagaaatgctcagaaatcaatcacatgaatgcccataatttggccttggtcttttcatcctgtttgtttcaaacgaagggacaaactagtgaagaagtgaatgtaattgaggacctaattaataattatgtagaaatatttgaggttaaagaagatcaagtcaaacaaatggacatagaaaatagctttattaccaagtggaaagacacccaagtttcccaggctggagatttgttaattgaagtatatgtagaaaggaaggaacccgactgtagtattataattcggatatctcctgtgatggaagcagaagaattaactaatgatatattagcgataaaaaatattattcctacaaaaggtgatatttgggccacatttgaagtcattgaaaatgaagagctagagcgtcctcttcactacaaggaaaatgtactggagcaggtgcttcggtggagttcattagctgaacctggctctgcttacctggtggtgaagagattcttaaccgctgacacaattaaacactgcagtgaccggagtacactgggaagcatcaaagaaggaatcttgaaaatcaaagaagaaccatccaaaatactatctggaaataagtttcaagaccggtattttgttttacgagatgggtttctctttctttacaaggatgtgaagagtagtaaacatgacaagatgttttctctcagttccatgaagttttatcgtggagtgaaaaagaaaatgaagcctccaacaagctggggattgaccgcatattctgagaaacatcactggcacctgtgttgtgatagttcacaaactcagacggagtggatgaccagtatctttattgcccagcatgaatatgatatatggccaccagctggaaaggaacgaaaacgttcaataaccaaaaatcccaaaattggaggtttgcctctgattcctatacagcatgaggggaatgcaaccttggcccggaaaaatattgagagtgcaagagcagaacttgaaaggctgcggctcagtgaaaagtgtgataaagagtccgtggactctagcttaaaggagagagcttccatggtggcccactgcctggagcacaaggacgataaacttcgaaatcgaccccgaaaacatcggagtttcaactgcctggaggacacagagcctgaagccccacttgggcaaccaaaaggccataaaggcctaaagacattgaggaagactgaggacaggaatagcaaagctactttggactctgatcataagttaccatcaagggtaattgaagaacttaatgtggttctacaacggtcaagaacccttccaaaagaattacaggatgagcagattttgaagtaggaaataaaatgaattgctccccagattatttttttaatattgtatgcaatctttatgtgtaactccaaaactgaactataagataattcataagaatttgcctattgataggcaaatttgtctatgcttaggcatttaaggagcatttaaaaatatgtatatatgtgactgaatgtaagattaactttattttggtctgaacaaaccttgtaaagttccattgtattaacgtgtgtaagaagacattgggttacttaggtggtcagtccttttaaagtagttgtctgttaagtggtataatttatgagcagaaatctcaaactgtactgtattgtataaaatgctgtgtttaaatgaagcctaagaaactatctgtaacatattttgcactttgagaaaccttgtatattaaattaccatatgtttttaggtttacagaagttctaccttagggaaaagaaagggaagtaaattgaaaaaggggggagaatttattgtagtggctgcctaaaaaccactggagtttttaaaagaagcaaggagttaaatgtcctgcaaaacaaggaagtgagctaagattcattctagttcactaatgaccagaacttgtcaatgagaaaccacttgttaagaaaaagtccagtgtttatttctcaagagtaatattcggccaacagatgtaaataatagcactagccactcttattaatatttatagtgttagaaaaccagccacattacagattcactacgtttgagctcattgttggtggctgctaagaggaaacttacactgcattggagaggttgtgtacacaggacctggcctggatgctgattgcactgtcattgtatgcaagcattttgtcttttttcagaatttctgactatacttttggtacgaacaaaattcatcaccacagggtcctgttgttttgtttgatttttagatttttttaaattattattaaggttgtaatgtttttctccgagttgtcagaaataactggaagaatacaatatatggccattatggagccaggggctagttggtggtttactatacatttgggggctacctggtcacatttaatctaggtttttttttctttttttaagtaaaggtgtggtctcttccctgtacttatgaataaggacaaagccctatttttgtttccacataaagatcagctactgaattggtgaatttcctgacagacaatgctatctaaccatagttcacgttaggggaagcatttttccatcagtttctttaaaattggattgtctggtgagttttgatattaaacattatgtagctaagtttttttttttagcatttcttttttatttttcaatctatattcacaggcccatacttcagtcagtccaatcatagtacagtgatgtggtggtagatgctatgaatttcttcattgtaaaatacggatcatttgtattttggggtgataaaatagttcaccatgggtatgagatatttattctttaaatcaaagtaaattagaatttttaaaaagcacaaaactgcaggacagtttatgaaataggtggcactattagggaatcttcctttaaagcaagaaatcatgttatttagaaagaaaaactaatcttaaacatactatttctaataaatatttatatttttatgaaataaagaggtatgtggaaattaatatttggtgatgttggacagtggaaaagtatctagagtttttacctgccttatctgaattcttcttgaaacttgagcttaaactctaatagctgtttccctttctattctgaacaactgtctccatttttcaagtgtgagagataagggctaatgatgacatctcatttattttgagtaaacattaaaattgttttacaagtctacttg

SEQ ID NO: 59499 - DNA, 705 bp, Homo Sapiens
tagttactatggatttattttttttcctttcaaacacggtaaggaaacaatctattacttttttccttaaaaggagaatttatagcactgtaatacagcttaaaatatttttagaatgatgtaaatagttaaccttcagtagtctattaaggcattaatacttctctggacatgcgcgtttgagggtggaggggtcctgtaaggtgcttcatcgtctgtgattactgcttgggatgtgttctttggcagcttgtgagattactttacctagtgtttataaagtaggaagttaagtgaatcatagattagaatttaatactcttatggaaataattttttaacatcttaattgacaatggcgtttttttatacataaccatggatgtagtgggaaacaatgttgttttggtaaaataatgtacttgatcaatgtaaaaagtatataaaatagtcttactaaaaatctaggttttttttcctccatgcaaatctgtttttttaggccaagtcagtataaagaaactctactcttgggctgggatggtggctcttcctgtaatcccagcacttgggaggcgacaaaggcggtcacttgaggtcggagttcagaacagcctgaccacatgtgaaaccctctctactaaaaatcaaaaattgccggcatgtgatgcactctgttatctagcactcggagactgaggcagg

SEQ ID NO: 59500 - DNA, 275 bp, Homo Sapiens
tttttttttttttttttggcagagcagttgccagaactactattatttggttttttttttggttttggttttttttttttttttttttttttgcaaactgcagttggacaagcatcttaactgcttttatctgaaagaggggggaccactgttgtctcagtcacaaaaattctgctgagtgtctttccactggaaataccataagataagctctcataagacaatttcactattccaagggcagaatgtggcaaaagtggggctgctgctagctt

SEQ ID NO: 59501 - DNA, 478 bp, Homo Sapiens
tttttgagacaagggtcttactgtcacccaggctagagtgcagtggcagatcctagctcacgacaacctccatctcctgggctcaagcgattcttccgcctcagtctccccagtaattgggaccacaggtgtgcaccaccacgcgtggctaattattattttttttacagatgggggtcttaccacgttgcccaggctggtcttgaactcctggcctcaagcaatactcccacctcagcctcccacagtgctgggattacagctctctttctgagagatacccttgtcagatttttcatgggaagcttctgttttccacagagctttggagcagcatttactgcacaaattccacaaagggggagaactgaggaactattcatattcttatttctgaatgattacttgttttcctagaaaactctgcattttgttgcaagtattctaacttattatcatacagttaacatgatatctg

SEQ ID NO: 59502 - DNA, 496 bp, Homo Sapiens
aaacccaaaataagtaaaatttaatttaataaaattaaatctatatgaggtaatgactatacaagtacagaatggagaggttcctctttacatgtgaaagacctttgagtttacactttcaaactccttgagtcaagaatatacgctgacatagaaacaaattttattgtacatttcttaatactgtaaacttacacgtacttcccacataacctcaattcctcatctattctcttgtagagatatggtagtcagtgggacagacgctttaaaagctgacaagacctatatttttaacttttatacattggcctttgactacctggaatagtattaaatagctgtttacggttatgtcctcaaaatcataccaaatgtttaaaatgcagtctaatgctactttttacaacccaagaagatagctgttattatccttatcttgaataagatcctgtgtttgaaatcaattctgtggggttagagactcatcccagca

SEQ ID NO: 59503 - DNA, 490 bp, Homo Sapiens
ttttttttttttttttaaggcactttcctttacttttagttatttttaaacacgtatctttatgctcagatctttcttttataactgggttataactggggagaataaaaggatccgggcatgagagaaagtgaaatcaagggaggaagagggcatgcaatgggggaagggaggagcaggaatgtccactttactgaatacaaaatactgtaaaagatggatcctgccatattcttcccccaatcaacttggatgaaaaacagaaatactacattcttaaacacagttcatttttagtttgtcgtggcaatacatggaaaaaaatcaggccactactaagcatctatagagtgtatctttggcaaaaatgtggacctgcaacaattcagatggttttctttcaattaggttcaaaaatcatggctctgtaaatttccaaaacttttaaagtcttctcatgtcttcttataatcgggcattcagaggtacg

SEQ ID NO: 59504 - DNA, 545 bp, Homo Sapiens
ttttaaagatcagaaatctttatttgacaaaggtatacatggtgaaaatgggcagtcatcttaccatgcaatccaaatctaccaataccaagaaatgcttattgttaagaaaaaaaatcattagtgagcatggccaaccaatttttagagagaggaataaaagaataagattagtttcaaaaggaagaacttcactgtaaatatctgtgtttataaattatcttagaatacacaaaaccaaggcagaggctgtgtaacaggcaactgagccaagcacacataaaagagggatgaggaacagaaaagtgtaggaaatcctgcagcgatgcagaaatagatatttttaaaattatcataatcaatgaccgtattttcatcaaagaaagaataagcattccaaagcagcacaggctatttcatcaatttaaaaaactagcaagaagaagtatttttaaagtgcacttttcctgaaaaattcatttttatatgtaatacacagtcacatacagagataattatttctaaaaatcttggacagtttatct

SEQ ID NO: 59505 - DNA, 467 bp, Homo Sapiens
tttgtctaagaaaggatatttgagatataaagaacttccttacaataggcatcacaaaactgaaatgggttactgagaaagaaaaagatgcaagcattactttgcctaaggatctttaatagaaaagaactgtgccaggagtcaacctgcctgtcagcagagagaaaaggctctggaggtccaaggcttctttaatttttgacatttagtggatgtggtaaaactccatgaaggggcaggtacctgttacatgtggaatctgggctataggattattattagcagatgattaattaacaaagtgtccttgtccaagggtcactagacgacctccactaccacttaatatgtgtatttctgtagcttcaaattagggcaccactctcatcctctggatcctttcctgggactaagagcctagccaggcttactgaatagtgtcacaaaaggtgaattagaataggact

SEQ ID NO: 59506 - DNA, 326 bp, Homo Sapiens
tttttttttttttttttgaaaaaggagtttaaaaggtcctgctctatcgttctgtgtctggctctgcaaactgctggtatgtaaaagaccctctttccagacaggccacgaactccccgaaggccgggctggcctcttctctgcctctgtcccaacctccctgacacaccctccatccacgttaataaaacagggaacacaccagagggctcagtagagaaaaacacatcataatgactgatttataatttttatagctttaaaataataaatttatttttttccattaaagtattataacacgattacaaaaagccctcgtgccg

SEQ ID NO: 59507 - DNA, 1054 bp, Homo Sapiens
  misc_feature (31)..(31): n is a, c, g, or t
  misc_feature (1054)..(1054): n is a, c, g, or t
ctttttttctccaagggtaccgttttatccntgaggcgaggtggctcacacctgcaattccagcaactttgggaggccgaggtgggcaagatcgcttgggtctagtagttggagaccagcctgggcaatgtggcaaaatctggtctctactaaaaatacaaaaaaattagtcgggcgtaatggtgcacacctgtagtccgagctactgtagtggtggtgggggaagagggggttgaagcaggaggatcacccgagccagggaggtggaggccgcagggagcactgatcgatcgtgccactgcactccagcctgggcgacagagaccctgtctcacctgtctcaaaacaaaaacaaaacccaggtacttaaagatacgcttatatgattgggaaaggtcttcaaggtcgtctagtttaaaccgacctcttccgaagctgtaaacttaatgacttaatccctttaactttgttaaatttcatatcacctggagttttctgtcacgctaaaagatatttccaaacaggtgtctgatatcctagcaatcaagtcacatttaaagatcaggaggaaaacaatgtaacagctttttaaatggcggccaggttactcaaaagtgtggatcaattcctgacaaaacctgaattaccatattaacaagatctagaatccagtagcagaaataacagagagcaagaataaacttctctaggtggccattcattcccaaggttttactgattgctaatctttcctgcagagctgaaggtcggacttcctttaaagagtcttaaaattccggtctcgcgccactaccatcagagggggtaggtcttagcgtaagcttgattgctaacaagtggattaggggctttaactgtaatgagggcgttgaatggccacgagattagctctggttgctgcgatgtttctatcgtaagctaattgtgctgtggggagttagctacgtgtgcttgagactgaaggcaacgtaagagagaggcagaaaggagatgcaaaggagtgcaggggaatctcccaattgtcgctcagggn

SEQ ID NO: 59508 - DNA, 547 bp, Homo Sapiens
cacatatcagtatttattatcttttcaaaggaacaggtcaagatgagaataaagtttatgatcaaaggtagtcaaacatttattttatataaatataatttccttgcctatatccattagatttggggaaaaaaggttcaagtttacagtgccagaacagctccttctttaaaggcttgtaaacagtgacttgttctatgccagcatgcacactttgagcatatcaactcacttaatccttaccaacaattctatgaagattgtgctatcattcccatttcacagataaaaactaatgtatctagatatgataatcttgctcaggatcatgcactgggatttgaacctaagtgatctattctctgatgccgtactatcaatgcagtacaatttttaactgcatgaatgcacactgcagagcaacagcaattgaacaatgatcatttgccttttggaaattatggccacatactttgtgtagcttgatttacaaatagcttggctaaaaagcagttcagcaaatcaacttcttaaaataggctatgaa

SEQ ID NO: 59509 - DNA, 459 bp, Homo Sapiens
ttttttttttgagctctgatctttctcagcactgattagggttgcataaacagacgcttatttgccatggtgggattaagccacccatggacaattgtacaattggatacagtaagtgacatatttctaaaagttctgttgtaattaacaaattctcattcaactgtgtgatgtaattcacacatcagatgagcaagttgaacctcttgtggactctgagggactggggcacaggacagggaagtttttattggaaggcgagagaaatctgaacgggaacaaaacaggttggaagcacaaaacaattaaagggacttcgaattgctgaatggggccactgagcctccttgctccctccagagagaccctgtagtaggccactgctttgcaacagggaaggtcagacatgggaaaacaatggaggaaaggcaggcagggtcaactgctggccacagcctg

SEQ ID NO: 59510 - DNA, 552 bp, Homo Sapiens
cccaatataaacgatgactatagcaagacctcgtttatattggggaaaaaaaaattatcagggtgtggtggcatctgcctgtagtcccagcttccagaggtgggaggatctcttgagcctggaagattgaggctgcagtgagcaacaatggcaccactgcactcaaaaaaaaaaaaaaaattgagagtcaataactgcaataaacttttttaagtataatcaaatgagttcaactgtcacgttaagatgccttgaattcttttgattttctagttccaatttctagctttaatatcttcaaatcacctgttaaaaagaagacagcaatgagtaacatcttagggtagaaagcagttatttcaaaagaaaaatagtttgagagcctaaaatgtaactattagaaataattaagtttattttagaaagctttaaagaaatggtatcgatttttattcttatagtgtacatatacatttacacctaattttgagtagcacactaaatgattcacattcgctgggagaatgatggtcacatgtctcttttaaacag

SEQ ID NO: 59511 - DNA, 443 bp, Homo Sapiens
  misc_feature (378)..(378): n is a, c, g, or t
  misc_feature (384)..(384): n is a, c, g, or t
  misc_feature (415)..(415): n is a, c, g, or t
  misc_feature (422)..(422): n is a, c, g, or t
ctttgagggctggggtgggaaggtagtggaatggaatagataaacagccagtcaagagctgtggggaggttgacagaattggggtgcaggtacatgtaggatacacagaagctttgtgtctgtggaggctgtatgagtctgtgggtgagcagcatgtctaagtgggtggaaacatgtatagctaaaggcaggaactcttcccatacagctaaacccttgttcaagcaatttaaataaacaagaacattttaaaaaatttaaaccccacttaaaaccaatccttgtgggagcagttttccttggaggtgccttaaggtaggaggccccaggttccaaaaaaggggtttaggaggatttccgccattacccccaggcctnccaggnaccttgaaacccccggcccgggggtttttanggggganattggcctttgggaggggtaa

SEQ ID NO: 59512 - DNA, 521 bp, Homo Sapiens
cggacgcgtgggtcctaatcaccccgttacacagagtggagaacagagggggtttgcccaggtattatgctgcaagtcagagctggggccagaatccagatagcctgtccttagtcccatgctcttctgtaatactccactagattgtattattgcagaaagcatctgttaaacacagaacttggcttttgttttccccagagaaaaaataaaagatactattggaaattaagtgtcaggcatggtgctgtgtttttttgtagaggttaacttcatttactttgacacagcagtcttgggaggtggaagtattatatattataccctattcgacagataagacattgaggctctaaggagtgatgggacttatctaatagctacacatttgttgatggtgggacagggatcttggcccaggtggtgtgagcccaaagtctaccttcatcccatcagcctgaatctgtgaccttctcagtcctgagctatgaccagacatactcgaggaagggggtgtattt

SEQ ID NO: 59513 - DNA, 537 bp, Homo Sapiens
ttttttttttttgatagcaaataagttttaatcagcagagaccttaaacgtcaatcatggcaagaggaggggacacaaacacccagcgcgggcttgctaaattcaagatttaaatatattgcctttctttcactacaatcacaactcacttaggtagatactttaattcacattttacagatgagaagattcagagtttaagcttcccaaggacagaaaggtaagtcagtgggaaattccatgtacattccattactaaatgccacataactgtttggataacataagaagagtgggtcattatatgataccaattacaagatattagggatggtggaggcagtaatttctgggataagaactataatttacagaataaccagacatcatctgatctggtgaaacctgtgcattcccacaattaggctttttcacactttctctctttaaatgtgcaacaccttccccatcccctttacttgtagcagttgattctgcttcttatatcccgagaaagcaactaccaccaaatctacc

SEQ ID NO: 59514 - DNA, 309 bp, Homo Sapiens
  misc_feature (51)..(51): n is a, c, g, or t
  misc_feature (97)..(97): n is a, c, g, or t
  misc_feature (114)..(114): n is a, c, g, or t
  misc_feature (175)..(175): n is a, c, g, or t
  misc_feature (229)..(229): n is a, c, g, or t
actttatgctgtcacttctcttgctgtactgtaattcatgttttaaatgantttgataatgaaattatactattatcattcttgatgaatacttttnttatttttatgattttnctaatgaaactttaaacttttgagatttgagagtctgttttctataagtagaattactgtngttacaaaatgaaaaaggactgacctaaaatcagtctcttcttttggtctgtgnatggattttaatggccgttctgtgctcatatatacctaagatgaggattatattacatccaccaaagactcagtttgaag

SEQ ID NO: 59515 - DNA, 477 bp, Homo Sapiens
gctcttctaccaaataccgcttttcacccaggcttttcactgcatagtggacaatctatcaaacaggtgctgtccagcgtgaggggcagttgcaaaggtctgcatcggtgctggctgatggaactttccggtgatggcatcattccgtagctgcactgtccagtgaggaggctacttgccactgtggctactgcttgggacggtgcaggtctgaatatcttactcacagctcacctttttggtgcctttgatccgtattagaaattatccacatcttctctctgggcaatattctactttttatattgacccaattattttactgctttggtgtgtcctttctcctaacacatatgggttcactttgaaaccctgaaacccacatttacaaaaacattttcaatatgaaacattgttccatgactcattactggagtaccatcaacatttacatttccagaccacccactgcccagt

SEQ ID NO: 59516 - DNA, 547 bp, Homo Sapiens
tgagcggtagcaagctttattgtgaagagcaaaatgacaaagctcccacagcgtagaaggggacccgagcgggttgcccatcactggtcctttctgggggttccttccccaagtttcatagggatttacaggctagagcttttgtccgctattcagtagcaggtcacaataccttcaatcctgctctaatcagaggcatctctgccataacttcaggaggaattgagggagagggggcagcaggagccctctgtgtactggggaaggaaagaattcctggcttatactccctaaagacaggactacactcagatgtggatgaagggcaggaattctaacccctgcccctcaacacacacatccctgctacattccctctttctcactagaaatttgagatgaagggtcctaatcacatcttctgcttgaaacagcagagatttcaggctccacccatagtcaatagaaagaaaggggcaaggggactgtgaagtcctgaatgcccagctctgcgcaggaagacaggcagagccagctgcaaggctgg

SEQ ID NO: 59517 - DNA, 538 bp, Homo Sapiens
actttttaaatgaaataatatgctttattttaaccgttctggaacaaaagcaaatgaaaatcgactcagaatatcaacagacattcctttatagattctcaaagcacaaagaaatttgtatgattttatagtactaaccgctgcattttacagatgaaactaattccctgaagggtgtggtgattgccaatatgacttagcaaatcagtggcagagccaggtgtaagagcccaagtctcttgtcttctaccaggtatttattcgtttcactaccctactatccctatctgtggtttaagaataataccagaggagataaattgtttcaccctttcaaaacaatgtaaaaattaccttctaatcgagtatttggtatttactgctcaatgatcaactagaaaaaatatataatactagatgggatctaatatattctaaattctttaactggtaacttgtcaatttaaatgtctttgaactacgcttagagttgtaacatcaaatgctatagaaacaggctgtgaaaatctaaatgtct

SEQ ID NO: 59518 - DNA, 555 bp, Homo Sapiens
  misc_feature (433)..(433): n is a, c, g, or t
  misc_feature (493)..(493): n is a, c, g, or t
cagtaagaatatagatttttattatacaattaacaaattatatttggcatcacttaatacctaaaactcctctgggagtaataataatgaacatttctcaaagccatactatattcttacactatcctatgatgtatacaaatatactttcagtgaattttcataacaactcttccaattttacagctaagaaaactgaagcacagaaagtcaagaaatttgcccaaaatcccacagctaataaatggcagatctagaattcaactctcaggaaatctgattctagagcccagttctgaattcctatgctatttttcaacatcttccattttctctcccttcttgagtcaattttggtatttttcatcttcatagaaaatcatctatttcatttggatgttaaaatttattggcatgacttgacttcaaactntggtgtcaagtaccagaatttatatcagaaataaaactatttttagccctatattccttntcctatatcatgagccttataaattcatcccagagggaccagtacacccagatgttggactg

SEQ ID NO: 59519 - DNA, 460 bp, Homo Sapiens
  misc_feature (412)..(412): n is a, c, g, or t
  misc_feature (417)..(417): n is a, c, g, or t
  misc_feature (430)..(430): n is a, c, g, or t
ttcaagattttaagattttcattttattaaaaatatagcaacataatagcagcattgtttgataaatctttactagtaccatttaaaagtagtcctactcacaaataaccaccacctatgcagcatgtttatgtttacattccaaactcttcccttgataatctaacactgttctattaatctaatcattaaggaggtaattttttaagcattaagttgatctacacagctacacagtatactcaaatttcatacttaaatctattgtagaaatcagaaattctttagtttattccccaacagtgtgttacctaccagtaccctcaaaatgggttgaaatcaacctattctttcagtgtgatttttatgaatttatacttacatatggtagttaagaaattatgtctagcanataanaataaaccaagantagaaggtactactcctccataccaatcct

SEQ ID NO: 59520 - DNA, 540 bp, Homo Sapiens
acaatgaatgttgaatacttgcataataataaaaaatgctaactgcttttctgacaaagaaataagaaattgatgaatgagaatataattcatggtcagtttttagagaaggaaaagtagcattcaaaagaagaatgggactaatgattttctctaaaaaaaaaaaaaagcccaaaaagtttagataagattcttcagaagatgccagctccttgtgtacagaaacatgagaatggaaaagacgtgataagtacgatgacctactgtcatcttaaattatgtattaagaaaaagggccacaaacatcacaatttttaaatggtcaggcactaagacttataaagtcctactggctgcaccttcaaatatatatctagaatcccatcacttttttttttttttaaaccacctccactgctcccatccttgtctaagccaccaccacctctcacctttcttactgccatagctttttaactgttcttctggtttctactgatggcatatgctcaacacaataaccagaaataaccttttcct

SEQ ID NO: 59521 - DNA, 540 bp, Homo Sapiens
ttatacaaaagcatttaacaagcttaaaaaatgaaactcaatgaaaaaaaaaagaaggtttgaacacagtcaaataacctgagaagtgacagatggaaaagcaacagaatgcaagcaccttgtaaggtctgtaatctttggatttactgtgaaaagtttcagaacatcatagactcttactgccacattgtccatagaccctggaaaataacagtgaaattcatatgtatacacatatatatgaatacacactcatgcatgcacactgtcttcacacacccctcctcaccacttaaccggagttacataaatgcttctcagatatgtcattgcatttgtttgttttctgcatctcaactaagttcagcggcttgcgcctgtgacattaattatgcaagattcaaacaaccaagcaggcacattttgggggtgagttttaagaaatctgtgacctgaaagaaattctgtggggactgtctgggttatccagtttattccgtgattatattctgtttttaggtcttgacctatttttaagct

SEQ ID NO: 59522 - DNA, 712 bp, Homo Sapiens
tgcccagaccccttatatgaagtaatgctaaaatgctggcaccctaaagccgaaatgcgcccatccttttctgaactggtgtcccggatatcagcgatcttctctactttcattggggagcactatgtccatgtgaacgctacttatgtgaacgtaaaatgtgtcgctccgtatccttctctgttgtcatcagaagataacgctgatgatgaggtggacacacgaccagcctccttctgggagacatcatagtgctagtactatgtcaaagcaacagtccacactttgtccaatggttttttcactgcctgacctttaaaaggccatcgatattctttgctcttgccaaaattgcactattataggacttgtattgttatttaaattactggattcttacggaattctttattctgaacagaagcattcagaaccaaaggctgggtcccacaggccacggaccaagtggctctgcagcgcgtgacaacactcctgctcatatcggagtctcaggacaggagcgcgcagccccagaacaggccacctcattctagaattctagctgtctcacaaacactttgtgtgtgtatggtcactaacatttttcattactgatggtgtcattcacccattaggtaaacattcccttttacatgttcgcccgtctcgagacaggatctcactctgttgccaggctgtaactccaccgccc

SEQ ID NO: 59523 - DNA, 702 bp, Homo Sapiens
  misc_feature (517)..(517): n is a, c, g, or t
  misc_feature (644)..(644): n is a, c, g, or t
attctaaaatacaacgtttattaaaaaaacatgcgatcttgccaataggccaattccatgagaacaaaagattttttttcccacctacaagtctttttagagaaacaaacggaactatttccagatgaggcggggtgtctgggaggggctgtgggtggtctggggctggtgactggtgaggttgggtggccctctgggggtccgggaggcactttccgttttgcttctgttggagatgttcccgtcggatgctgaagaacaagcctgccggctgggccactccgacctgggctgtggcacccgtgtggccctcggccctcctggcctgagaaaggggagtgagaaggagccactgtcctgatatgggcaaaactcggggtcactggtctcatgctccaaggccccgtgagcaggccaggtggggggatcccttggggaagcccctcacccttcttcaacccccagccttcggggagcccctgccctccaggccctgtgctcggaggtgggggagacngctcagtgacttttggttcccatgacattgacagagacagggacctcgacgcatcctccatacccgctgcggggaaatggacccccacagccagcaccgggtgagttggggccagtccctggcagantgtgttgtcaccagaggtctcttctgcagtggccgatcgggcgccagcaggttcccgg

SEQ ID NO: 59524 - DNA, 2338 bp, Homo Sapiens
gggggttaaaaagaaaaaaaaaaaaaaaaaaaaaaaaaaaaaaaaaaaagagcctctccggctactcggggtcagcgtggggcccctgcagcagatgagggtcttcacttcggtgaactgaacccttgaagcggctgtgggcagggcagcagggctatggccaccccccaggttcgcctttgccgacgcaagagcccaactgccctcctgggtgcgtccccacgtcagggtgtatgacaactttggccatgtcatccgagacgtggcccagttcttccgtgttgccgagcgaactatgccagcgccggccccccgggctacagcacccagtgtgcgtggagaagatgctgtcagcgaggccaagtcgcctggccccttcttctccaccaggaaagctaagagtctggacctgcatgtccccagcctgaagcagaggtcctcagggtcaccagctgccggggaccccgagagtagcctgtgtgtggagtatgagcaggagccagttcctgcccggcagaggcccagggggctgctggccgccctggagcacagcgaacagcgggcggggagccctggcgaggagcaggcccacagctgctccaccctgtccctcctgtctgagaagaggccggcagaagaaccgcgaggagggaggaagaagatccggctggtcagccacccggaggagcccgtggctggtgcacagacggacagggccaagctcttcatggtggccgtgaagcaggagttgagccaagccaactttgccaccttcacccaggccctgcaggactacaagggttccgatgacttcgccgccctggccgcctgtctcggccccctctttgctgaggaccccaagaagcacaacctgctccaaggcttctaccagtttgtgcggccccaccataagcagcagtttgaggaggtctgtatccagctgacgggacgaggctgtggctatcggcctgagcacagcattccccgaaggcagcgggcacagccggtcctggaccccactggaagaacggcgccggatcccaagctgaccgtgtccacggctgcagcccagcagctggacccccaagagcacctgaaccagggcaggccccacctgtcgcccaggccacccccaacaggagaccctggcagccaaccacagtgggggtctggagtgcccagagcagggaagcagggccagcacgccgtgagcgcctacctggctgatgcccgcagggccctggggtccgcgggctgtagccaactcttggcagcgctgacagcctataagcaagacgacgacctcgacaaggtgctggctgtgttggccgccctgaccactgcaaagccagaggacttccccctgctgcacaggttcagcatgtttgtgcgtccacaccacaagcagcgcttctcacagacgtgcacagacctgaccggccggccctacccgggcatggagccaccgggaccccaggaggagaggcttgccgtgcctcctgtgcttacccacagggctccccaaccaggcccctcacggtccgagaagaccgggaagacccagagcaagatctcgtccttccttagacagaggccagcagggactgtgggggcgggcggtgaggatgcaggtcccagccagtcctcaggacctccccacgggcctgcagcatctgagtggggtgagcctcatgggagagacatcgctgggcagcaggccacgggagctccgggcgggcccctctcagcaggctgtgtgtgccagggctgtggggcagaggacgtggtgcccttccagtgccctgcctgtgacttccagcgctgccaagcctgctggcaacggcaccttcaggcctctaggatgtgcccagcctgccacaccgcctccaggaagcagagcgtcatgcaggtcttctggccagagccccagtgagtgcccacggaggcccccagcacacccaacgtggcttgatcacctgcctgtccagctctggtgggccaagaacccacccaacagaataggccagcccatgccagccggcttggcccgctgcaggcctcaggcaggcggggcccatggttggtccctgcggtgggaccggatctgggcctgcctctgagaagccctgagctaccttggggtctggggtgggtttctgggaaagtgcttccccagaacttccctggctcctggcctgtgagtggtgccacaggggcaccccagctgagcccctcaccgggaaggaggagacccccgtgggcacgtgtccacttttaatcaggggacagggctctctaataaagctgctggcagtgcccaggaaaaaaaaaaaaaaaa

SEQ ID NO: 59525 - DNA, 599 bp, Homo Sapiens
ttgtggcacataatttgtttaatccagattggatacatcaggtacagcagtggcacacgactcaatactgtaaatgatatacatgttttaacatatgcactacagtttcaaaagaagacgacaggaaactcaagggtgtattttttttttcatagaaagttttcatgttttatcttcctgcagttttgtacagtatatttcttctttgccattgtgatgttgataagcaaagcccatttattatacgaaaatagaaaagaacacacttgatgtatctcacgatgacattaatggggggaagggtgtgacctctaaggaaaacattacattggaatgtctgattatcacaaatataccatccctcacacctcccaggtttgtaaaatagtccattggtccaaggagcaccccaggacttgggtcagtgccgtacactggttagagtgacatcctccagtgtagttgagtaacctgctaagataaatgtcattcccaacttgagaaaaacacagacattctgaatagaaaccagacttaaaggaccctttaagctgctcatttctgaagcacttcccccgtgcgaatcttgcccggggcaa

SEQ ID NO: 59526 - DNA, 822 bp, Homo Sapiens
gttcaatctgggtttaacaaaatgtaactccctggtctccagtgcaatgcccttagactggctaattttttaatatagtatatgtggtgcttatttataaacatgtagaaattaccaaagtaactacaattctaccaagtaaagttatcagtagcatcatttatcatgaaaaataaataatttttttgaactgtaaaaatgaaatctgtagaaggtattggaacttttggaatgtttcagttcaggtaaggtagtactaatacacaagatggcgtttctagaatgtatgacactgaagtgactttttgtaaaaatatattaggaaaattatttcttaaaattatgtgattatttggaataaaattggtgcttatgtgagaacagggttaaataatactgtctttctattttcctaatatattagaatccttgcttttgaaagcaaaaatgtatatctttaaactatcatcttgataccataacttttctatatactgtattctagattaacagatgttgatttttattgggtgctcttggtgggacttggcacacacaggttcttattatgcctgttcacagggtttacaaactttggttttcacaataattattactggaggctgtatttccaggcaagacattctttaacattggaaggctaacaaaaatatcgtccgtaccgagaatctctgtggaagccaagattagttaggtgccaggtctggggagacacggggcacctggactctgacagagactgcgaacaagggaagaggcaaaatattggggagacacagggggaaaataaaatgccgcaaa

SEQ ID NO: 59527 - DNA, 531 bp, Homo Sapiens
  misc_feature (238)..(238): n is a, c, g, or t
  misc_feature (495)..(495): n is a, c, g, or t
tttggtttaaatgtcttttatttgcaccagtttatagaggggaggcagattaggtactatgtctttcaatggcatgtatataacatctagtcaaatacaggtgctccatcattacatcacttaagtttgaagttttttgttttctaattggcagattactttttgcttttgaatatttgaaacagaaatgctataaattgatcactgatccaacttgggcctataagagatcactatngttgtcattagtacaatttactttaaaacaggagcaaaaaacgtgtctgtcactccctgtttttgcaaaatctctccccttagttttatggtagtttagtgacattctgctgtatttcactattgtgagatgacgtggagccaaatgaagggccactttgatccattctttgatttcaaccccaaactttctgcaaatatgttttatttcctagccaaagttattttagatgccacatggcactatataaagaattntaatgttctagagtcttatgtactggatagtaaaga

SEQ ID NO: 59528 - DNA, 732 bp, Homo Sapiens
gtctaagagtaaacggtgtttattttttgttgatttttttcaatcaaatggaattgcttaattaaaaaaaacttatctcttttctccttaaatactacagacaacctcattttatcgcagcagacacctaggaacaaaacactggacccaccagagaaaactgggcaataaaagcatcagaagttcaagtcaactatggaagaattactgttagctggcagctttcaattctaaacagaagtgtcccaaacctattgggtttgacaaaagtttcttagaactggggagctgggaatgttggactccttttaattctattccaatcatttcctgtatagggaaattaaagtcaatgcatcaaatgaagacccaaagaaacatttaaaaacttgtttgactagtattcagtatgtgagattattaagtaataacttgtccacctagttaaccttgtcctggaatatatataggttatttgtagccgccactgctataatattttctgaaggatgccaagctgtatgcaagatctttttgctaaagtccagactgtcgacactgatctcgtcttttctacgcttgccccccacacacacttttcggggtttgaggatagcccgggcatgctgttttcctcgaagcctcagggtcacatcacgctggtgtttctgtcgaacatctgaagaaagtgtgtaggagctgtcatgatgacacgtctgacccattcacaca

SEQ ID NO: 59529 - DNA, 484 bp, Homo Sapiens
  misc_feature (470)..(470): n is a, c, g, or t
ttgcgtgaactgcagactttattactatacaaagacttttttctgttttgttcccggtgcttatggagaggaggaggaggaggagaaaccgcacagggaggctctgggtacggccccgccagccccagcagggtccttcctgtcacaccccgtgcaacgcagcaggcgctgtggagagtgagccccactgcagtgtggggcgcaacttcatccgaggggtgcttggagggactggccagacgggcacagcggtgaggaggtgctgggatggggaaggtccccgagctccgggcggtgttggatgagctcaggctcacaggtgtggccctgcctggcccgagctctccaggtgtgtccaaaccttgtgttatatgcaccttgcagtccagggctcacccgtgcggtctggtgaggtggacgccacattctgggggtggcactccaagttcttccccacacacgtcgctcangcggcagcagcatg

SEQ ID NO: 59530 - DNA, 501 bp, Homo Sapiens
gtcttttgaatcaaatttactaaaatattcataaacctttctccacccgaaggatgcaaacgaaagggagacacagagactgtcaaagctataggcagtctgcaggtgatgattttatttttttaaatgtggtttggaatctggagtctgagacctggacccaaatctcaccacagctttgtgctggctgagcaccctgggaaggaaggtaacttcacagcggaacccctagccccacacctattatctaaagacgattgcatggcccccagaacagtggggactgaatttcgtatggcaggacctcatctgaatatacagtaggtgctcaatacgtgctattaccctcttccctttttggcagtagacagataagctttttctatgactgataccatttttagatgtgaaaacactgactcctagagagtaacatttcatcactagccttcaatggtaattcatacaattggaaatgcatggaaagccatatttttcact

SEQ ID NO: 59531 - DNA, 560 bp, Homo Sapiens
cagatcttttaaaatgtcactttactagaggctcttcttggctaccctatatgaaataaattccttcattttactccattgcacttagacataccatatatttacttcatccatctctaccatacaatataacgtgcttgagggcagggatattttattaacatatatatctctagtacctgaacaaagtgtgaaaaaagtagatggtcaataaaatgctgaatgaccaaatggaacttgttggggactctattaaatacaaatcaattaagctaaattaatgtactttcagtccagagaaaatgttgcaaaaagagttacagaagaaacagaaggcatcatggtacatcccaaccaggagcctgcagtgatagctggacaagggacaattgccctggaagtgctgaaccaggtaaaatagctgagttcttcctgtttagctactggtaaagctgttgggctatattcaattattttatatgtatacattaaatataaaactgcttacagtttatattttcactaaaggttcctttggtggatgcactggtggtacctgt

SEQ ID NO: 59532 - DNA, 1102 bp, Homo Sapiens
tccggttcattagtgagacaaaactataattttgtttttttcttctttctctcttccttcctttttaaaatttgtattctccagttttgctaataatgttatacaattttacaagaaaaaagtgagtaggagagctgtttttctatagtaacagattctgtgaaataggtatcatgccaagtgaggtggcacgtccctgtagtcccagctactcaggaggtgaagcagaaggaccacttgagcccaggaattggagactgtagtgtgctgccatcatgcctgtgtatagcttctgcgctacagcctaggcaacgtagcgagaaccatctcagaaaaaaaaaaaaaaaaaaagagataatctattcctcataatttccttaaaacttgtggaattatcttgaccggacttgtggcagcatttggggtgtggaaggcacttagaaaatttttctttaactgccttacctttattttccataactcataattgggttaagactacagctgggtcatatttccatatctctttcctttgacccatttatttttccacggaagttaacattctgggtcaacaagtttaccacagcattcctcctggtcatcctttaatattctcccctttttgggaggttatagttcccttaaatttctggtaccttttcgtgaaacccagggtttacattgggtctcggaacacttggtccacccgtgttgctttggaaacaagaacgggagtgttcccggtgctcaacataaggggtactatatagactcaattgcctacatgggctggtgttcagatccttagaaaaccttttggcattttccttggcctggtaaatatgtgagaccttcatcccgccttattagaaaatcttttacgaggggttcccctcacagcagggtaacgtagggagaaatcctcctcttaaattgggcgagcaatatttggaaaacaagaggggcggcaaaaacgaaattagagagaagagagaacaactattgggagcgtattcacactgagcaactgacacgcattctgtttcaacaagcactcagtatgatcactcaacagaatgactatatacaatcataacag

SEQ ID NO: 59533 - DNA, 534 bp, Homo Sapiens
ctttaaaggctttatttgcattcttgtaaattttattatttcaagtcaatgtgttaagaattactgcgcatatagttatttcttttataaatttgttttccgtgattccttcaaaagctttcttattgttggcctttattttctgcagagaagactacagttttacagcttatgctaccatttcgtatttgaaaataggacctaaagctaatcttctgaacaatgaggcacatgctattactatgcaagtgacaaagtccacgcagaactctttcagggtaaatggctattaattttcagttttatatattttaaaaagtatattaaagcctatgggatgcttttctgtcatattcccctaggtccagttgaacatgagaaaagtcagttttctgattagatttctgggtatggaagagagaaaatatagttttctgtaaagatgtaagtgaaagaatttagactggccttttaacataaactaggggtttccagtttcttggaatgggaggactccgtttgaatatctaattt

SEQ ID NO: 59534 - DNA, 545 bp, Homo Sapiens
tttaataattaagcaaagtgttttaattaattcttataacaagcattcctgacagcataggtatccacccctgaagttcctattctatagcacaaaataacaaataagtattttttggttccataatggtcacccacagcctgtgtatacaggaccacgcataatgggaatcagctttattttacaacagagcttcactttacccctccagcagttaatggattctgggtatttattaaaaactttacatttaactcaaagacagttaaataccaccagcccagctctggcaaagactgttggctttggttatctccagcatcattcaaatacactaccaccccaatcccagcccaatctttggccttggggaaaaaaaacatgaactacgatgacaggacaagcagtaaaccttctccagtactatcagagtaccctttctggggttgcatcccacagaaacccatttggggcccaatatcatgtacacagagctaaaattccaggtgccactttgtattaagagaagccaaaattttggtcag

SEQ ID NO: 59535 - DNA, 472 bp, Homo Sapiens
ggttttttggttactattataagctcacatatgttggtaatctatctttaagaattctttgaagccagggttgaggtatattccaccagggatgatctgagtttgcatctctcaggtgcctggaagctctatcaacttggatctactttttaaaaaaaaattcaatgtgtatatatatatatttaactttttaagcagaaaatacattttcttagttcaaaaaactccaaactagtccccttccccttcctcttagttaggcctaacacttcaactagcacggtatgtagtaaagaatttaaccttgcccaaagagaggtctggcatttgcccttagctcttaggaagtaatgttaaactctttgaatatcctcttgataatgatttactaggggacttaagccatgacagataagtctaccaatatgatttatggtagggactttaggttacatactatcaactcaacctc

SEQ ID NO: 59536 - DNA, 425 bp, Homo Sapiens
ggattttcagcaggaactttattccaatgctaatggcagacatcaggaaggaggagaggaaccatttgtgcagatcatctagaagaacctggaccattcttgacaagagctgaatacagtgatcacgttgtcctccaaggagcaggggtggggtggggtacttctaggagtcagttttgcaggctgtacaggaagcatggctggggagccctcaagaaactgacaatcacggcagaaggcgaaggggaagcaggcacgtttcttcttaatattcctttgaaattccttatggcgcacaggtagcgtagaaaataactgcttcacgctgactgtggtccctctggggtggggggtagggggttttctgggatgattttcccatcgtgatccaacaccagtcgagtcccaaccttcgccgatacgta

SEQ ID NO: 59537 - DNA, 561 bp, Homo Sapiens
aacaaagataacaaatataaaaatctagtcataaacaggcttcaaataacaattacaaaccaactagaggaatccaccttttagagggttaaggggttagggacttcaacacttaaattaccgccatgttgtcaatttcacaatggctgcagtgatgaggaagtgtgtgtacagcaggtgtaatagctgatttcatcttgctgccatccaaactgaactttactctcttcaggatacaagaacttgcaaatgtcttcatgccactcttggcacagatgtcttcatcccacatgaaaagaggcagtttctatggcaatactggttaagcgcctatcgtgctgcactaatatagtgcaaaaatgtgccttccatatagcaaaaaagatgcaggcaaccagtttgaaaatcagggaaagtagaaacgtattgtattaacacaagtaaattagttgtccagacaattaccactataaaatactgaacttgaggactcgttcttctaagacactagtacttgtccagcattcttactttggagagagacaagaagtcttaaaaaga

SEQ ID NO: 59538 - DNA, 619 bp, Homo Sapiens
  misc_feature (244)..(244): n is a, c, g, or t
tttaaaataaatatatttttatttatttatatatatgtttgcacacacacgcgaatcttattttttctgtttctctggagaattctgactaatgcacccccattcaccatccaggcttttgaggagaaagataccaatcttagcagcagaggacactctggatagagctaggagtttgttgcagagtctgacaaaagttccctctgcagaagggatggaaggatagccttgggggttgatttangactgggtgtatgacatgggggaaaagaaatccttgggggacctaaatgaggggaggtggaccccttatgatagtttatcagagcaatctaagaaatcatgtaggcctctaagaaagcatcaagaatcaatgcaatttgattaattgacttaaaatatgttgaacttttcagcctccattgtgtatttttggtgcaatactctgtgcaactatttcatccaagaccagaaggggctggaagattgcctgcttcacattaaaaccctccttattgtattggtgctgacacgacacaaggatatgcagtctttatccagtccttattgctcacagaaagataccagtccttactgctcacagaaagtagtgaagcct

SEQ ID NO: 59539 - DNA, 530 bp, Homo Sapiens
ttttttagtacgaaccagtttatttggaataaattacattgaaaattaaacatgtagtcacactgtactggcctcattttccagaggctctttaaatatagttgtgattctccaggttgttacattgaatatacgataaacacgttagatttttcacaacacatctcagaaaagcttaaactccaaagatcttacgtgtttgctcctttcaagagttatcagtttctggttgacctttgatggtttttaaggagtttatgataaacctgaatatttagtatgatagagcatgagccagattaaatgcttaacctaatttgctgtacatatttgccagtggttaaaaaatttaagggtttttggattcttgtgcgatgatggcttaaaaactagtaaaataatgcccaagtggcagagaaggaggactctcagtactgggttaggaattttattacttaggggagtttatggtaaaccagcaagttagaaaaggggggcatgctttaagcataagctcttaatgtgaaaga

SEQ ID NO: 59540 - DNA, 582 bp, Homo Sapiens
tttttttgagatggagtcttgctctgtagctcaggctggagtacagtggcacctgatctcagctcactgcaacctccgcctcccggattcaagcgattctcctgccttagcctcctgagtagctcagcttacaggtgcacgccatcacacccagctaatttttgtgtttttagtagagatagggtttccctatgttggccaggctggtctccatctcctgactccttgatctgcccgccttggcctcccaaagcgctgggattacaggtgtgagccaccacacccagcttcattttaactttcaagaacaacttacaaacttatattaacaaatcagtaactattagtaaacttaactggaagaataaactgccaagtatataattatttagaaataaagtaacatttctcaaaagctgttaccaaataaatgtcactttcactgaactctgcattaggaatcaggctataagaagtcctttatataaagaggacaaatgctaggctaatccttttctctctgactcgtcttcattatgaaataatttcaactttttctcaaagaaattcataaaactatct

SEQ ID NO: 59541 - DNA, 544 bp, Homo Sapiens
tttttttttttttttttacaacaatgagaatctttatgcatatagctttgtgatcaatacaatccttcagaacaacaagagacaaacaaaggaatacaatgtcccaaacagctgcagtccacaggctgacattgctaactagatttagatcatctggaggcttttgtaagaggaactgaggtgcagaggcatcagaatgagttgattcccggcaaaagggctaagaggctacagacatatctaaaaatcaagaaaccactacttgttaagtacttctggtgtttgcatacagtgtccaatacatagggaagatagcaagtccatactggtctttgtacatgctgtgtggtagaggctactgcaggtttctttattttctaaagtaggcaaggctcataaattgaccaattcacattgtgattacttggtacaatgcatgcatgttattggtacacagagtgctttaataggaatctgttggattttcaaaattctgacaaggccatttttacctcagaggactattatcctttccctcgtgccg

SEQ ID NO: 59542 - DNA, 462 bp, Homo Sapiens
tttttttcatggtaacgtgaaagtttatttttgtctgaaagctttcataagtatttaaatcaacacagtaatcaactatttaattgctgcaatcggtcaaaatttacaaaagccacacacaaatttctctccttctacacgtagctccatacactgccccttgccaaacacccttccgggaaccaatcagcatgacattcctgggcagttaatgtgaaaagcgagggcagggcaccgtccaggtggactttatccttcagggagggccgtatcctctcctcttacactctgtgtgtgtttaattttctaaagaaacaaccatttattcattagctatactcagccatcttctcttattttctaaacatgcccatttgacctggcagagaacgctgcagcttttgcaggttgataaaagatgtttcacttaatgaccactgggcgttttaactcctttcagcc

SEQ ID NO: 59543 - DNA, 513 bp, Homo Sapiens
gaaaatcaggcaactcggagaaaatttctgttatgtgactggggtctacgattcctccccacaaacaaacacatacacacaattccattttatttttttctcttccttttctttctttcttttcttttttcctcccccagggcatttaacagaagaaaattgatagcgttaacatttgagctaaccttgccgctccttgctgtgttttatatgccaagagaaggagaaggagacgctcagtaaatacaaatccgtgggcattcatattatttacattccttggagaccttctctatttaaaatgataagattattcaatcaggatggcgaaataaagagatcacttaatttgaccatagggaattctgttccacttggttagctcagacacggttctctgtcctaaccaatttcattctgaacagggaagacagctcctagcacatgcaaatgaccctcttccaactccggctccagcaacttcgggcgggggcagtcgggtcggcctcgtgc

SEQ ID NO: 59544 - DNA, 883 bp, Homo Sapiens
  misc_feature (595)..(595): n is a, c, g, or t
gcggccgcggccagggcggcccgtgggaccgcgggcccccggcgcagcgctgcccggctcccggccctgccggcctcctcccttggcgccgcggccatggcggccagcgcgaagcggaagcaggaggagaagcacctgaagatgctgcgggacatgaccggcctcccgcacaaccgaaagtgcttcgactgcgaccagcgcggccccacctacgttaacatgacggtcggctccttcgtgtgtacctcctgctccggcagcctgcgaggattaaatccaccacacaagggggaaaatctatctccatgacaacattcacacaacaggaaattgaattcttacaaaaacatggaaatgaagtctgtaaacagatttggctaggattatttgatgatagatcttcagcaattccagacttcagggatccacagaaagtgaaagagtttctacaagaaaagtatgaaaagaaaagatggtatgtcccgccagaacaagccaaagtcgtggcatcagttcatgcatctatttcagggtcctctgcagtagcacaagcagcacacctgaggtcaaaccactgaaatctcttttagggatnctgcaccaaccactgactaaaataaggcacacctagtcagtcccccagtggagtcggtctcagggcagaaagcagagaggagcaattggccctttaagtgatctcggtagaactcttcgtgctcagctcctcatcacagctaccgccatttgctaccttggccattcacagcatgcagctaaattctggaaatcgatttggcacctgagcgtttggcaagctagggtccaggaattttgagttccaccgaaggaattcccttttaaccctagtgccgattttggctgg

SEQ ID NO: 59545 - DNA, 512 bp, Homo Sapiens
  misc_feature (481)..(481): n is a, c, g, or t
  misc_feature (511)..(511): n is a, c, g, or t
ttagtctcttatgagctttattagtgttattccaatatttaggacatagtaggcactcaatatgtgaatgacaggttatacgaacaaactgaagtttatacttacgtttcaaggtttttgatattgccaaatggccccctaaaagtgatataccaactcatattctattcaccaaaatatgacaggatttccccacaactctgctaatagcaagatgtacattatttttattgtcagtcagcattgtttttatttgtattttttgtaaccaatggggttcaaggtgtttcatgttttgttggccatttgtatctttttgtgaatcgaaatttggtatgttttgcctatttttcagttggtcttttcttaccaattgaaacaaattcttcatatacttaagacattaaaaacactgtcatatggttgcaaatattttccattaccttctgctgtacaaaacttaaactatacaaaatttccnttggttttagctgtcataccttgccaatcnc

SEQ ID NO: 59546 - DNA, 468 bp, Homo Sapiens
cagaatattcaactttattttcctttgacaaacacgacataaataacacacatttattaaatacacagactagccatgacttgaatgccagcaaaagtctaacgtacttttcatacgctcttttattttttgtctccacagtattgaagaccagcctttaaaacatactagaagatatatttaaatacactgacgataactacccataaaactttacatagaggtgataaaagagacttttccatttaatcaagtatatagagatggatgctgaggaggagaggtgaagaacactatgcttttgatactgatctttacaatatggattaaagtgccaatgatttcagctccttctaggcacaccatgtaaaaagtacttacattcatttgttacaaacagatcaaaataatcagggcctattttaattggtttgcttaaacaggcttacactatttgtacaaaaacat

SEQ ID NO: 59547 - DNA, 1473 bp, Homo Sapiens
caggatacacaggataaaatctgaatagaacaaagacccaatttttaaaatgaaaccctctttctaactagaagaaaacatagatgaattattgtataatctgacagtgagaaaaactttcctaggactgaaaattcagaagcaataaaaagagaagtctatagaagaattttcagccagatggaatggctcatggctgtaatcccagcattttgggaggctgaggcagaaggactgcttgagaccaggaattcaaaaccaacctgggcaacctagtaggactggctctaccaaaaaaaaaaaaaaaaaaaaaattaagtacctggcctgggttccacctacttgggaggctgaggtaggaggactgtgagcccaggagtttgaggatgcagtaagccactgcactccagcctgggtgacagagaagaaaaaagatttttttggatagctgaaaatatttgcagcatttatcacagagggctaattgtagccctatatatgaagaattttaaactatgagaagaacccgaagaataggcaaaaggatgtgaacagacagttaacagaaaatagaatgcaaatggtctttaaacatacaaggatatgcataaaaagacaaatgcaaaataaaataaaataatggaaatacctttcttacctgtgagattggggaaaatccaagttaggcaatgcactctgttgagacaatagggaaacaggcactccaaaaattacaaatccctgtggatggtatttgttaactagcaaagttaaatgagtatatccttcaacctggcagacccagttctaagaatccatatgagatgcacttgcaagaatatgaaatagtatatgcacaaagatcttgattacagcactgtttctaatagctacagactggaagccagccaaatctccattgatagggaattgatggaaggaactagggtatatctatacaatgggatactacacagctgtagaaaggactgcgaactatttttgtagttctggtctggagaaatctccagaatataggaaatgaaaaatgtaaagcacagaagagaatgtatggtgtgctgtctgttgtataacgaagagacaaatggaaaaaatatgtatttgctttttttgtaaagcaatagaagaattagttataccaataactaataaaatgatctccttgttagtggtggtagggagctagacaaggatggcaactatttctgtatcttacataccttttattttgaggccctgtcaatgttttatataataaacattttttgaaaaggcaactcttaaaactaaaacaaacttaacagtctgtcaagttggtgatataaccccacagaagacttacttcaagtgacttgaaaacttagtattttgtctgtactttgctaatggaatatatcctacagaccaaacaaccacaaataaatcttaaactgcaaaaaaaaaaaaaaaaaa

SEQ ID NO: 59548 - DNA, 627 bp, Homo Sapiens
  misc_feature (144)..(144): n is a, c, g, or t
  misc_feature (495)..(495): n is a, c, g, or t
  misc_feature (611)..(611): n is a, c, g, or t
  misc_feature (625)..(625): n is a, c, g, or t
ctacttaggaggctgaggcaggagaattgcttgaacccgggaggcggaggttgcagtgagccaagaccacgctattgcattccagcctgggtgacaagagcaaaactctgtctcaaaaaaacaaaacaaaacaaacgagaaaanaactcagtagaacagagcctctagcctctgccaaattatctggcctcttgacttcccttcttccttccaaggttcatctccagccttagtaaacaagtcaccagttgctggatgtgacctgctcctctttgctttcaggtgtttgcatgtgttattcctaccgcttggaatactcttccacattttttggcctggtcaaggctgatctggccctcaggactcagttccaatagcactatctctgcagaggcttccttggtacttatttaagtgcctgtggttgtctcaactaggctgagactggaactatattccttaaacaggtattttagtaaatgactgcggaaggangaacatccatgagctggggtccatctatgtgctcctccgtccccagtgatgaatgtgtcttaaacagtggtcacacatacagtctctgagggccagcaccaatgccgaattcccanttttctctgtcagntc

SEQ ID NO: 59549 - DNA, 441 bp, Homo Sapiens
tttttttttcatcctttgtttctattcttttttttttaaatatatacgccacacttgataaacttactctttacatattttcattaaatccctaagtcagctaggttccttttaagggacctactattgcccactcaccagacacaatagaaatcattgtatctctgggatttcctcacccgtcaagaagagtctattgagttttacttcctgtgagttgtattataaaatcactttctttcattttatacaacagagctgcacttacaattttttgaaggtgcttttttcaaaccatacccatgtgagatagctttgagggactgtgatacacccttcccatgagaggcacgtttcctaattgagaattaccgactggatccagtaattatgttgactgactctttgtgccttttgattttacaagtctctactttagca

SEQ ID NO: 59550 - DNA, 499 bp, Homo Sapiens
ttttatgtaccaggtctttattttcttgatcattatgctctattagaaatccctggggtcagaaggtatcggggaaaagacagaatggaaaagaatgaagatgtggcagagggatgcaggatgcttggtggggagtcgggctgggggtgatggctaggggacattgtgctgaagcattggcctcttcggattgaacaccaaagagaatattatgtcatctgctacctcactctaaatctgatctggagagacaggccagaccacagagctcgaaggcattggatgtcctgccttgtcatttgttaggtgccaagctgtgagaaattagcaagataaagtttggctttgacaacagcagtgagtaacagagggatgggagtttggtgtaacctgtagcagcacatgactcacttgctttcctccattctggcccaccacccattaatactgcaggtgaagacagatttgctcttcctcctattactctcctgtcttggag

SEQ ID NO: 59551 - DNA, 1025 bp, Homo Sapiens
ggcgcttcgggagccgcggcttatggtgcagacatggccaagtccaagaaccacaccacacacaaccagtcccgaaaatggcacagaaatggtggaccccaagttcctgaggaacatgcgcttgccaagaagcacaacaaaaagggcctaaagaagatgcaggccaacaatgccaaggccatgagtgcacgtgccgaggctatcaaggccctcgtaaagcccaaggaggttaagcccaagatcccaaagggtgtcagccgcaagctcgatcgacttgcctacattgcccaccccaagcttgggaagcgtgctcgtgcccgtattgccaaggggctcaggctgtgccggccaaaggccaaggccaaggccaaggccaaggatcaaaccaaggcccaggctgcagccccagcttcagttccagctcaggctcccaaacgtacccaggcccctacaaaggcttcagagtagatatctctgccaacatgaggacagaaggactggtgcgaacccccaaccccgaccctgggctaccatctgcatggggctggggtcctcctgtgctatttgtacaaataaacctgaggcaggaaaaaaaaaaaaaaaacaaagaagaaaaaaaaacatcaaaaacccgcagagaaatcaaggacagcgctgcgaacacaaagggaaatagaagatcacaaggagacaaccgaaacaggacaaccacgcatcttatgacacagaggtagacacaccgccgatacccacaagagagcaataaaatcaacgacaccacgcggtaaacgcgaatactacaaacgcggaaaaaagacacgaacaagcaaacgaacatgaacaccgaaacaaaaggacaacaccacacagacacaactcaggagaacagcaaacaaacacacaacacaaaacacacaccacaacacccaaaacccgaagcaacaagacaagaaactacaaagaaaccacaaaaacgaatcaaaaagacaacaaacaacaacaaaacagcaagaaagcaaaaaaga

SEQ ID NO: 59552 - DNA, 502 bp, Homo Sapiens
tttttttttttattgagaaaagcacacacatttatttactgtaagttttacatgacaggaatcttcagaaatgaagacaaaaaagaaataggaaaacttgtgtatttttatgtacagtcttatgcagaagtataatcagaggacaaaaggacataatctaatggtaataaactgtggagaacttagcaagtcctatttgtccagattcttcttggtgtctctgtatctgtgaggataaagggtacctatggaatgaaggttttatgatctacttcagggaacagtcacttagggtttatggcctgcttcaggggagaaggggtaaggggaaggtatgagaaaccttgcttctgcagttttctcaaataacagggtgcaatattttggggttatgtgtcctgaatcccatcaacgttaagatggagagaccagcccaaatctttagttggattccagctaagtcttatacacctaagggacagaggagtagtcatatatatgc

SEQ ID NO: 59553 - DNA, 681 bp, Homo Sapiens
  misc_feature (571)..(571): n is a, c, g, or t
ccagctctgcctccaaatgcgacgtgtgctccctcacctggacagatgcacagacacgcacacgcatgcgccagcagcctctgctcaaagggcactcacctcagggagcaggctggccctgggataggtgaggcctctcgggagatccctgaggcccaccagctaccaagcaaacgagaaactagtccgcggcaagagaaccccttacggaaagtggcaggctgcacccgggcactcctggggactgacatgctcttagatttacttgcaaaagcaggtaccaagggtaccttctccagggctccctgtggcgtctgaagggggcagtggggccaccttgactgtgaaggccgtggcagaagccctgttcaccagggctgggcaggtctgcacagggcccgtggctgggtctcagggtcctctgaggtagtcaatgtctctcattaaggaaaaacaggatggacaagatcccttggcttgagagagaatgcctctcttaaggcacacggtccatgaggaagaaatcagtgaagtgtcctctgcattaacgtcactttcaaagaagctcccnggacatgagaaagagttctctgagcagagcacatacctggtccgaacttacaagtctccttatagcttctctacaatctctacgagatgcttcactgtgacccgggactt

SEQ ID NO: 59554 - DNA, 572 bp, Homo Sapiens
ttttttacttttgtgaataggatcaatcttttttccgccactgcattcttcaactggttatcactggggcatagaaaaacaattatcttagtatgttgattttgtttgaacaactttcaaattgttgaactcttattaggtctaacaatctgttgtacattctctggtttctttatacagacaattgaatcagtctcgttgctttctttccagttcttatgcctcatttctgaattactgagcatgggtctgccccagaatgttcccaccattaatggtaaggctgctaaatattcacccttaactatgtttgccaaaggtttgataaatagccctttactaagttattgagtggtcaaatttctcaaatacctctctgaatccaaaatgaatataatgctgttcttctacaatcatttcacgtgtacactgcaatgatagattttccgataaatttctgggaatacaccctacttggtcatgatgtatttctccccctttattttacctacgatgttgaaaattttagcttctgtattcctgagacagatctataatttcttctcatacta

SEQ ID NO: 59555 - DNA, 518 bp, Homo Sapiens
  misc_feature (49)..(49): n is a, c, g, or t
  misc_feature (378)..(378): n is a, c, g, or t
  misc_feature (401)..(401): n is a, c, g, or t
  misc_feature (481)..(481): n is a, c, g, or t
  misc_feature (486)..(486): n is a, c, g, or t
  misc_feature (505)..(505): n is a, c, g, or t
  misc_feature (514)..(514): n is a, c, g, or t
ttttttgatttaaaaatttttttattcaaatattaattttatcaaaccnaacaagaatctttgatgatactttgatgtaaaaaaatgtttcattcatgtgtttgcactttccatggtttaatttgtttagggtaaattttccaacctgaaatataaattatccctttgcttaatatactctttatttcttcagaaacaaaaaaaaggtaggaattagttcaaggatgtcaatttactgtttctagtactaaagtacggctaactatgtaatttatagcctttaagtgcaaattatggcatcagtcagtgggttcccacaacagacccaatcacactttcatactcaaaacacaggtatattcttttgcaaggtaaaantatataaatcaaggtttcaaggnaccatcttttcaggtgcccctcagggaataggtttactcaggtttggttggatactttctctcctgcccggtcttcaggncattnaaataccctctaactgggnggaggggcnaaat

SEQ ID NO: 59556 - DNA, 577 bp, Homo Sapiens
  misc_feature (368)..(368): n is a, c, g, or t
  misc_feature (383)..(383): n is a, c, g, or t
  misc_feature (448)..(448): n is a, c, g, or t
  misc_feature (469)..(469): n is a, c, g, or t
  misc_feature (477)..(477): n is a, c, g, or t
  misc_feature (505)..(505): n is a, c, g, or t
  misc_feature (515)..(515): n is a, c, g, or t
  misc_feature (527)..(527): n is a, c, g, or t
  misc_feature (533)..(533): n is a, c, g, or t
  misc_feature (563)..(563): n is a, c, g, or t
  misc_feature (570)..(570): n is a, c, g, or t
  misc_feature (575)..(575): n is a, c, g, or t
cgcaccggcggctcacaggtcgggtggtggggctggggttcttggccgccttgtatttctgcaggttctcaaagtggcccagggacttgcagtgggagagctgtgcccctgagttgctgtgatagaacttgtggcagatgcggcagatatagcccatcacgggcaccaggaagtccacaccatatgcagtattggggctgtaggtctccgagcccttccactcctctctggatatatctctggacctcacctgaaaacatgcaagtgtgggcctcggatctggcttccccttgacacctcccagacacaggtcgggggcctaagagaccaccaattgccctttgggacacacagaatccccctttganttccagggaagtaantgggtggcaattctcctgagcctttgcacatggtgaatcctgcctccccaaaagtgctcttcccnatctatacttttctagaatcntgttcaantaagccccctcctcaagaagcctcctgntcctaaaagngcaaaaattcangccagntgtgcccaaaaaaacatgggtcaattgaangaatccncatanag

SEQ ID NO: 59557 - DNA, 543 bp, Homo Sapiens
tttttttttttttttttgagaagttagtgcatatttttaaggtatcccaaattccatgacatcaaactaatatcaaccaatacttgggcaaatctccctttcccagttcaagaaccacatccccacaaaaaacgggaatcacaagagtcccagtccacagcctattttttcccttaaagttgtcgcgctcatctctccatgcccaaagatacagagcaaacctcatggagcaaacccattttcacagctgcataacattccactggttcaacccatcccctggtcatagaactttccactacaacaaacggggctacagatatccctagacatggaaccggtatgcacgtgttccagagacagaaccgctaggccacaggagacacatgtgtaacccatggcagacggccttccagaaaggctgcccagtttttattctggattactgttcctgatttgctgagagctgatctgggggaaggatgtttctggacagtttcagtgagattcgtgtgccctacaattcaccaggtgtgcgacgca

SEQ ID NO: 59558 - DNA, 524 bp, Homo Sapiens
aaagcatgggtagtagaatgtatgaattgatgggttctggtgcaaagatcagttaatttcagtcttaagactctaagagaaaagttggcttagagatctggtcaaatctggggccctgagggctaccttgggctcatggcagcacaaaagaaatctcactgacagaagtaggaagttgccctcacacgtgagggcagtaagccaatgaagccatctcatttcttaatgcagcaagaccaggtggtgcagtgctatgctgtccaatagggcggctgctaaccacatatggctaccgtgcccctgaattatggccagtgtgactgagaacatgaatccaaattaaatacaatttaacattcagctccccaactgcatcttaattttaaattaaaatgccttgttttaaattaattaaaattaaataaaatttaaaagttaattgcaaagcccagatactcaatgcagttactggaaagtccctaggtgtgtttgaaacaatctgggtattacaggaatctactttg

SEQ ID NO: 59559 - DNA, 4305 bp, Homo Sapiens
gtgtggaggtgtgtgtctgctgtgagctgcagcaccagtcgtccggctgcagcaacctcggggagacgctgaagctgaacccgctgcaggagaactgcaacgctgtgaggctgaccttgaaggatctcctcttcagcgtgtgtgccctcaacgtcctgtccactatcgtgtgtgcgctggccacagccatgtgctgtatgcagatggtctcctccgatgtcctgcagatgttccttccgcagaggtcacatcctgccaaccccacctgcgtgactcctcacggcaccgttctccaccagaccctggatttcgacgagttcatccccccactcccgcctccaccctattaccccccagagtacacctgcacaccgtccactgaggcccagaggggcctccacctggactttgctccgtctccattcggcactttgtatgacgtggccatcaatagccccggcctgctctatcctgctgagctcccccctccgtacgaggcggtggtgggccagccccctgccagccaggttacaagtataggtcagcaggtggccgagtccagctccggggacccaaacaccagtgctggcttcagcactccagtaccagctgacagcacaagcctcctggtgtccgagggcactgctacgccaggttccagcccatcccccgatggccctgtgggcgccccagcaccctccgaacctgcccttccccctggccgcgtgtctccagaggatcctggcatgggctcacaggtgcagccaggtcccgggcatgtgtcccgctccaccagcgaccccaccttgtgcacatctagcatggcaggcgatgcctcttcacacaggccgtcgtgtagccaggacctggaagcgggactgtctgaggctgtgcctgggagcgcttccatgtctcgctctgccacggctgcctgtcgggcccagctttcaccagcgggggacccagatacctggaaaactgaccaacggccaacaccagagcccttcccagcgacctccaaagagcggccacgctctttagtggacagcaaggcctatgcggacgccagggttttggtggccaagtttttggaacactcacactgtgccctccccaccgaggcacagcacatggtgggtgccatgcgcttggctgtcaccaacgaggagcgcctcgaggaggaggccgtcttcggcgctgatgttctggaccaggtatgaaggagccacatttctgaccgtggacaccaacgcctggcgccacagatgttcttggcagaagccatcatgcctgacaaagaggccttcaggcccagcttggcggaggataaatgtgggggggacacccaggatgatctgggggcggtgtgggcagggaactgttaccccctctctcgaggggagccgagcagtgtctctttggggattgcatttcctgcctagcccagtaattcggaaagatgactttcacgtccacagtgaactctctggttttatctggcgtgcagcaccttgaactgagcagtgttgcacaaatgtgaatacagcaacaggcgacacttacgtcacctaaagactcaaagtatctccaaaatcagggccttccaaagcaggagtctcccatcccccatttaacttagtgttcagtggacagagggtgacatcgagtcatgaaacattttctcatgtggctcgatggctctatcattaggcgttcatcacgctctggcctatttcctgtgaaaggaaataggtagtgttagcacagatggcagcctgggcccaactttctgtccacagggctattgtgcaaacaaatgtgcagtgcgggcctctgccatagcccggccccccccagggaacaggccggtgttgcgggggttggaggaacccaccatctcctgggccttgagctcggcctccctccgtggggtgccttccccccctcctcttgggccccctttctccaggctcccatcctgtccctggagcagttgtgtgatccgtaacaacaagtgccgattcccagctcctttgtgtctgagctcacttgattgagctcagcgggtcacagttctgcaggagagaggccggtttctctgagaagtagcccctcctgataaagcaggtccctttgacccagagctgacctttccccgggcatgcggcagcagacacacctgcgcaggaggatcataaaccacttacaaacccacgcgagaagggaagcagacacccaacgtgctgcttatggagaagcagacacgcccagcttggggacagcctggggaccttggactttcttagcccccatccccttgttttctggtggcatcagtggcagctgctcccaacaatggccgtggaacagcgccatccacgagaactttgtgcagtgatggaaatgcctgttcagggccactagcagccacagcccctgagctgcgttgggtgggccctgcggtgaacaaaacagcctagaggccaaggtctccccagagagcccatgagcctggcatgggggcacagggggaccagagggtgtcttccactcctgggtgccagggcagggggctcacgctgctgttccctcggctttgtggggcttgtccttgagctcccccaattccctaatgccactgtggccagtgtgctggggagcttctgtgtggctggaagctgggaagggggtgaggttccaatccaggtgcccagagccttcctccagtcctttatccctgccctgggggctgcggtgtgggactccttcagctgtggtcggctgaaaaggcttcgattgctttagagagctgaaaacacataagccaggccttttgatgacaacctgcacttttgcaggagagacgtactagagatgaatttttgagcactttattcagactataaaacaggaaatctctaattttcctcaagtgggggcttttgaattccctcaaggcaagtccctttgcaggtgaaattaattggtggattttcagaatggccgccctggagccgagcttcagccacgcctgacgccctggcctctgaatctccactgtctctgaggtgcgctggggccacaccgcaggggtttcacctgcttgggggggtccacactagggcttgggggttcacacagcattgtccctgggctgagcccttgggtgggctagagctgcagtcctcagacatggctgcaattccagcgaggccaagaccaccagccacccagtggactcggtctctggggtgttctcctcatgcagccggggcagaggcctactggaccccctcagcctgctgctcagcatccttcccttctctgcagcagggcccggtcccaatggccaatggggctgctgccccagcagtgcctccctgcgggcccctcacctgcaccccaccttcacccagctctgggtttgcgctggtggcagctctgttttgtggatacggaaactgtacccaacttgatgccgctgggctggaaccttctgccccttcgaaatgaggcagtcagggacggggtggggtgcccccatcagccccgctgctcagggccactcatggactctaggagggtccaggttctgggcttcctgggaaggtccccagaagagagaggtgctggtagactagggaatgtgctggcaacttgacccagcagctgtggtccccttggccccggctccacggtatccgggtaccagcagcaagagcccaggccccgggctgcacgtcagctcacagcccaggagaaagctggctgcttcccctccctatgcgtctttcccccgctccaatcatgctccctctgggatctgaaatgggccaactgtggctgctttgggggtgacacgctccttctccaactcagctgggccccgggcatcccctgccctcccctgagacccaaagggggttggcacctgctgtgacaccaccgttgaccccagcctgggggccacaaggttgctgagtggggagaacatggaccccaactctatggcaagcaagatcgcagaagggggagcatcatccgcaaggacttcaggtctcccttggctggagatgaggatccacattaaatgtttgtaacacaccaggccacagaaagctcgctacacacagatgcttctccccacccatgctgactctcagaggctgctaaggcagaatttataggaaattgttttcaagccaccagagacctgtctgtacaactggaaaggctgtatttatttaatgtacctcaaggtgttttaataatgatccgtgttttaataaaaagaagtatttctgg

SEQ ID NO: 59560 - DNA, 539 bp, Homo Sapiens
actcattatttgagatttttatttaaaaatcattcaaaggtgaaacacagcaacagcaatataatgaagtttaaagtccctgtcctcaatgaatgtacaatgcagttgggaacaaaaacaatgattattaaagtgctagttaagtcttatttttaaagagaccctatcttgtccaggatgcagtgctgtggctattcacagacgatcatatcacactccaccctcgaactcctgggctcaagctatcctaccacctcagcctcctgagtagctgggactgtacataggcatgcaccactgcacctggctcataagacttgataatttataaaataattctacagcctcttccttactcttcccctttatttattccaactggcatatgctcttttcctggtgagtgagtcgtctacagtgttttctggtggataatgcatcccgatcaaccagagaaaaaacagtgagaaaaatctgtgttctgttgcaatccctctgtgatttgtctaatacaatagatgtgggtgtacccctgcaga

SEQ ID NO: 59561 - DNA, 476 bp, Homo Sapiens
aggcagtggtggtggtggtgtggtggtgattaggtacagtgctttcaatgcagtcttgcagacagaaaaaaaatctttctcaaagcttacaaacatttcccccctactatttccacccttcctcaggccacatgaatttgtgtcacccagataataaagaagcagcatgtatgctcttaattaccagtcaaatataaatcaatactaccctaaattaatggctttctgcaagtctacattaagctgaggtctacatgttggcaaatcagggttttgacttttttttttatggaaagtttccaaccagttcctttccccctctttattaccagttaatttccaggggtttgtttttgcctttttgttgttgtttttgtttttgttgttgagatggactctctccctgttgcccagtggagtgcagtggcacaatctcagctcattgcaacctctgcctcccaggttcaagtgattca

SEQ ID NO: 59562 - DNA, 509 bp, Homo Sapiens
  misc_feature (328)..(328): n is a, c, g, or t
  misc_feature (484)..(484): n is a, c, g, or t
gatctggtcttagtataattacttacattttcaaattaaaaaaaaaaaaggaaaaccagtaacaaatcagccacggcagagaggggtactgggagttgatagaaaatttgtcctcagttgtaggttactcttaaagcagcttagattgcatgttttcttcagggtcattggaaaaggtggttaccgtcagtccaggaagtggggagccagctaattgtatccagatggaggtacagtggacgctttgagggaaggaggccctgaaacgtctctagcaagcaggctttggtaaacagaactgcagatactgatgagtgacagtccactngctatttgtgtcatgtaggcaggccagcctggggcagggttctcagcagtgatgggagggcaggggaagagatgtaaaggctttgagactgggttcccatcgctggaaaagaaggctctgtgcagctgaatgccttaaggttctctcaacccccanacccagagagagttccattggggat

SEQ ID NO: 59563 - DNA, 562 bp, Homo Sapiens
  misc_feature (57)..(57): n is a, c, g, or t
  misc_feature (251)..(251): n is a, c, g, or t
  misc_feature (275)..(275): n is a, c, g, or t
  misc_feature (383)..(383): n is a, c, g, or t
  misc_feature (441)..(441): n is a, c, g, or t
  misc_feature (474)..(474): n is a, c, g, or t
  misc_feature (498)..(498): n is a, c, g, or t
  misc_feature (503)..(503): n is a, c, g, or t
  misc_feature (526)..(526): n is a, c, g, or t
  misc_feature (542)..(542): n is a, c, g, or t
  misc_feature (544)..(544): n is a, c, g, or t
  misc_feature (555)..(555): n is a, c, g, or t
atagcacaatggttttattgacggcagaagaaaaattcttcctttcacttgtaaaangtatttgcttaatttaactcagtatttttttccattctttgtgtgagttgactgttttttccaccctaaaatctgttttttctttcttcaaataataatatccaccacagctacttattctgaaaaaaaagtggaaggtctgtcaacaggtttccaccagggtgtttcagtcactggctcgtttcttcacaaanagtctactttaaaaagaaatgaanaaaatgaaattgaagcctcaaattaacttttccatactttgtcaagatacatttctgctgaaacttatctgtaaatgtgaagtgtttgtataaatagatcttaactanaattttgggatactgctaatttgttaacaatcttataaagccatatgaaagaaaaaanccaatttttttgaaaataaatttttttttttanactttgtttaaattctctctgccnccgtnataccacttattgctggcggttnattcccgaatttgganancccaactgttnttttcgg

SEQ ID NO: 59564 - DNA, 509 bp, Homo Sapiens
ttttttttttttttttttttttcaacggggtcttcctgtagtgacccctgagttaaagtatttattttcacgctgcaactgctgatcactttacagagacatatcatgctgtagctctgcatggagctgaagacaaaagcaacatttttattaatgttataattattataattatctttaacaaagctattaaataacctgtacaaagcccaaaccggtcctagcgaaaacccgagcactgtttcaaatctcccaagttcctttctattcagttcagcagcatttcctatatacaaggccagcccagggtggtcccccgaaactgtaggtctccctgacggtgggaacggtttagagtttggaaccgccctggcgtacggcagagctcccaattacaatccaaatgccccagccccaaccctacctccccgctcctgggaactgggtccctatgtccgaaggcagcggaagttggaagcctggctccattttgggaggcaggcaacgga

SEQ ID NO: 59565 - DNA, 476 bp, Homo Sapiens
ttacaaagtagtatcttgtatttaaaagaacatgtgttaacaaagcatttaaccatcattatctacagtatatattaaacacaatttattacactctaagttatttaaacatgtgtatttaaaagttgacattactccaaaagaaggcacatgaaaaaaactcatagtttaaacattttcacataagtaaagatagaacagggtagaatgactccttaaaaaaaaaaatgaaataacaccaagttaatatctcatcatacacaaaagaaaaatacttgactattttaagaaatctggtattcgttagaaatgagtttcactgacttttctcaggatgtcattataaatcacagctagtttagaaaatcataagttgtaacaacatatccattacattcatatggataagagaaagataggaaagtggctatccactatctaaattactaatatattggatgaaataatctatatac

SEQ ID NO: 59566 - DNA, 518 bp, Homo Sapiens
  misc_feature (499)..(499): n is a, c, g, or t
cttgaggctcataagggctgttggcaaaatgttaaagcagacagtttgtcttggtatctttcaacacccctctaagtttgtgctcctgggatctcatgttgcccctcaggcccacctatggcaccccatccaagcctgatcttccatgatgcaattttagccaattttcttctctcacccatcctaccagtgtcactgatcccatttagatattaaatacagaatcagatgaatgaatcaactcacactgaattccacatacattactattaattaccccttaatcctaacatggagcatccgaccatataaaatgaagtgaaatattcaggccacatcaaaatagacattattgacctacaagggcaccagtcgcaatcagcttttcacaattcttaccttcttctttctaagaccaacaggttttgaaaagtaccaaaccttctcacaaagacatctatagtgaagaaaatattagcagcagggaatggacaccctntgagaaacttaaaatttaa

SEQ ID NO: 59567 - DNA, 510 bp, Homo Sapiens
tttttgcataacactgacatttttattagaattcatttgtaacaaatggaacttgtgtcagcaaagaactgattttcatacagacttctttcgccaccaatgtaacgaagtaagaaaataaaaagcacgcctttcattctgtaaaacatttacgcgtactactaattagaggtaattgtattttttaacaagccattttacaagttatttgttttaatttttcagtctatgcatccaaaacgagagcaaagaacacaactgttattatctttgtaaagacactccaagctgggatggcaaagccacataacggatggatagaatggatctgtagccttctgatctctgctggagtatcagggcacccataaacccaaaaggaaccaaaacccaaaaagaaaaacaaaaagggaattaaaaataaaaggacttaaagcaaaaccgaaaataaacaggaaagaaaaaaaatacgtgcattactgcagacttttttcccttcctgtttctatg

SEQ ID NO: 59568 - DNA, 497 bp, Homo Sapiens
ttttttttttttttttttttttttttttttttttttcagacttttggcttgtttgaaaccagtaactggaaaaagacactgccggacctgaggattgcacaactccgggaaagtcacctcattccactgataacaaaaccaagcgtcagcaggctttcaacagcccggaactcagctaaaatttgcagacctcaaaaccgccagcagcacgaggacagagtcggggaggtgtagctggacaacagctcatgaggcaaaaaagctgtgtcacaggtgtcagctgagcacaagccctgtctgaggccgtggtgactggcgacagccgggcagtggagggccttggaagctgaagggtggtcttggcatggactctggtccttggggtgcaggctcttgggtcccagttctgctcggggtggtcctgtgaagcactaaactcctagcgggtcatctgggaggttctagcagagctgaacagcccaagggtcatcagggct

SEQ ID NO: 59569 - DNA, 568 bp, Homo Sapiens
tttttttttttttttttgcacctattcaagtaatgtgttctttgcagcttgagaagcatcatacatattcacaccagtccttgagaaggaggtacgtccagcacacctccctctgtgaagggaaaggctcagagcatggtttgctattaagaaaattagcacgagcagtgaaaaaaaccctagaaaactgggcaacagacaaaatcctaattgtatttaccatatacatggccacaccctactatgctactgcaagatggtggccctcggccattcttctggctgccagcacagaccagagccctgggcctaggctctgtccctacctgcctccttggcagttacaccttggttctccatttgaaaactacaaactttagagcccaaaggaatgttagaaaccatttgcctcaatcccttcaatttatagcggaggtcaactggagatcataagcatgtaaggcaggggaaaaagaaacggaatgtcagtgagaatctgtggggacttctgtccatttcagaatggaaggtcttctgtgtttagttttgactctccctcgtgccgaat

SEQ ID NO: 59570 - DNA, 468 bp, Homo Sapiens
gagacggagtcttgctctgtcaccgggctggagtgcagcggcgcgacctcctgggttcaagtgattcttatgcctcagtctcccgagtagctgggattataggcatgcgtcaccatacccagctaatttttgtatttttagtggagacagggtttcaccatgttggccaggatggcctcgatctcctgacctcgtgatctgcctgccttggccttccaaaggtgctgggattataggcgtaagccaccacacccggccaggaatgacaatttcaatatatttactatctgttcttcattttattattatttagcttctgttaactcagtgttagctgaaacatcagaaagaaataaaacttatgagaagggtattagcaaatgtgtgaaaaagtcaagtactgtttatactccaaaaagtatttggagcctacaattcccccaaaagtcatactgagggtcatagttg

SEQ ID NO: 59571 - DNA, 2609 bp, Homo Sapiens
tacattgggtctactgcacaaattacagggctccaagtgtcttatgagagcaggacttgggctgaccatgtctctctgccctcacccatgctctgctctgatttcaggtcctaagtgtgaacgtgaagtccccagccctgctgctgagccagttgctgccctacatggagaacaggtatggcagggcgggggtggggaccagtcggagttggggacctgaggtgggcacagaaatacagtcggtagcacagccagtagtgggtagaggacagaagaggtctgggatctccacatccctcatcttcttgtcctgcctccccatctgtgtggctgccattcccaattccagtggctgcaggatgagagtagtattccaggggcccaggcatagcctccttggccttgacatcagcaggtttgggacaaggctatgctttaactccttgaccttgtgggctggtcattgtcaccttacctgctctctgttcttaccaacttaaaaccaatgacagggttagccccattcctctccataggaaaaagcctgtcccagacctctcctcatgcctgcgcttggtctccagggaccctgcctgtgttccaggtcctgcagatctgactgtacccctcacagacacacccttaggaactggccaggggctgtcttcagtagaaggaaagtccctgactgtcacttctggtctcccttaccccatctgctccttagaggttgctcattgataggcactcaccatcagccttgggtgcctcttcacaaagcccaccctgccctctccttcaagcccctggcaagagaggaagcagaagataagggttctgagcatggacatcgtatttatgagaaataggcatggaatcctagctctgccgtgtattggctggtactaaacctttctgagcctcagttttctgaactctgagatggggacagtaataggacctgtgttgcttctgtgagggttgcatcatttaatgaactcatgatagtgtcaccatcagtggtaagctcttagcttcagcttctcttatgtttgtcttgtctcaggaggggtgctgtcatcctggtctcttccattgcagcttataatccagtagtggtaagtgcttggtccttgtgctcctgagtggtatagggtgaggggcaactttgttcttttcctcagagccttacagacaaagtgcctgggacagacccccaccatcctcctgctgccctgggctgagcttgtctccatgtgggtgggagggctgctgggcctgtgagatccctgtaggtgagaaatccaactgatgctttcccccactctcccatatcctaatcactctgtcaattcccttcccaggcgctgggtgtctacaatgtcagcaagacagcgctgctgggtctcactagaacactggcattggagctggcccccaaggacatccgggtaaactgcgtggttccaggaactatcaaaactgacttcagcaaagtggtgaggattgggtgtgtcttccatctcccagtctggctcagtgggaacccttcccagtgaataagggatcaaggggtgactgaatccttaggtcagcatgcctatgactgaggtcctcattgttctctgaactcagccatggtgcagtccatccatcctgaaaagatgctccttcttttgagaagggcaaagctgccctaggtgttctgcctggtggccttcccggggccctgcccatcttgttttagtagcactgactccttcatttcttccctttgcccagtttcatgggaatgagtctctctggaagaacttcaaggaacatcatcagctgcagaggcaagtggggtttggagatttggtggtccatgtgtggctaggcaggggcagttgagtctattgcaagagcagacccctccctgtcatctggccattgtttttgctgaaatctggagtccacatggccctggagggtgcaagtagccctgctgcatccaccttgttccccatggagcccactcccacctgtcatccgtgagccccagagcagcagaatcagagtacgagatgcttgacactgtgtccttcttccatccaggattggggagtcagaggactgtgcaggaatcgtgtccttcctgtgctctccagatgccagctacgtcaacggggagaacattgcggtggcaggctactccactcggctctgagaggagtgggggcggctgcgtagctgtggtcccaggcccaggagcctgagggggtgtctaggtgatcatttggatctggaggcagagtctgccattctgccagactagcaatttgggggcttactcatgctaggcttgaggaagaagaaaaacgcttcggcattctccttaggacttatctgcttgtagatttggctgatccaattaacatgtggggttcttggtgtgggtctgaggagctgaaggattttatggagctggtgctttggaggaatcttaagggaaaggagtagaagctcaggcctttgaaggatttcagctcctcctctctgtaatttgtgctttaagcattttttttcctaaaataaactcaaatttatcctcaaaaaaaaaaaaaaaa

SEQ ID NO: 59572 - DNA, 400 bp, Homo Sapiens
tatggacaagaattcttagaataatttattctttgttaagcatcagactgaagttatattgttttgttatattgagtttttatatcaatatagggtgctgcaaagctgtgtacaataaaggtcaagggtagtgatttgctgacaacaattaggaaaagagaactatagaatgcacaggaacattttcagaaatgggttttattatatttcataggcaccactcactttacttttggtgggttttaatacttgaatcaaaataaaataatacatgagttaagtattaaaccaacagattaaaaccccaggcccccgagcccctcattttggttgtagctcttggtgtagatgctatggtgtgagggctgctttctttcaatggctggttgtcattcaggct

SEQ ID NO: 59573 - DNA, 541 bp, Homo Sapiens
tttttttttttttttttcctgacgtatacagatcatcctggacagtttatttctctaattctgttaatcaaagcagagatcagaacggattaactgtggcaacgtcgtatcaggagcacaaagagaagcctgcctctttcagtttggtcttttctccagcaaaacagaaatgcaatttagtcaaacacatacagaggccccactgtactgcctcactgatggagggaaatacttgggtgcaatcacacacagtgttagtgattggcaactgtccagtgctatttcgctaaaactggtaaaaacagtttccttgggcaagcagctgattggctacttcatactgtgctgagttgggctcagcttgtctgtctctgggaggccctaaggggctcctctttttcagctagggataaggggagactgtcaaccagtatcttagcgtgaactgtcaatcgctgagcccctgccaaggactctctggaagtccctcaggtatgctgaaaataccttatactgaaaaggtagctctcgctgcatccac

SEQ ID NO: 59574 - DNA, 1980 bp, Homo Sapiens
attccatggcggcgcggcggcgacggagcaccggcggcggcagggcgagagcattaaatgaaagcaaaagagttaataatggcaacacggctccagaagactcttcccctgccaagaaaactcgtagatgccagagacaggagtcgaaaaagatgcctgtggctggaggaaaagctaataaggacaggacagaagacaagcaagatggtatgccaggaaggtcatgggccagcaaaagggtctctgaatctgtgaaggccttgctgttaaagggcaaagctcctgtggacccagagtgtacagccaaggtggggaaggctcatgtgtattgtgaaggaaatgatgtctatgatgtcatgctaaatcagaccaatctccagttcaacaacaacaagtactatctgattcagctattagaagatgatgcccagaggaacttcagtgtttggatgagatggggccgagttgggaaaatgggacagcacagcctggtggcttgttcaggcaatctcaacaaggccaaggaaatctttcagaagaaattccttgacaaaacgaaaaacaattgggaagatcgagaaaagtttgagaaggtgcctggaaaatatgatatgctacagatggactatgccaccaatactcaggatgaagaggaaacaaagaaagaggaatctcttaaatctcccttgaagccagagtcacagctagatcttcgggtacaggagttaataaagctgatctgtaatgttcaggccatggaagaaatgatgatggaaatgaagtataataccaagaaagccccacttgggaagctgacagtggcacaaatcaaggcaggttaccagtctcttaagaagattgaggattgtattcgggctggccagcatggacgagctctcatggaagcatgcaatgaattctacaccaggattccgcatgactttggactccgtactcctccactaatccggacacagaaggaactgtcagaaaaaatacaattactagaggctttgggagacattgaaattgctattaagctggtgaaaacagagctacaaagcccagaacacccattggaccaacactatagaaacctacattgtgccttgcgcccccttgaccatgaaagttatgagttcaaagtgatttcccagtacctacaatctacccatgctcccacacacagcgactataccatgaccttgctggatttgtttgaagtggagaaggatggtgagaaagaagccttcagagaggaccttcataacaggatgcttctatggcatggttccaggatgagtaactgggtgggaatcttgagccatgggcttcgaattgccccacctgaagctcccatcacaggttacatgtttgggaaaggaatctactttgctgacatgtcttccaagagtgccaattactgctttgcctctcgcctaaagcatacaggactgctgctcttatcagaggtagctctaggtcagtgtaatgaactactagaggccaatcctaaggccgaaggattgcttcaaggtaaacatagcaccaaggggctgggcaagatggctcccagttctgcccacttcgtcaccctgtaagtactcagaaccaggaggactagaagactccttttggccagataagactacgttctctattgcagcttctgaaccagagactgatgttgacacactttttttccatttggcaggaatgggagtacagtgccattaggaccagcaagtgacacaggaattctgaatccagatggttataccctcaactacaatgaatatattgtatataaccccaaccaggtccgtatgcggtaccttttaaaggttcagtttaatttccttcagctgtggtgaatgttgatcttaaataaaccagagatctgatcttcaagcaagaaaataagcagtgttgtacttgtgaattttgtgatattttatgtaataaaaactgtacaggtct

SEQ ID NO: 59575 - DNA, 718 bp, Homo Sapiens
  misc_feature (684)..(684): n is a, c, g, or t
  misc_feature (689)..(689): n is a, c, g, or t
tttgcattttttctacatttattgcaacggctaaatggttaacaacattcacaacttcttagatcttaaaaaaaaaaaaaaaaagaaaacttccattttgtaacatcacaaatgtcttctaggctttatcaaggaccaaaaacactacaattctctaagtgatttccagtgatggaaacaagccagagacagtaaagcacccagagtggcgagagagcacttccagatgcctgttgtcctctcgggggtgaccctggaacaaaccgtacttgggcactggctccaggccgatccagggcagggatgatgttttaagggcaattgctgcttcaaggcttatctttcacatcagtggttttgatctatttgttggcccgcttgtgtctgtacatctgcatcatcctctgtcggaacacatcgaatgtgtcttctttgtgctcctgcccgtcagcacccaacccttccccttccgagggggttcccacgctgaccggctccctgatgccctttccgagggagcccaggccatggccctccttccagcccatcttctgcagcatctggaagcccagttcttatcgtcagcttctgctgggcgaagtccaaagtccttggtttcttctttttgacatgggacgaccccgaggcctgtcataggcaattcgaactggttcatggactttnggctnctgatgagacacactctcttgggagctgg

SEQ ID NO: 59576 - DNA, 1747 bp, Homo Sapiens
atcatagcaaccaaacaatgaattgagacctggaggtcttgggttgtaatttaaattcacataaaccaggccttttgtgcctattgcctaattcatggcataattattattagccgccttaggataaaaggaatacagactttatcccatacatgaaattatcagactttcactcattttaatagctagaatcttattttctttccttaagatgtatattttcttttaatgaccaggctctatgtgctgctgtagtgaaaccggatgttctagaaacaatggctttgctgttcagtggagcagatgtcatgtgtgccaccggagaccccgtgcatagcaccccctatctgctagccaagaaagctgggcaaagtctgcaaatggaatttctctaccataacaaattctcagatttccctcaacatgatattcattccgagggtgtattaagtcaagagtcttcccagtccacattcctctgtgactttttatatcaagctccttctgctgcttctaaactctcttcagagaaaaaactgcttgaagagacaaataaaaaatggtgtgttttggaaggaggcttcttgagttactatgaaaatgataagtctaccacacctaatggcaccattaatatcaatgaagttatctgcctggctatacacaaagaggacttctatttaaatactgggcccatctttatctttgagatctacttaccctccgaacgtgtgtttttatttggagctgaaacatcttttttccccagtctcataaggaagagagaaaagtcagaaaataatatttaaattgtgtaactagcttattattttcatactaaaaagtaatcactgatagtttttctataggtatgagatcaagggaatcatttttagaaatcattttcattgtaaaaagtatattagatgtcttttgccaaattttatctagttagtaattataaacagtatcagtcttattttcctattgtttatgaacaatataaagacctcttaatagtgatctaaaagttttctattgtcactgggttaccttcagaatttctaggcctgttagatttatttttgtcgttagcatttaaagttttgctctgtattagaaaatagaaaacttagaaaaacaggtagtggcagttcatcacttcccccacttttatttccaagtcattatctagtttctcaatgtggcattgcaactctgattttttactgttcgtgcactaaagcatttgagataagcccttagtgttgaggaaatcctaaatcctactgctggggggttaaaagaaatatagtgacaggctatgaaatagtgttgtcataacttatcagtggctagtaaatagggtagttgccttctgacaccattttgagtgaaggcagtttaattgcgttgcctctgtttagataagcatttggaatccacagtcaaatgtgtgaatgctgtggttaaagtatttccattatatgagatttgatttcttaagtgatttttttgtctcaggttccattctacatcaaaaggtatttggaaaatgtctttcactgtatgtgtacacggagaaccttaacctataattgtatgtaaatctagtgattgtgaaaaacaagaaacttgcagacacatattaacagttggtgacttatcgccagttggtgacttacttacctacccctgcctctcaaatcttgttataacaattaaacagttcgtattaagactttgt

SEQ ID NO: 59577 - DNA, 481 bp, Homo Sapiens
gatgcaattttccattaattatacgtgcacacaaggaaggtggggccaggactactacttttaactttgcagaaagcttcatttttactgtgggttgtggttaagttaaaaacatttgactatgccatgtaggcgactccaacacttcaggaatacaaagctctgaaaagaggttatgtagcaaagctcattttcattcacattgataataggtcagacacatttttgaagaaaaaaatggacagagcgtaaaggataacagagtacacattttcattttctatgatgaaaaggaattttaaaaattgtctgttgtacataaaaactttttttttaaaccaaacaacctagaattaaatggagtaaaatgtgagaagccccccttttttcctccttcagcagacaaaaccgctgtcaatagcttgatatgtgttatcacagactcttttctagggtgcaccacgcatatatgctacgtata

SEQ ID NO: 59578 - DNA, 600 bp, Homo Sapiens
gcagggggacggagtctccctctgttgcccaggctggattccgtctcaaaaaaaaaaattattaggaaaccactccctctcctgccctgagttcatactgggggaaaaaaaaatagaatgaggctaacgtggccgaaaaactacacaaatagagtcaggaaggtttctcagcctcagattcctagaagcagaaagagggcactcccacaggtgtttcgtattgcagtgtcctctgaaacaccaaatgcagagaattgtgaaaaccactgatgaaactgtcttaagaaacgtcactgaggccttcccatgaatgggtgcctttcattctttttaattgcctagatcttaactcctcctaccaccttcagtaactgggccaggaactgatgttgcaaaaacactctgcaaccaacaccattatcgaattccaggacattttcataacccgccaaagacaaacaaacaaacaaaaaactgtgtacccattagcagtcgaggaattgattttaaagatcaaacagaggtgcttgattcatgagttgtcttttaagaagtgagtagcccttatgtgggaaattctgaatcctggcaaacaacgct

SEQ ID NO: 59579 - DNA, 2475 bp, Homo Sapiens
gaagatggcggactcggtggctagccgatgaggaggccgcggggggaacccggcccccgggccccgagaccgactgagggagcgacctgcgcagggcccggggagtcatgtaggggtggcgcctgcggggagggctgcgggagggcagcgggagctggtgttagcggcagcggccacggtctcctggcgtccctgggccggggtgggtgttggggcccccgacttcgccgactccgcgccatcgcaaagcggtgcactcgggctccacgcgcgccctgcaaggtgggcgctgcgttttcatttcacgggtgaggagacttagagagacgaagccacttgtccaaggtcacgccgctggtgagtgggagcgcccagcatggaacccagcaccgtccagccgcggagcccgcgttccaccctctgtgccgccgccgcctcctgtgggagagggaggtggtcgggagagtgcacgccggtgccgcctgggctccagactgggcgcgaccactaacccggttaatgacctcgggcttaacttaaccccttcgctgctctgggcctgcgtttctccaccggtgaaatgagggtctccatcacccaactccatgcttcgagtcctgctctctgctcagacctcccctgctcggctgtctggcctgctgctgatccctccagtacagccctgctgtttggggcccagcaaatggggggaccggcctgttggaggaggccccagtgcaggtcctgcgcaaggactgcagcggcttctggaacaggcgaagagccctggggagctgctgcgctggctgggccagaaccccagcaaggtgcgcgcccaccactactcggtggcgcttcgtcgtctgggccagctcttggggtctcggccacggccccctcctgtggagcaggtcacactgcaggacttgagtcagctcatcatccgaaactgcccctcctttgacattcacaccatccacgtgtgtctgcaccttgcagtcttacttggtggtacagaagttggtcctgccctttgggcgactgaactacctgcccctggaacagcagtttatgccctgccttgagaggatcctggctcgggaagcaggggtggcacccctggctacagtcaacatcttgatgtcactgtgccaactgcggtgcctgcccttcagagccctgcactttgttttttcccctggcttcatcaactacatcagtggtacgcagccaggatggctggctgggcccctgagggctggagaggcaggggagcagggtggcctgcagcccagagccccagtccccgcctccccacaggcactcctcatgctctgattgtgcgtcgctacctctccctgctggacacggccgtggagctggagctcccaggataccggggtccccgccttccccgaaggcagcaagtgcccatctttccccagcctctcatcaccgaccgtgcccgctgcaagtacaggtggatggggcagcctggggcaaggggaggggccagcctgggaccagcagagtggaaaagccagagggaccatgaagcgccaaagctaaggagctctcggccaccataaaactgggccctgaagcagcagagggctttgcccagggtggtggcactagactgggacagattaggatgaggtgccgggcccttcctgctactggtgtcctttctcctcagtcacaaggacatagtagctgaggggttgcgccagctgctgggggaggagaaataccgccaggacctgactgtgcctccaggctactgcacaggtgagcaaggggcaggcggcaggcccggggagacggagccctggctaaggccgccggccctgctcccctccagacttcctgctgtgcgccagcagctctggtgctgtgcttcccgtgaggacccaggaccccttcctgccatacccaccaaggtcctgcccacagggccaggctgcctctagcgccactactcgagaccctgcccagaggtaaaggaggcagggtgggggagccctggccaccttgcccgccatgccctgagccacgtccctccccctgcagggtggtgctggtgttgcgggaacgctggcatttctgccgggacggccgggtgctgctgggctcgagggccctgagggagcggcacctaggcctgatgggctaccagctcctgccggtgagtggccctggcctggcccgtggcgcatcctcactcccagcctgcgggtaacctgccgccctctcctctccccacagctacccttcgaggaactggagtcccagagaggcctgccccagctcaagagctacctgaggcagaagctccaggccctgggcctgcgctgggggcctgaagggggctgaggggttgatgtggggttcaggatggcccccccatggggggtggatgatttgcactttggttccctgtgttttgatttctcattaaagttcctttccttc

SEQ ID NO: 59580 - DNA, 477 bp, Homo Sapiens
tttgaagacacatgatgtaatattttaatgtaatatttaaaaaaaatcaaattggtatctctggtccacgtcccagctgcctattttgtaaatacagttttattaaaactggggctgggattagggttagacaagccaggtggggtcatccaagtacagggccagacttgtttttattaaaaagtttgatattttatcatggatttcttttctttaccttttctttcttttctttttttttcatgaaccttatttgttcaactattttatttttatttttattttattattttttttttagctcttttgatttgggccaaatctttcctcacctattgactaatctctggcatctcactggatctcaaacctccacctgcctattaaagtccccaccacaggtcctaatttaagctcttgccagacagttccaccttgctgtgaatgcagaaatgagatcaagtcccactcagaaga

SEQ ID NO: 59581 - DNA, 658 bp, Homo Sapiens
tttttttttttttttctagtttctgggcaaatgaaatcacattagtccagattttattcactcaaaactactagggaagcagtaggatttggtttaaatgctgccaaaaagcaggaattcacttaagttttaactcaaaagcaatcctgttgttaatgttgtagccaggttcgggcagcatggagggtggggcccccattgtgcttgctgaggaatcccggatctctcccagttcaggctcactttcgctagaggtagacccactgttgatggtatagacgctctctgcaactccctgagctgaagcacagccatccggctcgttcttctcccttggactcgacagtcctgggaggacagccatctttccagtctgcctatttggcagcaaggacatggtatagtctgcaatgatcccacccacatctaagttgcatgcctggtcaaaggctaggaagccaacattagcatttgcctcacacaccacaaaggagccatcgtccatgataaggagatcaatgccacagaagtccatgccttagatgttggacacctgaatagccaactgctggccttgttctgcagcggacacttgacgcccacgcccaccgaagagacagttgctcttcatccgttcctcagtggagcagcgaagcat

SEQ ID NO: 59582 - DNA, 732 bp, Homo Sapiens
  misc_feature (570)..(570): n is a, c, g, or t
  misc_feature (599)..(599): n is a, c, g, or t
  misc_feature (601)..(601): n is a, c, g, or t
  misc_feature (624)..(624): n is a, c, g, or t
tttttttttagtttgtatatgtaactgcattatcctaccttaatggccttatcaactgaatatgaaacttctttattttaatgcattttaaaagtaaccctttttttaggtttggttaattcacttttgaaatgcagttcctatgaaatacccagactatttataaaatcctatgcaatgaataacttgtagctaaaatgaaatattttatgtgaagtttttaataacttttaagtagtagcttggttttcatttttccaactaaaacttggaagtgcataaaaaactaagagagtatataaataatgtaaatagagtatcttagttacatggagggaattaatctgttcacctatattatgtaatatggagtttatcatgaacagagtttaacagtctcagtctgagttactctgttaaacttcttttcctaaaaatatcagaaataattacacaaacgggtacagtccagctgtctttgatctctcggttctctacaaggataaactttatagtttttcttctaacataaaggtctccaaacaacagtgtggaagaaataataagtancaaataagatacgaaacattatggcttgntntattataaaacgataatctccgntttaaggtcgcgttactcttaggagggctctattcatgggctctatacgactgtacaagggtggcatcaaggcacgtggatgccagagagcagtccgactctggcggg

SEQ ID NO: 59583 - DNA, 421 bp, Homo Sapiens
cttaaactcttcatggattcttgaaattctctcatgttcctgtcggctttccgaatgatgtggcaatctgctcatcactgcatccagctcatcaaacttcctcaggacagcctgaacttctgcagacagctctttgtactctgaaaactcggtcttggaacacagctttatagcgttctcgctcatcatctgtctgaatcacagggtattttgccacatagtcgggcatcacgataggtttaggaatgtggcctggggggatgtgtccactcagtaagttcaggtttcatttttgctgttctcagttccttgaaattaacttctgagtctctttgtctgtcaccactggtgggccatttcacacattttccttttccgatgacaatggatggctcatttatctcctggttgttccatatat

SEQ ID NO: 59584 - DNA, 553 bp, Homo Sapiens
aatgcatatcctctttatttggctttttaaaatcactgtttattccatttggtagagggttttatttttttccatacaaatatttgaacaattttgaattccccaaaaccatacatagacgataaataccatgctattaaagtattaaatttgtacaaaaatactttacagtttaatacttgtttgttacaaataaaaatacatatttaagtgactcatgatctttttttcttttttcttaacatgatcctgctttatactttcttgccctggcggttctgaaatgtgattgaaataatattttttttgcacaaaaagaaaggtgattttttatatttccttaaacaaaggacacagtgttcgaatactttgcctaagtggtagtttgaattattgaccaaaatgaaaatgtttggaaaataatcatttcaatatggagagtctaccatcaatatacagatctatttatttttttatgttcaccaaataataacagttattagtgtagctattcaaaatatctgaacaaatgaaaacagttgctgacaaacat

SEQ ID NO: 59585 - DNA, 1318 bp, Homo Sapiens
ggctggctcccaggcctcagggtggggatggcagtgggaatgaagcacctgtaactgggcccttcctgccctaatgttcagggggccctacccctcgtgagcttgtcttattaagaaccctcaaaaggcctaagttaaccagcaggtccaaaggtcccaaggaacaaggtcagagacgccagggaaaagaggtgagctgtgcaggactagcactgggaaaactggcaatttgtgttgtcaagtgtgtgcctgtgcaagtgctccaactgctgctttgggtgaacttcaggccttgcctcttccctatcaccatcgtctccatcaacaccctctttcttttccagcctctcctggtgccttaggaatcagacgccaataaaccacagagcccagcatgtccaccttcgcttttattgagtagttagtgttctcaagctggctcacacccatgcggtcagctggggcctagggtggctctttgcaaagctgaggggcaagctaaggaagccaggcaggtcaggggccctttcggccttctcaagcctccacctgagttctcgtcaatgccagtctccctggtatgattggggacattatcagagaaacatctaatagcgcacatctgggcacccacactctgcttcagttgcatccatcctcccaccccaaattcaactcctgacccaatacaaaagacttttttaaccaggatttcttcttgcaggaaagctgacttggaaacacggggaggtggcagggaggggcaaaaaggactctggcaagcagatccacttgtctgggtccctgcagtgaagaacccaagatccaggtacctcagcctggaagaaaccgtgcactgcaggtcttcccttctatcaaaactaaaagcaaggaacagaagtcaattgaaaccccaggtcatcctacccaccttctggcagtctctggataatgatctaaggaaataagcttacatttataattagaggataatttggagaatttatactatttacacggaccaccctgcaaagatcagggaaggctggatttcttcctccttgatagtctgaactggaagcaaaggagaaaacccttctccaaacaggagtttctcctctttccctggtcctgcagaagaaagaggagctatcccctcctcagctagcagcacctgaaagggaaacagagataaggtgaaccaacggtcaccagacaggacgcacaaaaatatcacatacgggttctgatcctctttgtgtcgttttgaagtcttaaaatctattaaatatgagaatacgaaaaaaaaaaaaaaaaa

SEQ ID NO: 59586 - DNA, 517 bp, Homo Sapiens
atattcacgaagctttattgcagctgtttcccttacccagttgaagtggccagtcattttaatttgcagttctatttacattcccaaggtaaccacgttcagtaactctctagaggctaagctgttaaaatttccatttttatacaaatagcaaagatatttctttccctttctttctttctttctttctttctttctttctttctttctttctttctttctttcttttctttctctctttccttccttccttccaactatccttccttcctttcaaactttttgtttgagacagagtttcgctcttgaccccgaggctggagtgcagtggcccggaacttggcccaatggaaacctctgcctcccggattcaagcgattctcctgcctcagcctcccgagtagctgaggcaggagggtcgcccgagcccaggaaagttcgagtccaagctgggcaacagagcaaaaccttgtctcttaaaaaagaaaaaaaatagagttcagaatagataaaagag

SEQ ID NO: 59587 - DNA, 504 bp, Homo Sapiens
aggcttagcctgaggtaagttaactgaatcacaggctgcagcagaaatactatttaaaatgtcacatagaaaattcaatttacactttgctttgccttttagtatctggatggcagatgacaggggttatgtggccaaattggtctttcccacctggcagcagctctcttgacacccacatcccttgttcgtcttcaaaagttcctcactgcctcagcgactatctcagccttcatgaacaaagtgctatgctgctataagtagttagaataaatgtgatttcagcttcatcgggtcctatcctttcaccttccttgtagctggtgtatgtcccacagtgcagccataaactatgaagcccagaagtatatgacttccactgaaactcaacatgccacacacaggtgcttgtgggcacagaagaagaaaggacaaatgtctgagcctcgggacttgcagcctctgcccttgctcctgacctccgtgttttgcccagatcagcag

SEQ ID NO: 59588 - DNA, 694 bp, Homo Sapiens
  misc_feature (441)..(441): n is a, c, g, or t
  misc_feature (600)..(600): n is a, c, g, or t
taataaagtatatcagtgacaacttcctgtttaaatatattgttaaaaaatcatgcaagagcattttgttatcattatgaggaaagatttgagactactgttccttctgcagaaacgctatgcacagatgcaaaatgatcaaaggctgatacaataatgaatctcaagtaagtagcggagccatcatgtgcctgtatgggaaaaaaatcaatataaatgcttttagcagtgctagttaactgttaacaagcagttagcaaaagaaacagcttgatgcaagagtaatattctaaatatataacaacacataaggccagctacatataatagttgtggtacatatcagctaaataccagccttgatttgatgaaaaaatagcactgggagctaaaaactgcactctcattttttggtaggacagggtctcaccgtgttgccangcttgtcttgactagcttaaagctagtctcccaaagtgtgggggcggcagaataacctgaggtgggaggttgggaacaagcttacccacaccggagaaaccccggttcacattaaataccaaattaagctggcctggttggaccccactgtgaatccanttccttggaaagtctggggcggaaattcgtggaaccccgaaggaagaattgcagtgaccagaattgaccctttgcttccaacttgggaaaagaa

SEQ ID NO: 59589 - DNA, 407 bp, Homo Sapiens
ttttttttttttttttttttttatattcttttagattttattcaacccaattaggtctgaggactgaatcacactgaaaccattaacttcatttgaaactcaaaacatttttgaaatcagatgaaggccaagttctccaacctctcttaggaacataagttaaattgaacaagggacttttaaaaatgaaataaaaacaaaattaaataaaaatgaaataaatagataatgattttggaaattcatactagaattaagtttagtctaattatattttaatatgaaacaatgaaggttttctgcctccttgccaacctagaaaaattgacaaaaataagaatacctaaaagtatacatggttcttagcataaccacaaaattattatagtgacagattaaataaggtt

SEQ ID NO: 59590 - DNA, 464 bp, Homo Sapiens
tgttggctttgcgttaggatgctctgatctgacatttgacatgaacacaaagttgctagatgctcttgttgacttccagcagatgggatgggggaaacacagcagttcttggtaaagtcctttgtaataatagtttgatttttttatttcgagagaatctttcattttcctatgtatgcttttttccttttttgcccagtttccttatcacttgctgtagatggcttattttgcattcatgcagactatgttgcaagtctgtttcatctagtaaactgaaaattattgcttaatcaaactgccgtttgtcttttatatttaaggccttccccccccttccttatgagttctaacttagtaatttcaaatgtgaccttttatatctaagaccagtatagtaaacttagcccacagtggcaaataatgagtaatattgtaatatgttccagttgcacctcagtatg

SEQ ID NO: 59591 - DNA, 380 bp, Homo Sapiens
tttgcttttccccttgcctgtttcccatctgctttttctccaaggtaaagctggactgatttcagtggatgagaatacagtgataagcaaatctttaaatgttaccctaaataggctcttaaaatagaatgtagcttggaaagatataagttaactgcctgcaagttagtggccttctactctccagtggtggtgtataaacccctgaaaattcaaatataatcctaaaagcagaaagactgacatttaggggaggggaaaggatggataaaaagaacaatactcaacctaccagcctccaaagagaagtcatgcaattgtgaatacatgtcaaccaactgttattaatattccagccaaatcacactgaaaataaaaaa

SEQ ID NO: 59592 - DNA, 651 bp, Homo Sapiens
agatagtcactgggggttgtcaggatctctctccagcttatagcattcccttgagggagcagggatcaacacccatctcccacccccttccccactgtccagtcctcttggtagtaccagggctactgtagacccaggtggagatgttggcaccagcactcatcaggtactgcacatctagactggcctcaatcccggcccggccccggccactgttgtccaaccacacgggctactgatgcctgatgtgcaaagttgccaccgaagaggcgcatgaactgagccaggtctgagtcatggaaatactgctccaggaactgggcacaggcttggctgttattgctggtgccagagcccacgtcttgtgaggtcaagttgtatcgcttacggatcacagagggggttaccccagatgcaggcctacagtccctgtcacctgcggctcaggacgttgcctcagggatgatgttgggggaaaacgtgcagtcccccacaaagtcacatgggggggcaaggctgttgaaagctggtaggatgtggggaccttacacatgggttttcgtagtcctccacatagtgatgaaatcagcccagggagcagagtctgcttgtcggatgtcagcagcaagtcagaagtctgtgtgatcaaga

SEQ ID NO: 59593 - DNA, 425 bp, Homo Sapiens
  misc_feature (413)..(413): n is a, c, g, or t
ttcaaagcctcactgggcaatttacttttattgatgaaattcagagtttatgtttcaaatctaagtatttcctcttgaaagtaacttaatcaaaagcagttgataatagcaggttaattaccttgagtctttgcactggaaaaactggctgggtcaccccattacacaaccatctattatgattatatgatgactcattatcacgaagacaatcttgtgccatttaaatcagcaggattccatttcttcaccagagaactatctctaaatacacacacgcatgctcacacacttctgagtttccctttgtttatttttgcagccaacaaagtatgttttcgaggttaacaacgaagcacaggatagtacaagtggaagatcattaacatgactggataggaacctcttttaantttcctttcttg

SEQ ID NO: 59594 - DNA, 506 bp, Homo Sapiens
  misc_feature (379)..(379): n is a, c, g, or t
caataaattgctacaaataaggttctaaaatcaatacataaggcaaaattggcttttaaacattccttacactgcccacacacttgaatacacctacacaacacagtgaaggggcactggggagaaggactggctgagggcccagcaatcacttcccgtctcaggctgggtccaggtcagcacccagggaatgggaggggtctggattgtctgtgcctttaaaaacttttgttttgtttttaatcctcagttgaatttgttcgctttatgcatccctgatctcacatcaccatatacccaaacactgatacaattaatagatggtggtaatttttattcccttctctgcaatttcagcatattctttttctttttggtncttttttttttttttttttttttttttttttgagacagggtcttgcccaggctggagtgcagtggcacgaacagcttattgtagcctccgtaaggctgtagcttcaatctcccaggctcaagcaatc

SEQ ID NO: 59595 - DNA, 478 bp, Homo Sapiens
ttttttttttttttttttcatttttttctttttacttgaaaacttgttttaaccatcaaattttggcagttacaaacctgtacactgttgtgtttttttttgttgttgttgtttcttttttttggctgtctttttttttgtttgcttttgtttttttttttcttttcttttctttttttttagaaaaagaacacaagactgaatactgccaccagcaatatatgcaggaacaatccatttccttaagggacaaaatccactctaagtgttagctttcccctttgcataaggtttggtgtgtgatgtgtgtgcaagttgaggtgaatgtgcatgtatatgaagcaatgacatacctcattgtgattctgaaattgcataaaaataaaatacttaataactgggcaaaacacattcttttttacaaatgtcaataaagacaacttttcttgaaaacagagaaagttaaatgaaaacagta

SEQ ID NO: 59596 - DNA, 448 bp, Homo Sapiens
tttttttttttttttggctcagaacttaaaacaagtttattaattttgctacaacactagatgtagtacatttaatatgctgctttgttgcagaaattaatcagcaccagtttatggtttaaattatacagtaccataatgtaaattaaaatatgtgcatatctttttggttgtattaaaaataaacaaaaacagaagttaaattaatgtcacctggttcattttcaccacttcttggaaggagatgaaatgattatcatatgttgcttaagtttattgttagcaaatagatgctatgtttttgttaaagaccaaacaatcagaagattctgaaaagctagacactattgagctggactgacgcccctggacacagtgggccttttcctgaggtggtattgaaagttgggggagaaaagctgggtacattcaggtctttcttgacgct

SEQ ID NO: 59597 - DNA, 568 bp, Homo Sapiens
gggttaaatgatttcttatttattttaaaatatgataattatggcatgagtcccaacagtgagaggatgtatctgtaagttactccacacttttcaattaacatgaacattttttagtaggcatatatctcaatacttggataatcacttttgttttgcttgtgtttcttaggaacaaaggagaaacaggctagccagagaattaccttcagctgtatcacgagacaaggtaaaaaaatgtttttaatgcatattcccaatacctaaagatagattgatgagctcagaatattactcagtcctaggagtaattttttcttcttttcctccctttaacactccattggaactaactgagtaaaggcatacaagtttaaaatgggttttgagtgatttaaagataatagtattttgaattcgtgacataaatgctaaaagtagatttaagctttatttaaggctttaagctcaagctttttaaaaaaattcagtcagtgactttatccactttgccctagctgaaatgactcctgggggagtagaaataaggggttctgggaaaaccgtt

SEQ ID NO: 59598 - DNA, 532 bp, Homo Sapiens
tttttttttttttttttggctacagggcactttattctgagttgattaaatgatatttgaaaaaggtttacaaattgtgcatgccgttccagacacacactgccatgttcttctgtgttaatagctggccatgaatagtattattccatcatttccacctaattcagtgagttttctaaagtaacactgaatgtctgcttgaagactaaagtttagattttggttttattttcaaaacacttgaaatgtgttacatgtgatttttttatgtataaacatgattcattttcttttttcaactttatttttaaaaacctccataacatcccagacagatctgagatgtcaaatagtctcattttcatggcctcgttccttgaaactttttttcatactagagtgcttactctatggacttagagcatgttgtcagagagagagtatggcccttgaattcagaaacacctcttttgcaaccaactttgccttttacttgttatcttgggcaaatttcttaacctctctgggtctg

SEQ ID NO: 59599 - DNA, 641 bp, Homo Sapiens
  misc_feature (198)..(198): n is a, c, g, or t
atgtagctcttattatagtatattgttacaactgttctattacattattagttgttgttcatctcttactccgcctaatttagaaattaaacatcataggtatgtatgtataggaaaaacataatatgtatatagggtttggtactatccatggtttcaatcatccactgggaggggggggtcctggaactactgtanatagttccaagtgggggataaagatgagaggggactactgtaaagaacttaacataaaactacaactgtaaaccttcatgtggcaaattcttgttcaactacacaatacaaacatttatcaggtatcaaaaacttcaaatgcagaaggtaagacaatattgtatatggctaaacaatgaccaaaaaccactctcatattcctctctccaaatttgaatttaaaatgctttaagagatatttaaagcaagtttagttattgtccaattatgcaaataaaacaggtaataaaggaggatccaaaactattccttcacctatacatcccaaaccagaagtaaccagaagtggatgatatccagtggaatttgggcataagagaaagctacataggaaataatgttgacctcatttctcccattagctcctgatacatcctcctgct

SEQ ID NO: 59600 - DNA, 2401 bp, Homo Sapiens
gtccttgactacccaagtgagaagtcagcagagcctggggacgccatgtgcctgcagaactacattcctgcccacagtttaaccctctcctgcccagtgtgccgccagacctccatcctgcccgagaaaggggtggccgcgctccagaacaatttcttcatcacaaacctgatggacgtgctgcagcgaactccaggcagcaacgctgaggagtcttccatcctggagacagtcactgctgtggctgcgggaaagcctctctcttgcccaaaccacgatgggaatgtaagtggctgggatggcagatactgcccgggagcatgactactgtggccttggggaggctttgggtacatcagagattacagattgaaacagaactccatgtggaaaaatcagtaattaaaaaagatttttaccagccctcagactacctgctcactttctttgaccagaactatttaaataacgaaatcaatctccactgtgtctccttcacacatattgttggtatccccaggacagcaaaccagtagctatttgcaagctgacctacataaacatctgtgtaataaatttatggatacggatttaacaatggataagttctgtaagttgagaatgattattaaaatgttaattagagttctttatttttcttgggagggaaattttctcatgctacattagaccttattccttattaatagatagaatttgaagctatgtgaatccctgatagtagattatagattatgaattccaaacatatttcttgctactagtgagtacaataactgttagaagctcaggaggacctgtgggtaccatcaagtaactgattcacaatagctatgtaacctgaagaggcagcattgtgtagcgtctaaggacattggctttggagtcaggctgcctgattcaaatcctgctcttaaacttattccctgtgccagctttggtaagtttattaaactctctgcgtctcatttctttatcagttaaaaaaaagtaataatagtatttaccatatagaatattggaagaattaaatgttcaagtcatgtaaatcatatagtaggatcttgataaatgtcagctttaacattttttcattaattactttatattcatctcatttgtatattggtcacttcaaaagtatttgaaactgcttaaaacaaaaggcccaggtataacaaaaccactaagacaagcaagcaatcattagagcaaagcaattcttattagccacactactgtttgtttacctcatctcccagcattctctctgcacactgtgctggagcctcaccagcctcctagaacctgccaaatggtttccctcctcggggcctggctgttctgttccttctgcctgggttgctctttgtttcctctttatgtggcgagcttattctcttccttgaagtctcactgcaaatttctcctgcacacagcagtcttctccacctgtaccgtctaacacaggttgcctcttacagctggttaccctccatcatgtccctgctttctttcctccctggtgctcactgtggtctgcttgccatcagctgtgtatttgtgtacttattagtcctggctttccctctagaatgtgagctctgggagggcaaggacctgtcattagacccctagcactgagggcagtgtcttatacatagaagtcaataaatatttgttgaacaaatttgccagacaccgtatttggctccttaaacccccctctgcaaagtagttgttggttactttcactttataagatgaagaaactgaggctgaaacagtttaagtcacaaagcttgctgggcacattgtaaaagctagccctggaagaaatagcatcctgagctttctggtagccaaaacaagagaaggacaccatggcttacacatctgtaataatttaattgaaagcacaccaggctattaatagctatcagttttccatgcattttatgccaagggaaattgatcatctaaattttgtaaaaagaacttttaaatgctgcttttgaaagcaggttgagtattttcctcatgaccacttctcacactggtgcttagtgaatgctgaggctgtctatgcctggagcttgcactctaaatactagttatgggaaggtatttctatcaggtgtaagagtgccccttaaaatgaggctctctggagacgtgacttgatagaggagtaaagtcttagaaacattaggttgttttattttttatgggttttttagtttttgtttttgtttctgagacagagtctcaatctgtcatccaggctggagttcagtgagccatgattgcgcctctgcgctccaacccaggtgacagagcaagactctatctcaaaaaaaaaaaaaaaaaaaaaaaaaaa

SEQ ID NO: 59601 - DNA, 754 bp, Homo Sapiens
actaatatagagattttatttaaactgtattgaatttttacagcacattgcatgtttgtcacaacgcaactgcacagtttggatttttggccacatcatgtcacttacacccacaacagctctgaaaggagtatttgatgaacacatctgagccaagagcccagagtctctctccaaggccatgcagtttgttcactgatgggacagtccctcaaaacagccacgctaagtagacagatacatggctatatcactgtatcttttggttaagtgccactggtacatattaagatgaaaaaaaacaaaaacaaaaacaaaaaaacaaaataaaattttttaaaaaccaacaacgtttggtccaaatggacacatgttctttcccaattttggtatcaaggctttattctcttctgtttgggttccattgttaagtgcacagaaatagacagcagcatttgtactgaaaccctcacataccaaacagcatatgctaggaggtaaaaaccaaacgctaaattctaccctcaaggtgtcaagtgttcaggataagaagcaatgtgacccagaggaggcatcagccaagggaaagacaacatgggggaaatgggcaatggaacaacaacaacgaaaaccttttgttttattttcatgccaggagaggatcaagggtgtagctcctgtgttagcaccaggacaactaggaaaagtcaggtgcaaaagagtaggggcacaatcagcagatattttcacaagg

SEQ ID NO: 59602 - DNA, 821 bp, Homo Sapiens
  misc_feature (411)..(411): n is a, c, g, or t
  misc_feature (586)..(586): n is a, c, g, or t
  misc_feature (652)..(652): n is a, c, g, or t
  misc_feature (658)..(658): n is a, c, g, or t
  misc_feature (687)..(687): n is a, c, g, or t
  misc_feature (742)..(742): n is a, c, g, or t
  misc_feature (748)..(748): n is a, c, g, or t
attttaaggtatctttaaatataaattgaaccccagaggcagaaaagtcatctacccaacaccggcacattttaaacatgattaggatttgtaggtcaaaatcccgtaacaaaaaagggaagtttttggttgtttccaaaacaaggaaagcatgttaaacagaatcttgtgacttaaacttcactcaagtgagcttaaaactggcataattttgataccaaaagtaagctgaataaccaatacaaaaaacagaactaactggagtttttctcccccaaaacatagtcccaaatccaaaacaacttatataagggatgcaagtaacagaaaaagtcaaataaaacaacagtggttcctgaatttaaaggaaggatgcccacttctctctctctcaagaggcagatggtcagnttttcttatcctttgcctttcttggtttgctgggccccagattgctgggcctgggactgtagtaactgagccgctgctttcttcttctggaagttgttcacctcctcctcaagctccttcttcttgtcttccactttcttcttttcttcttggtgtgtccgctttagaaggtcanacttctcgtgaagctctttctctgcctccttaagttcagcttctttctccttcactctcataacanacattngtctcatttctttctctttctttctgagntctccccagaattcattcctttttgcttcatatgtctcctgaagactggaaggtntgctgncaggggtagtgtccttgaaacccatctcttcaagctttacagcgtcgtccaattcataggggccggtgtgagc

SEQ ID NO: 59603 - DNA, 576 bp, Homo Sapiens
tgagacagagtctcactctgtcgcccaggctggagtgcagtggccaatctcggctcactgcaacctccgcctcccgggtccaggcaattctcccgccacagcctcccgagtagcggggattacaggcgtgcacatgccaccacgcccagctaattttgtactcccagcagagacgggacctctccatattggtcaggctggtctcaaactcccgacctcaagtgatccacccacatcggcctcacaaagtgctgggattacaggcatgagccaccatgcccagcatttctaaataattttgtggaatgtaagacatgtaaatataaagaagaccaaaaattagaagaggtcagagtaatgaaatttcattggaaacctttcctcaatgaatacacagtcattgcaaaaacaacacctcaacctttactgaaagtgaaagttagcaaaaactagtgaatcaattccatcctgctattaaaaaggccagattcattgtcaaagggataaattctgggtcttacattctttttccaccatgctcttttttaaataactttttcctaaatatggtagatc

SEQ ID NO: 59604 - DNA, 577 bp, Homo Sapiens
  misc_feature (570)..(570): n is a, c, g, or t
ttttttttttgaggccctgtctcaaaataataataataataatcctccatcttatcaaaaataagaacttattttcaagaatcaaaaaaaaaaataaaaaatacaagacggagaaactgccccttctgcaactgccacccccctctagctacagcttgtcagaaccactggagggcttttatttttcaccccaaatttgctcatctctccttccatccaccctgtccactgaaagtaaacccctgttacttattgatggacattttccctcttccttaggtgtgctgggacaggcacaagcctggaaatcaccagactagagtgtgagacaaatctgaggaaaacactgaaatcacataaggtttagatgaaattgaactatgataaaaattataaacaaatttacatcttaggtcattaacgaacctttatataatgtcttgttcagtagctatgtaacgtttattttatattgaaagcatctatcacacttttgtatctccagatgatctaattcagtgctatgcacacacagacacccataaatgctcagtttgtaatttgagtcanataaaat

SEQ ID NO: 59605 - DNA, 711 bp, Homo Sapiens
  misc_feature (486)..(486): n is a, c, g, or t
  misc_feature (636)..(637): n is a, c, g, or t
  misc_feature (663)..(664): n is a, c, g, or t
  misc_feature (675)..(675): n is a, c, g, or t
  misc_feature (684)..(684): n is a, c, g, or t
ttttgaaggttgaagcagtattatttttattatccaaggcaagaccagtgaaacacaaagccccttaaacattatttctgcagaattccaagaacacaggagaaactagtaaattgtataggattaataaagaatatggattgacagaagaacaatcataaaacattcatattggcattcttggcaggcacagctctactccatggccatgtggattatcagaggtctcgagttccactctctgacaggaatcaggctagattatggtaataaggaggcctgaaggtcttatcagcaaccccccatcgaggtgggaagatgacaaaatcagcaatggccactccagggcggacagacttagcagtcaatactgtgaaaatggatgggtctgcatggtcaaaggccactgagttgataaccatgaaattcttcaggttgtacttgtagggtgtataattcccgtgccaggccacaacattgaacggngagacatcctgtttggcagcaaacagcttgccctggtatttattaatgaccgtgtaaccacctggtacttggcgatcctcataccaggcaatgggtatcaagaaatcacgaggattggccaagccattggccccattggtccaaggtcanngtactcaagttgacaccatagacctnncagatgtagcnccctgtctnctcaaagacatctatgctgaaccgcat

SEQ ID NO: 59606 - DNA, 542 bp, Homo Sapiens
tttttttttaatttgtattgctatttattaaaatattaatatttacataatttattgatataatattcaattgtttgataggtaattaatacattccgactcacccagcaagaacatttttgtggtgacaaggtaaagagtaggatgacaattggatgacccaaaacttagacctcagtaagtgaaaaacgtgttgttatcaatgctcctaacttgtatcattatctaacaagattttccaggcagtggcagctttagaatcctatcttctctcagtttccttttcctagtagctgccagttaggatgccaaccatccctgattttatgtaggatgatgatagccaggggacaatgaggaagactcacagaaatctaggactaaatataagaattttaaaaatgggagatttttatggtaaagaatgtgaggtttgtagttttttaatctccacaggagaaatgaacaaatgattccatgtaagaacactggaagatactaaattccaccttgatattttccaggaatgtcagtcacatcct

SEQ ID NO: 59607 - DNA, 515 bp, Homo Sapiens
aattcataaattttaattttattttcagtaaacaacaatgttcaacttttatgcaccaaagtaatacagagtcacgcagcaataaaatcgtgtttatttagtgatatgacaagtagagaaatcaaacataatattttacaaaatgtacaatttatatttttataaatactttaaaagagagaagcggaacacgtgtggtggcattaaaagaatgtctagatttaattttgcagcctaccttgtagcctgacaaaccagatacatgtatgtatacacatatatcttgatcatgagttttcataattatggcccaaggataagttttgggcatgtctacaataattccaaactctcataaaatgtgtggtctctcaccaccagtcatgttgattttgctctatttttctcaaaattccacaaaatgcacatttgaaacagctatcagaggatgtaagcaagtgctttgggcctcagtttactcatcagttagatgagagaatccctgctaatatgct

SEQ ID NO: 59608 - DNA, 468 bp, Homo Sapiens
ttttttttattttcatatatgtatatatttattatgtcacaaatagctacatactggataagccagaaagatgaggaaacatgtttgcatctcacactagtgcagagattctgaaaaagaccccacttggaataccaaaccacacattagattgttctgttcccaattgtgtgccaaagtgcactctgaactgttttggtaaagccgaccgtggagtcatatgaggctgaataacttgggagaatgtaagtctgcaaaataaacctaggactggattgatcctcaggccacttggcaggtgaatgtctcgggagtgaatatgagacaagcttcctgaaaaggcttatatgacttaaagaactttttgtttaagtgtttggtcccaaataaactattaagatatataaagtaattcactgctcaaaaattaccgtcagataaatattaagggaagaaacactttaaagg

SEQ ID NO: 59609 - DNA, 458 bp, Homo Sapiens
tttttttttttttttttttttttttttttttttcagatttgaaaaggaatttttatttcatttggttgtgtctttctctgtcaaggatttgtgaaattgctggctgggcctgtgagcctgttagagaaccttgttagccatagctccttccacctgaggcagtggagccatcctctccatgtgcttttagggttctggtcggggaaccctaaaaacaatagggtcaaggagccagaattggtctcagaccagcctccccatcttactagtctgaccaaccctaagccagatacagtattttactagactttttcctggtgggaaaggaagacaccagggcttggcccttgagccagagggaaccgcgaaggggcccaccactggaatgggggcaggtcagctcgcctcccctgctgccatctcagtccccagcaagtcaggtcactcctcttcacccg

SEQ ID NO: 59610 - DNA, 487 bp, Homo Sapiens
ttttttttcattttaaaatacctttattgatgtattattgcactctacatcaaaactccaacagggcttttcttctagttttttcacgtatagaccgaatgttgggcatttaaatgttagtggtgtatatgccagacattttaaaacaaatactttgcagcaaatggctaataattctaagtgttctgttatggagacggtttaaaaaaaaaatcacaaaggctacttttgcattgagatttccatagtaacatttgcagtaggttggatttggtcattacatcttgcagtaacattatctactagggttatgtatccagggaaaggatcccaaaggctcagtgtgacaccacgtatcatatgcttggcaacacaaaataactaaacgaaactggcttgatagctacatgccatatgatactaataggcaaaatccttaaagttgctagtgccttttgtcactcacttagtaaatacttttgatcaa

SEQ ID NO: 59611 - DNA, 611 bp, Homo Sapiens
  misc_feature (522)..(522): n is a, c, g, or t
  misc_feature (533)..(533): n is a, c, g, or t
  misc_feature (560)..(560): n is a, c, g, or t
gtgcagacctccctgatcagtgttacatataatggataaaacaccactgtggaaaaatataatatgcttatctataaaatataaccctagcgtttttaattttgagaaatcgacacagattttgactgaatatatgtttggatttgcccaggccaaacatgcatatgatgcaaccccaccctacatttatgtggcacgaagggaaagtatgatgaaaggagacgaagaaagggattggaggccacagcccagtgccagtaacacagcagggttagggggtgtgatggatgcctagggtatctgcttgcttcctctgcagaggatcaaacctattgtggaggatgtggctcaggcagcacatcatgactgaaaatggggaagactcagggtccactcagagccattagaccagtcccgaactttccccaatactgtttaaaaaaaaaaaaaaaaaaaatcagccgtcctgaaaacgacactaaattctcttccccctcaagcctaattcttcaacaggacttncccccctgaanggaggaaaacctgaactgactcgttanattctctccacaaaggctcctggcattagggctgctagcattgaccgccaa

SEQ ID NO: 59612 - DNA, 514 bp, Homo Sapiens
tttaacttatcacagtggcaaaccctttaaaaatgctttggctgataaggggaggtgggtactcaccactgctggtgggaatgtaaactgataaaaaacctttgtggagagcaatgtgagtactattaaaatttaaatatacaaaccattcagcccagcgattcaatttttagaaatttatcttaaaaatacattcacatattctttgcaataggctctaaaaaatgagaaattacctaaatatccatccatacagcggtatttcacagagcaattaaaaaggagacagctctaaacgtatgacacaaaatgctctaagatatatgatccaagtgaaaactgtagggtacaaaactctgtgtgaaatacactagcatacagtaatatgcttatatatgctcgataactctggaagtttacagaagacaccagtcacagcgattgacgctggggaaggcaactgcacagatggggaatagaggtttcttttttgctcacgcatcttttttctatg

SEQ ID NO: 59613 - DNA, 512 bp, Homo Sapiens
tcagtaatatatggattttacttatgtttgtatataagttttattatgaccataaaaataatcctgtagtcaacaacaatttaattgtacatttaaaaataactaaaactgtagaattgaattatttgtaatacaaagaataaatgctagaggtaatggagaccgcatttagtctaatgcgattgttatatattgtgtgtccgtatcaaaatatgccacatatggcataatatgtacacatattaggtatccacaaaaattaagtcaaatacatttaaatgagaaaataaaaataaaaatttagcctatgggaacaatattctttaacttaatggcaattaaaactcactggcaaaaaaaatcactagagatgtcagtccattatcttaccaaatagtgtatttttaccatcttttacctacacccttgagtaaggtggaataggttaaagttactggcataataacacttcattgaattcatgatagtatttaacatgttaaaactgtttg

SEQ ID NO: 59614 - DNA, 444 bp, Homo Sapiens
tccttaaagtagagctccataggttattccaacacaccctataagaaagaggactggtaggttaaagccaaaaatggggacaccctagaggacatctttgggagaataatctacctaggccaagaccccactatctgagcattccacgcctataagatgaccctcttctctcctagatcagtgcttcttaaccatggaccacagctctatgttagaatcctctgggaacttaaacatatcccaacaaattaggtttagtaacatcccagaccactaaaaccagaatttctggtaatgggacacaggctttggtatctattaaagctcccagtgacatcaaataatagccaaggttgagaattaatgtgctagattgacacaggtgtttgaactggttggacttctgagctaaccgattcactcctaagcatttggaattaagac

SEQ ID NO: 59615 - DNA, 530 bp, Homo Sapiens
tttttttttttttttttagattctgtaattttattactgacatcatctttacttgaatagcacaagttgcatagaacttaacaatgtttggaaaagcagaaaaaattactagaaatgtaaagaggcagtttcctgttttatttagtccagattaataacggttaagttgccatgtttcttccagaaaaagctttttcacttttttctcagcaagtcagagtttacagaaatcatctcatagatatactttattattccagcttaatccatctgaaaaaaattcaatgctttttgacaccaattgttacactatgcattcatttaggaaaaaacaatatcacagtaataaaaagattcttatattttatgctagtattaaaaatcacagcagctaatattgtcccatatacaagaatcgacatatattttccggttgagtttctcatccgtaaaaaacagtttgaaaggcctgaatggaagaaaacaaacaagcaaacaaaaacaattcaattcaattggatccgctccta

SEQ ID NO: 59616 - DNA, 549 bp, Homo Sapiens
gagattttaattaatttttataaaatctgagctggctgaacttcagagtacagcgacagctcaaggaagggtgggatttatctgctggtccccacctccccaagacggggagacgatggggcgactgatattgctgttggtggtcatggcattcagctcccacctgatatcatgaggcaaacaggactggtctaggttatactgaatcacggccagtttgcacagagtcttcagactagggctaaagtccaaaatgtgtaagtcagaatgatctataaggtcaaattcatctcccaggccttcctcaggagatggactggtacccccaaagaggacaatcttgtcaccaacaatacagcagcactggcgccggcggggacatggccccttccccttcggttcaatctttttccaggtaaaggacacaggattaaacttccagaggtcatggaagtgccggttcagccttgcattataaccaccaaagatgtacagctccccattgtagccaaaggccgagtggctccggcgcccctcaggcagcactgg

SEQ ID NO: 59617 - DNA, 380 bp, Homo Sapiens
gcctactactactaatttcccccccggtcgactttttttttttttttaatgagcaaaactagggtatctaggggctgtacatgtggtagataaactatgaagaaacactataaaagtcaggatagtgtttgcttttgtggaaggaagttgtaattaggacaaaacacctggatggacttctgggatggctggaaagaactacttctcaacttgggcggggttgcacaagagttaagcctataagagttcattaagctatacatttattttatgtggttttcaatatctgtgttttacaataaaaagatttttcttaaaaagttatagaatccccattgcctacaaaataaaacccaagatactaagcatagaataaaggc

SEQ ID NO: 59618 - DNA, 401 bp, Homo Sapiens
tttttttttttcacatatttgaatttgttttattttcatccttccttgttatacaaatgtttctattttaaaagcatatagaaatttacaaaatttgcaagaaatatctttttaaatgtacaacttcaacaactaataaaaatatgaacatccagatacagttaagtttcaagtcgggatttttttttttatgatgggtttatgaaaaattaaagaaatactttcttaagtttcaaacatctgggtactggtgctatcaaagtgatttcactgccctcagtggccaccgtgataacagttgactctcggattgctgtacctcatatgtcaacaccgcagacagaggcaggaagtggcatgttcagtgattttgctaattatacttacgtagatgcagctgt

SEQ ID NO: 59619 - DNA, 509 bp, Homo Sapiens
  misc_feature (106)..(106): n is a, c, g, or t
  misc_feature (116)..(117): n is a, c, g, or t
  misc_feature (130)..(130): n is a, c, g, or t
  misc_feature (142)..(142): n is a, c, g, or t
  misc_feature (159)..(159): n is a, c, g, or t
  misc_feature (178)..(178): n is a, c, g, or t
taatttttaaaatgtatatattacttatatattaacattaagcattaatactgttcaataatagaatatgaagaaaaatacatatagtggtatttgggattataantcttacacanngaatagtgacaangagacatatganaagggcaaggtgtatcnaaagctagatgacaataangactgcaaataagatgaatttattcaacactatgtacaaagtttaaggccgtggtctaatccatgcatcataattggatgagtgatatccatcgatcattagcccgatactgaacattactccaaaataattagtaggaacaaagatgtctgatgttaataaaacaagactctttttcttccataggtttaatccacatggctatagattgttaagttttacttttccaaaacagaaagccttgaagagactccaaaccctattttaaaacaagaaaactgatgatgatgatgatactgatgatgatgatacagcaaataaagctaaaatt

SEQ ID NO: 59620 - DNA, 508 bp, Homo Sapiens
  misc_feature (11)..(11): n is a, c, g, or t
  misc_feature (341)..(341): n is a, c, g, or t
  misc_feature (449)..(449): n is a, c, g, or t
ttttttccttntgttttaatttacataaaattttattaaaactatattatagtttaatgtgtaattaatgtaaaacattaataactttatgtttcacttaaggtaaattcttaaaaacctttcatagtagttaagtgtacaccactatggatgtgtataaactgtgtccattgtgtggacttgtgatcatcatttttaaaaagacctacatgcataaagatatacagaatgaggttgaaacttactttggtcaccataaccaccacaaagtttttctcatcaattttatattctttgagagcaggtatcatcattgagggattttgcctaatacattaggnggaaaaaaaaatcatttagggcataatctttctcttacacttcaggttaaaaccaactttctactcggaaataggaatatttcgggaaatatttaaaatatggaatcncccaccataaattatccggttaatacttttccccagggaaaacccaatccatccggggt

SEQ ID NO: 59621 - DNA, 5406 bp, Homo Sapiens
gaccagatcagcccccagagcagcctcatggctggaggatccaagagaggttagatccgtctgtctgtctgctaccttcttcaccttatctctgcagaagcccaggttgctcttgttctctccttctgtggttcatctgggggtccccctatcggtgggggtgcagctccaggatgtgccccgaggacaggtagtgaaaggatcagtgttcctgagaaacccatctcgtaataatgtcccctgctccccaaaggtggacttcacccttagctcagaaagagacttcgcactcctcagtctccaggtgcccttgaaagatgcgaagagctgtggcctccatcaactcctcagaggccctgaggtccagctggtggcccattcgccatggctaaaggactctctgtccagaacgacaaacatccagggtatcaacctgctcttctcctctcgccgggggcacctctttttgcagacggaccagcccatttacaaccctggccagcgggttcggtaccgggtctttgctctggatcagaagatgcgcccgagcactgacaccatcacagtcatggtggagaactctcacggcctccgcgtgcggaagaaggaggtgtacatgccctcgtccatcttccaggatgactttgtgatcccagacatctcagagccagggacctggaagatctcagcccgattctcagatggcctggaatccaacagcagcacccagtttgaggtgaagaaatatgtccttcccaactttgaggtgaagatcacccctggaaagccctacatcctgacggtgccaggccatcttgatgaaatgcagttagacatccaggccaggtacatctatgggaagccagtgcagggggtggcatatgtgcgctttgggctcctagatgaggatggtaagaagactttctttcgggggctggagagtcagaccaagctggtgaatggacagagccacatttccctctcaaaggcagagttccaggacgccctggagaagctgaatatgggcattactgacctccaggggctgcgcctctacgttgctgcagccatcattgagtctccaggtggggagatggaggaggcagagctcacatcctggtattttgtgtcatctcccttctccttggatcttagcaagaccaagcgacaccttgtgcctggggcccccttcctgctgcaggccttggtccgtgagatgtcaggctccccagcttctggcattcctgtcaaagtttctgccacggtgtcttctcctgggtctgttcctgaagcccaggacattcagcaaaacacagacgggagcggccaagtcagcattccaataattatccctcagaccatctcagagctgcagctctcagtatctgcaggctccccacatccagcgatagccaggctcactgtggcagccccaccttcaggaggccccgggtttctgtctattgagcggccggattctcgacctcctcgtgttggggacactctgaacctgaacttgcgagccgtgggcagtggggccaccttttctcattactactacatgatcctatcccgagggcagatcgtgttcatgaatcgagagcccaagaggaccctgacctcggtctcggtgtttgtggaccatcacctggcaccctccttctactttgtggccttctactaccatggagaccacccagtggccaactccctgcgagtggatgtccaggctggggcctgcgagggcaagctggagctcagcgtggacggtgccaagcagtaccggaacggggagtccgtgaagctccacttagaaaccgactccctagccctggtggcgctgggagccttggacacagctctgtatgctgcaggcagcaagtcccacaagcccctcaacatgggcaaggtctttgaagctatgaacagctatgacctcggctgtggtcctgggggtggggacagtgcccttcaggtgttccaggcagcgggcctggccttttctgatggagaccagtggaccttatccagaaagagactaagctgtcccaaggagaagacaacccggaaaaagagaaacgtgaacttccaaaaggcgattaatgagaaattgggtcagtatgcttccccgacagccaagcgctgctgccaggatggggtgacacgtctgcccatgatgcgttcctgcgagcagcgggcagcccgcgtgcagcagccggactgccgggagcccttcctgtcctgctgccaatttgctgagagtctgcgcaagaagagcagggacaagggccaggcgggcctccaacgagccctggagatcctgcaggaggaggacctgattgatgaggatgacattcccgtgcgcagcttcttcccagagaactggctctggagagtggaaacagtggaccgctttcaaatattgacactgtggctccccgactctctgaccacgtgggagatccatggcctgagcctgtccaaaaccaaaggcctatgtgtggccaccccagtccagctccgggtgttccgcgagttccacctgcacctccgcctgcccatgtctgtccgccgctttgagcagctggagctgcggcctgtcctctataactacctggataaaaacctgactgtgagcgtccacgtgtccccagtggaggggctgtgcctggctgggggcggagggctggcccagcaggtgctggtgcctgcgggctctgcccggcctgttgccttctctgtggtgcccacggcagccgccgctgtgtctctgaaggtggtggctcgagggtccttcgaattccctgtgggagatgcggtgtccaaggttctgcagattgagaaggaaggggccatccatagagaggagctggtctatgaactcaaccccttggaccaccgaggccggaccttggaaatacctggcaactctgatcccaatatgatccctgatggggactttaacagctacgtcagggttacagcctcagatccattggacactttaggctctgagggggccttgtcaccaggaggcgtggcctccctcttgaggcttcctcgaggctgtggggagcaaaccatgatctacttggctccgacactggctgcttcccgctacctggacaagacagagcagtggagcacactgcctcccgagaccaaggaccacgccgtggatctgatccagaaaggctacatgcggatccagcagtttcggaaggcggatggttcctatgcggcttggttgtcacgggacagcagcacctggctcacagcctttgtgttgaaggtcctgagtttggcccaggagcaggtaggaggctcgcctgagaaactgcaggagacatctaactggcttctgtcccagcagcaggctgacggctcgttccaggacccctgtccagtgttagacaggagcatgcaggggggtttggtgggcaatgatgagactgtggcactcacagcctttgtgaccatcgcccttcatcatgggctggccgtcttccaggatgagggtgcagagccattgaagcagagagtggaagcctccatctcaaaggcaaactcatttttgggggagaaagcaagtgctgggctcctgggtgcccacgcagctgccatcacggcctatgccctgtcactgaccaaggcgcctgtggacctgctcggtgttgcccacaacaacctcatggcaatggcccaggagactggagataacctgtactggggctcagtcactggttctcagagcaatgccgtgtcgcccaccccggctcctcgcaacccatccgaccccatgccccaggccccagccctgtggattgaaaccacagcctacgccctgctgcacctcctgcttcacgagggcaaagcagagatggcagaccaggcttcggcctggctcacccgtcagggcagcttccaagggggattccgcagtacccaagacacggtgattgccctggatgccctgtctgcctactggattgcctcccacaccactgaggagaggggtctcaatgtgactctcagctccacaggccggaatgggttcaagtcccacgcgctgcagctgaacaaccgccagattcgcggcctggaggaggagctgcagttttccttgggcagcaagatcaatgtgaaggtgggaggaaacagcaaaggaaccctgaaggtccttcgtacctacaatgtcctggacatgaagaacacgacctgccaggacctacagatagaagtgacagtcaaaggccacgtcgagtacacgatggaagcaaacgaggactatgagtacgatgagcttccagccaaggatgacccagatgcccctctgcagcccgtgacacccctgcagctgtttgagggtcggaggaaccgccgcaggagggaggcgcccaaggtggtggaggagcaggagtccagggtgcactacaccgtgtgcatctggcggaacggcaaggtggggctgtctggcatggccatcgcggacgtcaccctcctgagtggattccacgccctgcgtgctgacctggagaagctgacctccctctctgaccgttacgtgagtcactttgagaccgaggggccccacgtcctgctgtattttgactcggtccccacctcccgggagtgcgtgggctttgaggctgtgcaggaagtgccggtggggctggtgcagccggccagcgcaaccctgtacgactactacaaccccgagcgcagatgttctgtgttttacggggcaccaagtaagagcagactcttggccaccttgtgttctgctgaagtctgccagtgtgctgaggggaagtgccctcgccagcgtcgcgccctggagcggggtctgcaggacgaggatggctacaggatgaagtttgcctgctactacccccgtgtggagtacggcttccaggttaaggttctccgagaagacagcagagctgctttccgcctctttgagaccaagatcacccaagtcctgcacttcaccaaggatgtcaaggccgctgctaatcagatgcgcaacttcctggttcgagcctcctgccgccttcgcttggaacctgggaaagaatatttgatcatgggtctggatggggccacctatgacctcgagggacacccccagtacctgctggactcgaatagctggatcgaggagatgccctctgaacgcctgtgccggagcacccgccagcgggcagcctgtgcccagctcaacgacttcctccaggagtatggcactcaggggtgccaggtgtgagggctgccctcccacctccgctgggaggaacctgaacctgggaaccatgaagctggaagcactgctgtgtccgctttcatgaacacagcctgggaccagggcatattaaaggcttttggcagcaaagtgtcagtgttggc

SEQ ID NO: 59622 - DNA, 2486 bp, Homo Sapiens
aagagaagagctcaagttgaaggagaagacttattccctgtggccatttcttttggaagaccaaaagagtacttccctcctctctacagttccgaatctcacagatttacagttttggagccaaatacagtatctttcaattttaagttttggaggaacatgtaccatcagtttgatcgaacactgcatcctaggcagtctgtatttaatataattatgaatatgaatgagcaaaataaacaattagagaaagatattaaagacctagaatctaaaattaaacaacgcaaaaataagcaaacagatggcatcctcaccaaggaattgttacattcagttcatcctgaatcacctaacctcaaaacttccctgtgttttaaagagcagactctgctacccgtaaatgatgctcttcgaactatagagggcagcagcccggcagataatcgttatagtgaatatgcagaagagttttctaaatcagaacctgctgtggtcagcttagagtatggtgtggcaagaatgacttgttagactcatagagttttttctgcaatgattgcagtacaagaaaaggattattgtgaggatggtctgtaagcataaccaaaaggaatttgtctaataacaattttagggtttaacagtaggctaatagttgaaggaaggataataactacccttgtgagaaatatgtcattttaattgcatttccagcaaggaatgacattcagttctgtaagaaatgagtggtatttgatgtatttactcaaaacacaatttgcactgtacactagtgaattgacgtttatgatttatgttaattcagccaaacataaataaccttccttaagtacaatttaacttcaagaaaacaaaatttgacaacatagtttcttaataaatgatatggcatgtactttcaattatgtagctttgtaactatgaatatttacatattttgccttttagtgatatttaatgttaaagtgccatgaaaaatatttctaagaaagccttaaattcccagtggattctttacccttaagttttacagcctacaacaagattttttgttttgtttttcttctggtcagccttgttttgtttgtaaagaattgtgctctcattactgctgggggtgcatgctacaatacttctatataaacacttgtagaagtacactgttcacgtttagcctgccccacttttgtattcaaaattaatgaaactgaaggtttattctgatcataatttgtttagtgctacatttgataatttattatttacagcttagaatattgatttcttgaatacgtataagcacatttgactgtcttttatatatggattactgcattccattgattcttattttgtggttggctttatttctttcacaactgtgtaagtttaaagagctaaagctctaaaactgttctgagaaacaatgaatagtacatgtatatgtatatttttaaactgccttattgctcaatgagttgctgttcctggagtatctaactttcagtttactcaaaaacttttgggtaaataaaaaagggaagtacagatagtttaggttgtgcatggttgcatgaattttgaagtcatttctatgtggagcattatttttcttcttgttaaatatagaaaaaaaaagagattctagtacaaagttactgtttaacaaaagcaacataaactctgggaaagatttcattttgccatgttatatttactgtttattctgtgtactagtacatatgtttaaattaccaaaaaacaagaaacaaaacataaaaaccccaaaactatcacttgggaattaggcaatatgcacccaactggctttaaaattgaaaatttaaataacatggtggcatgaagtacaattcgagtattaggcaatttgcatagtgttcctcatgctactttctgttacacctctattatattagttttgaatataaacatctttttcagaccaaaaaaaactttattgtatgagagcttatcttatcctgtttatttttccaatgcttttctgtaatacattatgtaatttaaaaaatattcctttttaaacagcaacagaaatgcactataaaatatagtatgtgattaaccaatcctgcttccatatttaagcactgggaatggaaacttaatctctgtgactacaaagggaagtttttgtgccttggtgttccagtcactgattgtggttttagaatcttctgtggctgacttcttgtattcaaatctggtttattatcttaatcttcaacttcagacatatatttgtgtgtttatatgctcacaggtggactgagaaatcagttacatcttaagtgacctacagggtatatgttggcaaaagcagactgtgtatatgtcttataaagttgaatttatgttcagtgtgtttggaagtgtatagcatgtaaattatttcatatatgatttaaaggtaataaatgttc

SEQ ID NO: 59623 - DNA, 623 bp, Homo Sapiens
  misc_feature (569)..(569): n is a, c, g, or t
tttttttttttttttttaatttataaagaaaagaggtttatttggcttgcagttctgcaagctgtacaggaagccgcccagcttctgatgagatgccacattcttttaaacaaccagttcttacatgaactcagagcaagggttcaccatttcccaccccagttcatctgtgggaggctgggagaggtctcaggctgggtccctctctcccctgcagtccttcttccatacggtcctggagaacagcccccactgcgacaccatggtggacaacaacctgcgcatcaccaactggaatcgcaagctgggctgcaagtgccagtacaagcacatcgtggactggtgcggatgctcccccaatgacttcaagccgcaggacttccaccgcttccaggtgagactttctcatggtctgccagcctcctaagtgatgccttcccaacaaacctctgcagaaatccaaggccagacctgcaggtcatcttatcacatggtgcccaaacctggctgttgataataatagttaacagtatcaacaatagccagtgtttattgagcacttacttcanggatgttctaaccacattgactcattaacccaaaaacaacaaatgacctttcat

SEQ ID NO: 59624 - DNA, 2313 bp, Homo Sapiens; identical to SEQ ID NO: 23247

SEQ ID NO: 59625 - DNA, 496 bp, Homo Sapiens
ttgaaactaaaaaaaaacttttttattaacaatttgttggtggcaaagaaaacaatgtctttacatacatgtttacaaaatatttccataaaataattgttttcctttccttttaaagatttgttttcacttggcaaaaaattaaaacattatttaccacaagcaatgaaacccagcacttttatataaatggttttatcttcccttcacccttttccttaaattcaatactcttacaggctacctaaattgataatgacatttagaaggatgaacatgtagtatgattaatggtagaactgttgtgttaggcaataatgctaaagttataagtgctacttgagaatatgaaggatttgtaggattttttagggggtaggaacataaagcattctaaaatatcactaccaggggataaaatgcccaacaccatccctgcactcaaacatgggactgctaggtcagagtattcaatcaattaagctatagtctccat

SEQ ID NO: 59626 - DNA, 505 bp, Homo Sapiens
tttttttaaagagagcactaagttttatttctttgtttttcacagagcaggttaggaaatgctgtacaggttaggaagacctgtattaaagcaatcatttatatcccatagttaactggaaaataattttatacttactttttaaaaagtacttctttttatttattctacatcacttgttaaaaactacaaattgcattttcaaaaactccttcctgatcctatcataatcttttaatatttttaaggtgtcaattaaagattggacatcatcttacataaaatcagggcctaattttcatttcggaaccactacagcctgactttaaagaaaatggctactaaactgaacttttggttctatgcaaaattaaatctaagtaagactcaagttgctaagagcaactttactataacttttactatggctctggctctactgccctctgctggatgatccaccgaactacatcacacaaatcattcttgagagatcttcactgta

SEQ ID NO: 59627 - DNA, 1017 bp, Homo Sapiens
atggctggggtcgcgtgcttgggaaaagctgccgacgcagatgaatggtgcgacacgggcctgggctccctgggtccggacgcagcggcccccggaggacctgggttgggcgcggagttgggcccggggctgtcgtgggctcccctcgtcttcggctacgtcactgaggatggggacacggcactgcacttggctgtgattcatcagcatgaacccttcctggattttcttctaggcttctcggccggcactgagtacatggacctgcagaatgacctaggccagacagccctgcacctggcagccatcctgggggagacatccacggtggagaagctgtacgcagcaggcgccgggctgtgtgtggcggagcgtaggggccacacggcgctgcacctggcctgccgtgtgggggcacacgcctgtgcccgtgccctgcttcagccccgcccccggcgccccagggaagcccccgacacctacctcgctcagggccctgaccgtactcccgacaccaaccatacccctgtcgccttgtaccccgattccgacttggagaaggaagaagaggagagtgaggaggactggaagctgcagctggaggctgaaaactacgagggccacaccccactccacgtggccgttatccacaaagatgtggagatggtccggctgctccgagatgctggagctgaccttgacaaaccggagcccacgtgcggccggagcccccttcatttggcagtggaggcccaggcagccgatgtgctggagcttctcctgagggcaggcgcgaaccctgctgcccgcatgtacggtggccgcaccccactcggcagtgccatgctccggcccaaccccatcctcgcccgcctcctccgtgcacacggagcccctgagcccgagggcgaggatgagaaatccggcccctgcagcagcagtagcgacagcgacggcggagacgagggcgtgagtcaggaggagagacagggcagcccagctggggggtcaggatag

SEQ ID NO: 59628 - DNA, 387 bp, Homo Sapiens
  misc_feature (117)..(117): n is a, c, g, or t
taccctcttaactgatgtgaaatgcaaacttttttttgctgccctcctttcgttaagccacctcagcagcgcaactgtcaccttccctgtgtgtttttttttttttaatatgaatgngaaattagcgaggatgccctttcccctggcggacagaatcctctgttattaaaaagtaaagcactttaattatgaaaactttttcctctttttcttgggttttaactgtttaaaattaatgagaagggcagaatggttgtcaaagcaatattgaaagccgggcagccaggaccgaataagcacaaaaatccctctagagtgttaaataaacagagctccaggcctctccgaatgcctctgttggttattgtatacattgtgtaacagctc

SEQ ID NO: 59629 - DNA, 475 bp, Homo Sapiens
acatttaaaaaaaggtttaaaaaggttgtttttgtttttgtttttttaatggagacgagttcttactatgttgcccaggcaagtctcaaactcctgggttcaagcgactctcccacctcactctcccaaagtgttgggattacaggtgtgaggcactgcacctggcctaatccacaaactgtctagaagcaaacaaccaaacatatgagaatttttctgagtgtaaaaataaatctctttgtggcatgattctattacagatcactggtatgcctgattaaagtggactacaataaagattacatacaccagactttaaataattgcaatccactgaaataacagcatttactaatctcagcgaatgctcaatttattgagcattacacctgaccaaatgtcttaattcaacctttactcaatcctgaatcatctgtataaattgaaataacagttgtcatacaaactttaagta

SEQ ID NO: 59630 - DNA, 446 bp, Homo Sapiens
tttaatggtgaactccagaggcagagacaggaaaggggggttgctaagggaagccagacctgaggctgcgagtcctcaccaatgtcacgtgcaaggcctcagtcactccagccagagagggaaattccagagtaacccagcttcaggtctatactggaccttggaaaaaagaggctttcattttacagggagacacaggaacctacatctgattattcacttgcaaaaggattctgattcaccttgagggttcacgttagcattctcaaagagaaacccacctagactcccagcagctgcctctccctttgcatgtcaacatagcaaccgcagagcatgacaggacccgagcctcagacaaggcccagactcaatccagcgctgccacttgctagctatgtatccctgggcaagtcccctaccttctttgaaattctgttttctta

SEQ ID NO: 59631 - DNA, 705 bp, Homo Sapiens
  misc_feature (11)..(12): n is a, c, g, or t
aacatcattcnnccatctttattaaaagaccctgggcgcagttatactctagttgatccctgccactttcacttaacccatctattcaataagtatttattgagtgtctaccatgtgccactcaacaaagatccctgcccttgtagaaattaaattctagtggatattgtgtaaatctgaagaaattgtaggtacccgatctctttacagaatggctttgtaactagtttgggtataatgttgggaggacaggcaatggaggaaagaggaatgcttctaacagttttgccattattccaactttccttcctttctcaacttgcctaagtgtttttcccagaaagaaccagagaggcagctcggaggataattttgaatcatgccctattgttctgggcattaaaaaaaaattttttttaaaaatttttattgttttatgtagagacaggcatctgtgttgcccaggctggagtgcagtggctattcacaggcgcgatcccactactgatcagcacgtgagttttgacctgctccgttttcgacctgtgcctgttcaccccttcttaagcaacctggtggtctccgctctcgggagtcaccatattgatgcctgacttagtgcggacaccccgatcggcatagcgcactacagcgcagaacttctggacctaagcgattcttcagcctcagccctccgattgctgg

SEQ ID NO: 59632 - DNA, 545 bp, Homo Sapiens
ttccctcaaatatgatttatttagcaatcacatgtaataagaaacacagaaaaatacagcataataaaaacacaagaattgtaggttgttatgttaaaaattaaataaaagaggtttcggttaaatgaaaaggcatataaactgcaagatatatatgttggggagctgaggttaaaaatgcaaagcaggacattcacggtgcaacagcctaacctatcaatccctctcttcagatggcctcaacagtaatgtttgcagaaagacatgcacagataacctccactctgactttctactaattagtgctcagtagtagctgtcttacagagaggaaaacaaaggaaggaataaatataaaagcttaaaagaaaaagaaagaaaaggagggagtatagcagatagaaagagagagattaggaaaataagtacagcagtagcatgacaatacttctgaaggagtaaaacttttttttcttttttttttttttactgtctctggaagtttggtcacagtgctttataagtcgcataacctggaaaattag

SEQ ID NO: 59633 - DNA, 548 bp, Homo Sapiens
tttttttttactgcatgttacattgaaataaaaacaaagtaaaatgagcaattgccttattgttctgctcttttgcagggggtgggggttggggaagacagcattccacagcctggtcaggagggaaggacctcacttgtttcatcaaatggagtggtttaaaactgatcaagcagctcataataatgaattcctgctctgtcttttattatcttatgtcagagtgcagcaaaatctcatttcataagacttacaataactctatttaaaattcaggtattgtactcgggaggctgaggtgggaggatcccggagttcaaatcctgcctgggcaacatagcaagaccctgtctcttaaaaaaacaaaaagacatattcaggtactgatttttcatcaagagattgacataccaatgatcagaaattttagtgaaacttgactcaactatacacaaagttctcatcctaaatgaactatttcagtcaagcccactctaccactttttacttatctggttaataatccgaaatgttaccggggttgactc

SEQ ID NO: 59634 - DNA, 486 bp, Homo Sapiens
gaaaaaagccttatagtatcacctaccacttaaaaactttgtttcctgctgtctataggatgaggtcaacattcatagcacagcacttaagctccaccatgcctctcatttcatctctcccaacatatacagagtcccatgctctagctccagttgatcctttccaacattgccatgctcttttacgtttgcacatgaagttccctttgtctagaatctctgattcctgaacaaatttacctggcaaattccttctcatcttttgtgaccaagctcaaatgacagctcctcagtaaagctttcctcaatccttttagcagagatagtagatacacaagtactaggcaacttctattacaatgctaattacttgagtttataaattatttactcacctgggtaaattatatgcccaccttctccagtagacaataaacgtctctaaggcaggaactttatcatttaaactttgtattccctcgtgcc

SEQ ID NO: 59635 - DNA, 469 bp, Homo Sapiens
tcaaatttcttctgtctctcgagtttccaatcctgttccactcctgccacactgcctcagtgatgctgcaggacaacacctgtttccatctctgagtttaccagtctaacaccaatttcccccgactggcccctttgtttcatttgattctttgcttaaatgttactttaccagagatgctgcctccttagccaaccattctctttcccttttcttgttttgttatttcttcctagcatttgccaccacatgacatattatctctgtatctctttattgtctacctcttctgaaaaggatgcagagtaaatgagagaaggggctttgcttgttcactgctgtatcttcagtgttgaggctggtgtcctgaacttggaaagggaggggagaggctggatagctatttgttgaaagaatgaataaatgaagtagctgagaggtaacagtggagttcaggctagagattagt

SEQ ID NO: 59636 - DNA, 526 bp, Homo Sapiens
  misc_feature (309)..(309): n is a, c, g, or t
  misc_feature (498)..(498): n is a, c, g, or t
  misc_feature (509)..(509): n is a, c, g, or t
agaagacttaatgcttaagtgcagcaaaacttgggttagtttttttaaaagcaggaagataatggtttacattcagaacctagtagtttaatatttagcacgtcatcagttgtattaagtggattattttacaggctctaggagtttcgtatttttatgacttgaaagttctcattcttaggaaatgtaaaattaatgccagtttttgactagctaacggaaacttgtaacactacctataatttagccttacaggcttctacaataaagtaattcatttttttgtggaattatattaagtgagctatntgggctagttaaatatttactaatgacttctcccattagcacacaagtatattccctattttaaaagattgtaatattactttttcaataactgctcttttgttctcaattccagttcagtagctgctgctttaaacataagttgatttcttccaaagacctgaggcagcagcagtgggctatcactgngccactagctntctccaacatcagaatg

SEQ ID NO: 59637 - DNA, 467 bp, Homo Sapiens
atctttgtctccttctcttctctccccacaatccttgatgagttgttctcagacactgcttggcaaatctgaaccctagtcagtcttataagggctcctgtcctccttggaaggctttgttattgatacatgccaatgagaaaaaaacacattaacgagtagctgatggatactaagggagtattttactgaaaaaaatagaaaactacatttttacacgaaataaacttatgtctgcaatactcagccttaaattcacccctcacttcagaagaggtcccaggggcaggaataacacgcacagattgtttgttcacgacttccagccggtccacctctggccaggtaatactgtacaaagtgcttccacgtgatttctcttccaggatctcgaaaatagaggtagaaaaatcccatggcaacgcctgcccccaaaagggccagactgcggaaatcctcctcgtgcc

SEQ ID NO: 59638 - DNA, 1077 bp, Homo Sapiens
atgccctctgtgtctccagcggggccctcggccggggcagtccccaatgccaccgcagtgacaacagtgcggaccaatgccagcgggctggaggtgcccctgttccacctgtttgcccggctggacgaggagctgcatggcaccttcccaggcctgtgcgtggcgctgatggcggtgcacggagccatcttcctggcagggctggtgctcaacgggctggcgctgtacgtcttctgctgccgcacccgggccaagacaccctcagtcatctacaccatcaacctggtggtgaccgatctactggtagggctgtccctgcccacgcgcttcgctgtgtactacggcgccaggggctgcctgcgctgtgccttcccgcacgtcctcggttacttcctcaacatgcactgctccatcctcttcctcacctgcatctgcgtggaccgctacctggccatcgtgcggcccgaagctcccgccgcctgccgccagcctgcctgtgccagggccgtgtgcgccttcgtgtggctggccgccggtgccgtcaccctgtcggtgctgggcgtgacaggcagccggccctgctgccgtgtctttgcgctgactgtcctggagttcctgctgcccctgctggtcatcagcgtgtttaccggccgcatcatgtgtgcactgtcgcggccgggtctgctccaccagggtcgccagcgccgcgtgcgggccatgcagctcctgctcacggtgctcatcatctttctcgtctgcttcacgcccttccacgcccgccaagtggccgtggcgctgtggcccgacatgccacaccacacgagcctcgtggtctaccacgtggccgtgaccctcagcagcctcaacagctgcatggaccccatcgtctactgcttcgtcaccagtggcttccaggccaccgtccgaggcctcttcggccagcacggagagcgtgagcccagcagcggtgacgtggtcagcatgcacaggagctccaagggctcaggccgtcatcacatcctcagtgccggccctcacgccctcacccaggccctggctaatgggcccgaggcttag

SEQ ID NO: 59639 - DNA, 1026 bp, Homo Sapiens
atgaccatggaatctggagccgagaaccagcagagtggagatgcagctgtaacagaagctgaaaaccaacaaatgacagttcaagcccagccacagattgccacattagcccaggtatctatgccagcagctcatgcaacatcatctgctcccaccgtaactctagtgcagctgcccaatgggcagacagttcaagtccatggagtcattcaggcggcccagccatcagttattcagtctccacaagtccaaacagttcagtcttcctgtaaggacttaaaaagacttttctccggaacacagatttcaactattgcagaaagtgaagattcacaggagtcagtggatagtgtaactgattcccaaaagcgaagggaaattctttcaaggaggccttcctacaggaaaattttgaatgacttatcttctgatgcaccaggagtgccaaggattgaagaagagaagtctgaagaggagacttcagcacctgccatcaccactgtaacggtgccaactccaatttaccaaactagcagtggacagtatattgccattacccagggaggagcaatacagctggctaacaatggtaccgatggggtacagggcctgcaaacattaaccatgaccaatgcagcagccactcagccgggtactaccattctacagtatgcacagaccactgatggacagcagatcttagtgcccagcaaccaagttgttgttcaagctgcctctggagacgtacaaacataccagattcgcacagcacccactagcactattgcccctggagttgttatggcatcctccccagcacttcctacacagcctgctgaagaagcagcacgaaagagagaggtccgtctaatgaagaacagggaagcagctcgagagtgtcgtagaaagaagaaagaatatgtgaaatgtttagaaaacagagtggcagtgcttgaaaatcaaaacaagacattgattgaggagctaaaagcacttaaggacctttactgccacaaatcagattaa

SEQ ID NO: 59640 - DNA, 616 bp, Homo Sapiens
  misc_feature (359)..(359): n is a, c, g, or t
  misc_feature (489)..(489): n is a, c, g, or t
ggtattgtgttaagcagcctgaacacactaagacaccaaactgataagaatactcactttatcccagagatcttcaaactcttcttgtccaaaagacccatagactgcccaaaaaaaaggaaggctgcagttgagtcaaatcatgtcagtgtctcagaaacacacctaactttttacaaaaggaaacaaaagtctgatgtgagtttgcctagggggcagtgcacacagagcgtgacagtgaacccatccacccacccgccacccagaactgcagttctgaagcccactgcattaactcccatccaggacttcccacggctgcgccaggtgggcaggagtgactgaagagctctgcccanagcaggggcagttaaaaaggcacaggagacaggcctttcctatgcatctgtgaaacctcctcctcctcttctagcacaaataaggaaaggcaccacaccccggttacaagcaaggaccggacggggcgtntgccatcactgaggccacttacaggagtttcatagatggctagcgtatccagggtcattctggcaaagaatttgccatcatggctccacctaggaaaaacaaagtgccaggtattccatgaaagaca

SEQ ID NO: 59641 - DNA, 689 bp, Homo Sapiens
  misc_feature (539)..(539): n is a, c, g, or t
  misc_feature (642)..(642): n is a, c, g, or t
  misc_feature (657)..(657): n is a, c, g, or t
  misc_feature (667)..(667): n is a, c, g, or t
gttgcactaaggaaagaggttagtcatgtggtaaaattaatagtgacaaagctgtaaatagctctgcaggccaaggtagccatagtaagaagtcctggagatttatggaagaaatttttgttcatggaagcctgtcagacatgaagatgtgggtcttgtgaattggagattcagtgcgtgaggaaaacagcctaactatccataattaaggtaactactgtcagatatttgtaacatagtgaacatcctattatgctagatagaagcattctctatttgaatgttgcttcctgtatcctgtactttctttaagattctagctcaacaagttttaacctgtatttctcttacagctactggaattcagtacgtgaggacttggacttggtgggcacagaatgcatctttttatatcattaaatccaccagaacatctagcatggtcatttgcctaaaacaaagcctctggaaatttagtcaagttgagatgtaaaataaaagattactgaacagaaaaaaaaaaaaaaaaaactcgaggnggggcccggtacccaattcgccctatagtgagtcgtattacaattcactggccgtcgttttacaacgtcgtgactggggctggcgtaatagcgaagaggcccngaacgatcgcctttncaacagttgncagcctgaatgccgaatgcaaa

SEQ ID NO: 59642 - DNA, 499 bp, Homo Sapiens
ttttttttgagatggagtctcactctgtcgcccaggctggagtgcagcagaggcatcttcttgcttgcctcacaccacctctccttctaaaccagggacactgaaccttctatatgcaacctgggtcttgtgtttggaatgatgtatagggccaagaggtttgctgtgtgatactgagcatctcactgtctctctcaacctattttctcatctaccaagtggggctaagacccaccaggtccacctcagagttgtggaggatcaaaggggataatgtgtgaggaagcatgttaaaagctgaaagttttgagttggcaatacatgtaatatctggctagtcttctcagttcccccagctcccagtatccacttacctcctgtggcgaaagctggcaggtactacagcgcccgaagcttattcttttgcttttgtttaagagactgctcccagtcttcccagcctcccacactaactactgctaaggccaaagtccggagt

SEQ ID NO: 59643 - DNA, 496 bp, Homo Sapiens
tcattgaaatcattgaaaattcaccctgttcccatctgtgtgacaatgagcatgcttttaggtccatagatgatgcaaataatgaataaaacctaatgcaaaaaaaaagggggggatagagtgaacatctaacacctgtccgggttgaataattctgtctacccaccctcaaacattcattttaccgtgcttttttccatgaggtcatgtatacaaatgattcaatcatttatttacttaacgaggcactgaatggatgactatacgtagttctcaggcaaatgtgatgagaaccgtatcttctgtttcttaaccactctcttccttgggtttcttttctacgaaatggggaagaggtcactgtgacttcagttttacgagaaactgagtgcagagataagaaaggttcaacttgtgctctaagaagcacttgaacattcagtaatgctctggaaatttcttccaaaagcaattcattagtattctattttaccag

SEQ ID NO: 59644 - DNA, 876 bp, Homo Sapiens
taaaaataaatgctattacagctagacgtcaatgggataaataaagggatgaagatccactaagttgtgactttcatacacacccagtacatctcaaaggatgctaagggacattttctgccagtagagttctcccccttttggtgacagcaatattattatgttcacatctaactccagagcttacttcctgtggtgccaatgtattgtgcaatttactacatttttatatgagcctatttataggtgccattaaactcaggtctttcaaatgaaagagtttctagcccacttagggaaaaagataatgtttagaaaaccataaaatcaatggtaggaaaagtgggaactggttacctgggatgccatggttctctgttaaataaagtaagagaccaggtgtattctggagtgtcatcagtgttattttcagcatgctaataaatgtctttccggttatatatctatctaaaattaacctttaaaatattggtttccttgataaaagcaccactttggcttttgttagctgtaatattttgtcatttagattaagacctggttaggctctcaataaaagatgaagacagtagctctgtacagcggataatatctatattgaggtcttcatctgatgatgagaaattctccattataatgtgcaagaagtattacttcctaaaatagaattccgatctggctattggcgtggataccgaaaaattttcggtggaccagaacgaagaaaggattttcgaggccgtttacgttgggaggggttggagtcccaatttgcgattaccgaatttgggggaaggggaagggggcacgcccttttagggagaaaaattctggaggttctaaaaaaaaaggggg

SEQ ID NO: 59645 - DNA, 1316 bp, Homo Sapiens; identical to SEQ ID NO: 23138

SEQ ID NO: 59646 - DNA, 526 bp, Homo Sapiens
tttttttttttttttttcagattttagaatatttgcatcatacttaccagctgaacttcccaaatctgaaaatctgaaacctaaatactcaaatgagcatttcctttgagcatcatgtgttgctgctcataaagttttagattttggagcatttcagatcttcagatttaagaagctcaatgtgtaatttcaacaaaagacttgaacaaaaaaaaaaatttatgtgatactgactaaatgtccaatttgtgatttgccaactacctaaaaacaaagggctgaatgatttagtttatttcagtttaaccttctcaatataaagattatttaacctctcctttagttattctttaacaaacaggttacacaaaaagtacaattacttctactaaattaaatatcttacctgctaccctcatgtttggtttttcagtttatggcacttttcattaatatgctcctaaaaaatcaaaacaaaaagcaaatatcattagctctagagcagaaattcctccttagattgagt

SEQ ID NO: 59647 - DNA, 471 bp, Homo Sapiens
tttttttttaagaggagggttggacgatgcaggcgactctccctgcgctccggcgcgcgtggtggctgtgcttcggctcccacagccagggccacactcatgcaaagactgcgtttggcccggcttccagcagtcgtcgcgccaggcgctgctgcgagagactgggtgcgcgacattcgccagccagggccaccgtgccgcttggccttggggctttgtgcagcagtgccccgtgtgaactgccaccgccggcatttcccactggctcttgggcgcgtacagtagggcgcacacacatgcaaatgccctgcaggaggcagcggcttagggtgttgacagtggcagccctcacgccaggccagggagcccctgttcccaggcagggcccctcagggtactcatctgccccattctgctgcctaatccggttatcagctgcagaacaacgggttgcctggtggagctggggag

SEQ ID NO: 59648 - DNA, 474 bp, Homo Sapiens
ttttttttttttgcaattttaagctcatcagctatcactagtgttagcatattttatgtgtggcccaagacaattattttcctaatgtggtccatggaagccaaaagattggacaccctgatatacttaattaccagggtaatattcctaacaccatcacttttacttgacaattctcctgctctaaaagttatgaacctgacattcttggtcttacacaatctggacccagtctactcttctataaccatcttccacttaatttacaaatctttattaaggcacaggtactcctacttatcccctattgcctctctcatgctgaatcaatcatgccaaaagctaagaaaacatgagcatgcttgggactaaagaaacagaactgaggatttcctacacatcctaactgcaaggacagtccatcaaaagccagagataagtatttttatttgctctttatttcttaaaataatt

SEQ ID NO: 59649 - DNA, 691 bp, Homo Sapiens
ttttttttttcaattattctccaatttcctgttataattaatgaatcatgatacacagagcactgggtagaattccaaacaccaaattatgtggtcaaaagtttctaaattgacaactgagccagcaaaccataccttgccatcagcacagacacacagtcacagtgtggagagttcatctgtttttagctggatgggtagggggatttctcatggcttctgcttttcaaagcatttactctcattctaaaacagtatgctacacacaaaaccatccattttattccaggatacatcttaatgagaataaaaagcttctgtacgcacatactgccaatacatttaaaaaggcctaaattttaacaagtaggatagacaaattcatcagacaaaagatcataaattactttggccgaaaaaaatctttaaaaaaaatctggctcaacattctgcttgcaggtttctatatatactgtatatgtggtgagtgtgtatgtgtgcgtgtatatagagagagctctcttttgtttaaagggaatggagaacggtctagcccactttcccacagtcatgtaggaactacgatgttttttgcgagcaaaacaagaagtgcaaggtctgcattcccaccaactcgatgcaaagctccaagagcttcctgcaaagtaaagcccacacggagaatgcggtc

SEQ ID NO: 59650 - DNA, 493 bp, Homo Sapiens
  misc_feature (396)..(396): n is a, c, g, or t
  misc_feature (424)..(424): n is a, c, g, or t
  misc_feature (446)..(446): n is a, c, g, or t
  misc_feature (465)..(465): n is a, c, g, or t
  misc_feature (475)..(475): n is a, c, g, or t
attcggcacagagctaaaacatccctgtttccttttgcaaaacagtgcctggcatgtgggatccaggcgttctttaggatccttggataccacatcgtgaaatcttttatttttttactctgagaccagcaccagatgtaagtaagcatctcatatatttcagccaaataaatgggccaagggaaaaaaatatatatatatagacaggactagagaaaacctatttttgtaatgatgtttctttggatactgtctagtcacccagaaaaatgtatggatgaattttttttttttttttgagacaaagtctcactgtgtcatgcaggctggagtgcagtggcatgatctcactgcaacctccatctcctgttctcagcctcctaggataactggggnttacaggtgcccaccaccatgtcccggntaatttttgtatttttggtagngacagagttttcaccgggntgggtcaggntgggtttcaaactctttt

SEQ ID NO: 59651 - DNA, 559 bp, Homo Sapiens
tttttttttaatttagaaaaaaatctgcttttcatatctggttttcctatttaaagctatgtgatttgaggaaaatggtttaactcctctgagctttagtgtcatctacaaaatttggataatgatactgagggaagctgaaaagccgtatcaaccgacttatacaaaaaataataaacattcacttccatttctaatgcatggtgctgaaaaagtccttgtatgtggaatattgttcacctttaaggaacctgctctcaagagctgatgagggactttttttagtgcagttctgttgtcactggctgttgggctcatttagttggcaccaacaaatctctgtgaacataaaaataaaataaaataaagattgtggaggaatagaatacaaacacacagtaaggtgagatttgcacaacagagtaaaggatgtgtgcctgattctttttgcattctctttgaatcatttttagcctttattctaagtccccaattattgtcatccttctcccaacaagatcgtttctctccaccgcagatattctggccaggctctctg

SEQ ID NO: 59652 - DNA, 584 bp, Homo Sapiens
tttttttttttttttttaaataggtatggaaggaaagtgtgatttgagacaactctagggtcttaaatcccagaatttataatagatatctccctgaagttaaaacataagcctttttgctgcaatggaagcaagccacttaaggtcagaaaggtactgctttacttttccgcatttccaaggtgaggtcttcctctaaaggaagattagctcttggcaatctgggagttggctgaactggtcagaaagcaaaaggatcacacagtttgaggaagaggagtggtggtaaaaatccctaatgtcacagtctcctctgtgtctagagcacaatgttcatgatacaaatgagttagctttctggcagaaaagaaagaaggtgggtgagaagccaggtctttgatctgcatctatatacatcatcaggttcatgtttgagtttatataccccaggcccagacacagcttccctggttctaaatctcctgtaaagagccccaggctactccctgttcacaggttaaaaactgagagaaacaaaggaaaaaacaggggactcacaggagaagctgggaagaattgcagta

SEQ ID NO: 59653 - DNA, 514 bp, Homo Sapiens
aaaggaagcttccctttgctaagtatcaaatacttgaaatgtgtgctaatgtccacagtctttactttggaaaaacaaaaacctgtcagccaagtataccaatcaccacaacaaatggcaatatttaaatgatccattttagaagtgggagatgaaaaaactatctcaaacacaaaatcatcttcgtatcacggataagaacgatccttaggtctacatgaccctcctcattttaccaaagaacattatatgacccagtgtttaagccgatcagggacacctggaactcagcaaagagaggtctgttggctgcctgttctttatccataaaaggatgctgctgccaacaactgcgaatgaaacatgcttccttggcatccactctttgacacggcgtctggttcatggtgaaattgtctaccaaaaaaatcaacacacaaccaagcccaaagctgggtatgcatgagatgggccttatcatcttgttatgctacaaagtacaaaagtgctacaa

SEQ ID NO: 59654 - DNA, 621 bp, Homo Sapiens
  misc_feature (252)..(252): n is a, c, g, or t
  misc_feature (365)..(365): n is a, c, g, or t
  misc_feature (414)..(414): n is a, c, g, or t
  misc_feature (416)..(417): n is a, c, g, or t
  misc_feature (450)..(450): n is a, c, g, or t
ttttgagtacctgccttcatttctagaatcagacctaacaaggtcagtagaagcctgggcagcagcgggcctggaaagacgaggcagccagcatgaactgctgttctctccctgaccacaaggcgtcgtcttcctccaaggtcaagtaattgttcttgttccgcctcacaagaatgtggggaggaaggacgttaacactataaaatgctgcgtcctaccttaaacttgtactgtgagaaagctggaaacttncacctgtacaaggggtctgggttgcattgttagtttcatttgtgggaactgcttgtcaagagtgagcctcaagtcaaggcagttgtgcctatgagaattagctcagctattangcaggtttttaagacacctttttaaaaatgagctcgccgtctggtttgntnnatgtccctgttttttcggaaggggtttaaaaanaaaactggcccaaaagaggcatttcttaaatggtttggtgaaaaggacggccaaacctttaggattaaccctaatttgttggcgacttgttttttggttttagaaaggcacaacctgtttttattttaaagagggggagggggcgggggggctcctctccccctctggcag

SEQ ID NO: 59655 - DNA, 1020 bp, Homo Sapiens
atggctaaccttgacaaatacactgaaacattcaagatgggtagcaacagtaccagcactgctgagatttactgtaatgtcactaatgtgaaatttcaatactccctctatgcaaccacctatatcctcatattcattcctggtcttctggctaacagtgcagccttgtgggttctgtgccgcttcatcagcaagaaaaataaagccatcattttcatgatcaacctctctgtggctgaccttgctcatgtattatctttacccctccggatttactattacatcagccaccactggcctttccagagagccctttgcctgctctgcttctacctgaagtatctcaacatgtatgccagcatttgtttcctgacgtgcatcagtcttcaaaggtgcttttttctcctcaagcccttcagggccagagactggaagcgtaggtacgatgtgggcatcagtgctgccatctggatcgttgtggggactgcctgtttgccatttcccatcctgagaagcacagacttaaacaacaacaagtcctgctttgctgatcttggatacaagcaaatgaatgcagttgcgttggtcgggatgattacagttgctgagcttgcaggatttgtgatcccagtgatcatcatcgcatggtgtacctggaaaactactatatccttgagacagccaccaatggctttccaagggatcagtgagaggcagaaagcactgcggatggtgttcatgtgtgctgcagtcttcttcatctgcttcactccctatcatattaactttattttttacaccatggtaaaggaaaccatcattagcagttgtcccgttgtccgaatcgcactgtatttccaccctttttgcctgtgccttgcaagtctctgctgccttttggatccaattctttattactttatggcttcagagtttcgtgaccaactatcccgccatggcagttctgtgacccgctcccgcctcatgagcaaggagagtggttcatcaatgattggctaa

SEQ ID NO: 59656 - DNA, 900 bp, Homo Sapiens
agacgagttcaggaagagtactgggaagatttagaggaaagggaagtggaggcttaaaccttggtaatttctttgcaagccgtaagggctacagtcgaaaagggttgaccggcttagcactgagggcagtgaccaagagaaagaggatgatggaagtgaatcagaagaggagtattcagcacctctgcctgcgctcgcaccttcctcctcctgaaaaccaagctttgatttagattgagtaagatttacccagaatgtcagattcctttccctttagcacgtttaaagttctgtgtatttaattgtaaactgtactagtctgtgtgggactgtacacactttatttacttcgtttggttaagtggcttctgtttctagttgaggagtttcctaaaagttcataacagtgccattgtctttatatgaacatagactagagaaaccgtcctctttttccatcataattctaatctaacaatggaagatttgcccatttacacttttgagacttttggtggatgtaaatagtggtgtgtttgggatgtcttatttttagatggttacactgttagaacactattttcagaatctgaatgtaattttgtgtaataaagtgttttcagagcattagctgtcagtgtattttccagttttgggtattgcagattttacatacaacttttataaataattaaacaaaccaaaatattagtgaatttactcgatgtcttcactaaagaatgtgtggttgtccacatttagaagatcttaggcattaataaaaccagtggttataattgtaatcaggcttctaaacaaaggttggcttttacgaggaaatataaaggagggtaaaaaaggggaatacgggcatgcatggaaggctaaggtaaaggggag

SEQ ID NO: 59657 - DNA, 2883 bp, Homo Sapiens
atggaagacctggaccagtctcctctggtctcgtcctcggacagcccaccccggccgcagcccgcgttcaagtaccagttcgtgagggagcccgaggacgaggaggaagaagaggaggaggaagaggaggacgaggatgaagacctggaggagctggaggtgctggagaggacagagttttcagaattagaatactcagaaatgggatcatcgttcagtgtctctccaaaagcagaatctgccgtaatagtagcaaatcctagggaagaaataatcgtgaaaaataaagatgaagaagagaagttagttagtaataacatccttcataatcaacaagagttacctacagctcttaccaaattggttaaagaggatgaagttgtgtcttcagaaaaagcaaaagacagttttaatgaaaagagagttgcagtggaagctcctatgagggaggaatatgcagacttcaaaccatttgagcgagtatgggaagtgaaagatagtaaggaagatagtgatatgttggctgctggaggtaaaatcgagagcaacttggaaagtaaagtggataaaaaatgttttgcagatagccttgagcaaactaatcacgaaaaagatagtgagagtagtaatgatgatacttctttccccagtacgccagaaggtataaaggatcgttcaggagcatatatcacatgtgctccctttaacccagcagcaactgagagcattgcaacaaacatttttcctttgttaggagatcctacttcagaaaataagaccgatgaaaaaaaaatagaagaaaagaaggcccaaatagtaacagagaagaatactagcaccaaaacatcaaacccttttcttgtagcagcacaggattctgagacagattatgtcacaacagataatttaacaaaggtgactgaggaagtcgtggcaaacatgcctgaaggcctgactccagatttagtacaggaagcatgtgaaagtgaattgaatgaagttactggtacaaagattgcttatgaaacaaaaatggacttggttcaaacatcagaagttatgcaagagtcactctatcctgcagcacagctttgcccatcatttgaagagtcagaagctactccttcaccagttttgcctgacattgttatggaagcaccattgaattctgcagttcctagtgctggtgcttccgtgatacagcccagctcatcaccattagaagcttcttcagttaattatgaaagcataaaacatgagcctgaaaaccccccaccatatgaagaggccatgagtgtatcactaaaaaaagtatcaggaataaaggaagaaattaaagagcctgaaaatattaatgcagctcttcaagaaacagaagctccttatatatctattgcatgtgatttaattaaagaaacaaagctttctgctgaaccagctccggatttctctgattattcagaaatggcaaaagttgaacagccagtgcctgatcattctgagctagttgaagattcctcacctgattctgaaccagttgacttatttagtgatgattcaatacctgacgttccacaaaaacaagatgaaactgtgatgcttgtgaaagaaagtctcactgagacttcatttgagtcaatgatagaatatgaaaataaggaaaaactcagtgctttgccacctgagggaggaaagccatatttggaatcttttaagctcagtttagataacacaaaagataccctgttacctgatgaagtttcaacattgagcaaaaaggagaaaattcctttgcagatggaggagctcagtactgcagtttattcaaatgatgacttatttatttctaaggaagcacagataagagaaactgaaacgttttcagattcatctccaattgaaattatagatgagttccctacattgatcagttctaaaactgattcattttctaaattagccagggaatatactgacctagaagtatcccacaaaagtgaaattgctaatgccccggatggagctgggtcattgccttgcacagaattgccccatgacctttctttgaagaacatacaacccaaagttgaagagaaaatcagtttctcagatgacttttctaaaaatgggtctgctacatcaaaggtgctcttattgcctccagatgtttctgctttggccactcaagcagagatagagagcatagttaaacccaaagttcttgtgaaagaagctgagaaaaaacttccttccgatacagaaaaagaggacagatcaccatctgctatattttcagcagagctgagtaaaacttcagttgttgacctcctgtactggagagacattaagaagactggagtggtgtttggtgccagcctattcctgctgctttcattgacagtattcagcattgtgagcgtaacagcctacattgccttggccctgctctctgtgaccatcagctttaggatatacaagggtgtgatccaagctatccagaaatcagatgaaggccacccattcagggcatatctggaatctgaagttgctatatctgaggagttggttcagaagtacagtaattctgctcttggtcatgtgaactgcacgataaaggaactcaggcgcctcttcttagttgatgatttagttgattctctgaagtttgcagtgttgatgtgggtatttacctatgttggtgccttgtttaatggtctgacactactgattttggctctcatttcactcttcagtgttcctgttatttatgaacggcatcaggcacagatagatcattatctaggacttgcaaataagaatgttaaagatgctatggctaaaatccaagcaaaaatccctggattgaagcgcaaagctgaatga

SEQ ID NO: 59658 - DNA, 98517 bp, Homo Sapiens
gatctaaaattgacacactaacatcacaattaaaagaactagagaagcaagagcaaacaaattcaaaagctagcagaagacaagaaataagatcagagctgaactgaaggagatagggccatgaaaaacccttcaaaaaaatcaatgaatccaagagctgttttgttttttttttaagaaaaaattaacaaaatagaccactagctagactaataaagaagaaaagagagaagaatcaaatagacacaataaaaaatgataaaggggatatcaccaccgatcccacagaaatacaaactaccatcagagaatgctagaaacacctctacacaaataaactagaaaatctaaaagaaatggataaattcctggacacatacaccctcccaatactaaaccaggaagaagtcgaatccctgaatagaccaataacaagttctgaaattgaggcagtaattaatagtctaccaaccaaaaaaagcccaggaccacagagattcacagctgaattctaccagaggtacaaacaggagctggtaccattccttctgaaactattccaaacaatagcaaaaaagggactcctccctaagtcattttatgagaccagcatcatcctgataccaaaatctggcagagacacaacaaaagaagaaaatttcaggccagtatccctgatgaccatcattgcaaaaatcctcaataaaatactggcaaattgagtccagtagcacatccaaaagtttatccaccatgatcaagtcagcttcatccctgggatgcaaagctggttcaatacatacaaatcaataaatgtaatccatcacataaacagaaccaatgacaaaaaccacatgattatctcaatagatgcagaaaaggccttcgataaaattcaacatcccttcatgctaaaaactcccaattcactaggtattgatggaacacatctcaaaataataagaggtatttatgccaaacccatagccaatgtcacagtgaatgggccaaagctggaagcattccctttgaaaactggcacaagacaaggatgatctttctcacctttcctattcaacatagtattggaaattctggccagggcaatcaggcaagagaaagagataagggtattcaaataggaagaaaggaagtcaaattgcctctgtttgcagatgatatgattgtatatttagacaaccccatcatctcagctcaaaaactccttaagctggtaagcaacttcagcaaagacttcaggatacaaagtcagtgtgcaaaaatcacaagcattcctatacaccaacaatagacaaacaaagagccaaattatgagtgaactcccattcacaattgctacaaagaggaaaaaatacctaggaatacaacttacaagagatgcaaaggacctcttcaaagagaactacaaaccactgctcaaggaaataagagaggacacaaacaaatggaaaaaacattcaatgctcatggatggaaagaattaatatagtgaaaatggccatactgcccaaagtaacttatagattcaatgccatgcccatcaagctaccagtgactttcttttcagaattagaaaaaactacttgaaatttcatatggaaccaaaaaagagcccatatagccaagacaattctaagcaaaaagaacaaagctgaaggcatcacgctacctgacttcaaactatactacaaggctacagtaaccaaaacagcatggtactgatgccaaaacagatatatagaccaatggaacagaacagaggcctcagaaataatgccacacatctacaaccatctgatctttgacaaacctgacaaaaataagcaatgaagaaaggattccctatttaataaatggtgctgggaaaactggctagccatatgcagaaaacagaaactggaccccttccttacaacttataaaaaaattaactcaaggtggattaaagacttaaatgtaaaacccaaaaccataaaaaccctagaagaaaacctaggcaataccattcaggacataggcatgggcaaagacttcatgacgaaaacaccaaaagcaatggcaacaaaagccaaaattgacaaatgggatctaatcaaactaaagtgcttctgcacagcaaaagaaactatcatcagagtgaacaggcaacctaaggaatgggagaaaaattttgcaatctacccatctgacaaaggtcaaatatccagaatctacaaggaacttaaacaaatttacaagacaaaaacaaacaaccccatcaaaaaaggtaggcaaatgatatgaatagacacttctcaaaagaagacagttatgcggccaacaaacatatttaaaaaagctcatcatcactcatcattagtgaaatacaaatcaaaaaccacaatgagatatcatctcacgccagttagaatggcagttattaaagtcaggaaacaacagatgctggtgaggctgtggagaaataggaatgcttttacactgttggtgggagtgtaaattagttcaaccattgtggaagacattgcaacgattcctcaaggatctagaaccagaaataccatttgacccagcaatcccattactgggtatataaccaaaggattataaatcattctactgtaaagacgtatgcacatgtatgtttattgcaacactatttacaatagcaaagacttggaaccaacccaaatacccattaattatagactggatcaagaaaatgtggcacctatacaccaagaaatactatgcagccataaaaaagactgagttcatgtcctttgcagggagatggatgaagctggacgccatcattctcagcaaactaacacaagaacagagaaccaaacgccgcatgttctcattgataagtgggagttgaataatggaacacatggacacagggaggggaacatcacacaccgggacctgttgaggggtggagggcaaggagagggagaacattaggacaaatacctaatgcgtgtggggcttaaaacctagatgacgggttgataggttcagcaaaccaccatagcacatgtatacctatggaataaacctgcacattctgttcatgtatcccagaacttaaagtaaaatttaaaaaaatatacaaatatatatatataattcagtctgcaagttttaagatgttttgtggttggatgagattgtaagtgtaaagcaaatatgtgaaaaatgtgtcctgtgttttattcctgtttgagcgaagtgatttttttgtctactgaagatcttttatgacaacaggaatcatatttgaatttttttttcttttttgagacagagtctcgctcttttacacaggatggagtgcagtggtgtgatcttggctcactgcaacctccgcctcccaggttcaagtgattctcatgcctcagcctcccaagtagctgggataacatgcatacgccaccgtgcctggctaattcatatttgaatattatctgcttttatgttttttattattttatattaagtttgaatagtgtactttattttaattgtctaaagaaagttactgtttagtttaaaatacttccatttttgcttataaaaagtccagaaacaaattgacgtctaaatgagacaaaattcatcatctcattgttgtctggtgatggaaatgcaaatgcaaatggatgtgtaaattttatggtactttacctttaaaaatgttttttgagctttagttccctggcagacagttgagaggtcacctccctgctgtaagaccagtacaacagagcacctatgtgtacacacatgccctccctggcccagaagagacatattccttgagtactcagagtgctagctaaaggattttgagcatactgagactatggcaattaaaaacataaacaaatgaactgaaaacaatgacaatatttatcacataaacccttttctacttgttgtcttatcaatgtctctagcttagttatcagaattcacttatagtacataggcaaagtatgtacatagtacaaagatccattattttattaagtgactttctttttacttcttcatcacataaaaatggggacattatattgctttctttaaaaggttatgttatctgtgagtcctattagaagacagcaaaggagcattataaaatatgtgttacagtggggtgctgggtctgagacagctgaagctgtgtttatcaacgcactgttcgtagcatcactattctcagggggtaggcatttttatcaggaaacttctatttctagtgggagtaatttcggaaaacaggacagagagattcaggctgaacagaaaatttccagggttcctctgaccctgccccgcagatggctcctgggaaaggctgattaatcagctgggtccggacttcttaagtctaaaatatgatgattttaagtcaagcatgggattagaacagtggttatcagccatggaggtaattgcgcctgtctcaggttcttgggaagggaagggaatcactcatccctgacggcttcctgggctgcccctgggcagaggctggaagagcttgcgttctctgggccacattgctaagattaataacacgtatggacacagtgcagggcctgtgggatttttcacttactccccaccactgacagcctcagttccgtgtctgaagaccgtgtgccaccctccctgactctgaagagccttgcaccaggttcacaggctcctggagacactgaagtctgacctggtcgccaagccactccctgaaggagcagagtgagctccagccccactgcccattagcaaatcgaagtggggaacaaagacagctgctgggggacttgggcaaatggcctgtttctgtccagcgtagcctgggtgatcactcacagtggcgacttcctttgccttaatcagtcagtggagccatcgctgacgttcttgccttttctttcttgcaggacgttgacaaaggaacgcacgctgacactcccacatgaacagctggctgcttcccagcgtcctacgggagagctaccggcttctaggcaatgctgcgtgtgatctgtgggggagcctggccactcctggaggttccaaggtcaaagaaacgcattccggatgcgacggatttgatcttggaaagctgctttgaagatacgatagctattccctattgttcactttaaggcaaacaatgtatacatttttctgtgtcaggctcctctgtgaagttagtgaaacggtagcttagtttgctcccatctcctgttccgcgctgctggttttcgattgtgcgtcactgaattgccatcagaagtccagtcccgactgcgtgtgcgaggccagggagggaggtgagaggcggcctctcggacacactctgctgtgatctttgattcaggagacaccctctttgttgatgatccctaagaactaaagagagactccagcatcaccctttctcctggtgccctgtccataactaagcatccaggaatgtcctctgcaggcattttctctgctcatcctcgcagcaatcctgtgaaggagacgttttctccattctataggagaggactctgaggttcagaaaactcaagtcagagaacacgtgagcttggactccgttgcctgacccgcgtcggactgtaggctgctgttgcagctgtgtggctttgggtgcctggcctgggtgctatgtgttcacaaaatgcacttcccttccaccctaggttcaaggtgaactccgatcccagcctctcctgtcaggctcagcaatggaaatgagcagaggggccctttgttccatgcaggctgaatccagaaccttctgaggacttgaagcccttttatgcggacaggatgggaagttaagcgaaagttaacttctgttggattaagaccctgaagattgggctttaacacctgttgtgttacctgcactcaaacaaaccagggctccttactcagccctcaggagccttggcattctcacctctaaagcaggaggagtcgtgataactgccttgaggaatttgagcaaagttaaatgacctgaactatttgggcgtgtcttgaccaatgtccgaccttgggaggtgctggatgaatttttatttctctactttaagtcagcctttctaccttgttgctcttctcagctgcctttctctgagcctccttcatcactctgttcatttctgtgagacaaagatcattacaactgccttaatatttcggtgcaagacgcaccgtgacctgacattgctctaccccgcctcctgccacgatcattcttttgtagcaatattccgccagcttcattttgtgcagtgagtggaacaagagtcagaacaccagggcggctgagcctgtcgatcaagcctccacctaacaacagacatgcctgagtcccacagtcataattaggatgaagcttttccctggctggacccggactgcagtcacactgtaagagctcatcattctaggcctctgccagtgcgtgttcagtcagaggcaagcagtggccccggctcccagaagcatggggaggactcctaccagggacggtggccagaatggctgcacacagcctttgcttccaagaaaaagcatctccgcaggcccaggcacctctggcagccctcagagcaggaccctcttcaacaaggtgatagcagaagggaagaaacgcagaggtctgtctcagagattagagcaacacagaaactggatgccccctttcaggggagaaacacggggtttcacatcaggaacctgttgaggaacttcccgtcaggcccagcaacacacccaggaccaaaccccaacagtgatgactaaaaaatgtgtgtgggggctgggcacagtggttcctgcctgtcaatccagcactttgggaggccaaggagtgaggctcactttagctcaggagttggagactggcctaggcagcatagtgaggacctatttctacaaaatagtaataataataataataatggtaataataataataaagctgcatggcccccaaagggtcgtgtccagctctggataaacttgtctggttagttcaggtttcatggcgcggcatagaggaccccgaccgttcatcactcattgctgtgtccccagttggctgtggcctgaaactgcctggtttcagtcaacactgttgccgtcttgcatcagccattcagggggtgggtacccatgggagggcctcagccaggacaaaggtccacttctgtctaatcgtgtaactttaaaataaagcttttgtgcagggacagagtaaacaaactttaaatgtgaatttgcatcaattgaacatttacaagtgtgacacttttacctggtggcccactgggaccaggacgaagcagctggaggggccccaatgtgtgactgagagaggaatgtgtgggcagccgtagcgaggctgagaggtgagcaggctgggaaaacccagcgagatgagcgtggctggagaccggcggaacaggcaggctgtgcagggcttgcatgggcgagtgaggcgcccgtgctggccagaacatcatggctctgtgctgagggaaccacggtgagcgacgcccagagacccagtcttggatcaggagctgtagtggatacagttgagggagttttgtgtagtgcctcactgttctgataagaagaaaacatgtacaagctacgaactgcaaattgagaaattttggtgattttgcaaatgagataaatggtcctatatttgcatttgaaattggcattgcacaaaataagttgactaataatttttaattttccttcttagaatgacaatgtggcaaataaaggaacccaatgaaaagaagggaaagagactgcagagggaaggaaaaagctttatattttactaccataatggcactttttaaaaaatttttatttatttatttatttttgagacagagtcttgctctgtcgcccaggctagagtgcagtggcacaatctcggctcactgccagctccgcctcctgggttcacaccattctcctgcctcagccttcccagtagctgggactacaggcgcccaccaccacgcctggcttttttttgtgtgtgtgtgtgtttttagtagagacagggtttcaccgtgttggccaggatggtctctatctcctgacctcgtgatccacctgcctcggtctcccaaagtgctgggattacaggcgtgagccactgggcccggccaataatggcactttttcctgctttttgtacagggggtcctgcatttgtgttttgtcctgggcccctaaattctgcagctggccctggtagaaagctgagaagtcagaacaaaggactgcccagaggctgcacggggtgggggtgggggtggggggggggcgttcacatggtccggagtccccaccccaccgcgtttatatctggcacactctggaggacccatccatctgtgttcatgtctggctgtggcatctattgaccatgggctctcaaagtcacctaatcattttgcatctctcttttttcatgtctaagacagggataatgatggcacatacctgttaatggctgttgtgaagctctgtgttaagttcttaagacagaacttgtcacaagtcagccaggcgtcataatcaccgatgccatctcttaacaaactggccttaactatgagcagagggtgcaatgcggagggctgtggggtgcccagaggtgaacaagatgagtgctgttgtcagggagctttcagtgggatgagggagcagggccccatcacgaaggacatggggggttaggggaaaggggagccttccggtgtgggggacatggacagaccttcggaggagaaagggttgtgggttgagttgcatcccccggaaaggtatgttgaagccctaacctggtgcctgtgaacgagccctcacttgcagaactgatcaagttgagctggggtcaactagagcagggtgagcctcgagttccatgtgaccaatgtcctcatgggaggagaggggagcacggggagaaggtgaccacttgaggacgaaggcagaggttggggtgacgcgtctacaaacgagggtttccccgaacaccagagctaagagcaaggcattggcgccctcccgctgtggagtctgcagagggagcctggcccggctgacaccgtgggtgcagactcccggcctccaggctgggggacaagaagttcctgttgtggcgacctcaagaaactaacacaaaggggcatttgaattcagttgtccaggaagatacaggtgttgcagggatgggctgccacgtgggcggaggcctggatgggaaggattgtgccaggcatgggttcccgcagtgtgttcccctggctggcagcgtcgcggcacctgggagtcattaggcagcaagggagggaattgcgattctgggcggggctcagctgtgcagattttagcaaggtctccaggtgcttctgctgagggccagagttaagacagagcttaagacagagaacctcaacaggaggcctgaaggaaagcacctgggagtcattaggcagcaagggagggaattgcaattctgggcggggctcagctgtgcagagtttagcaaggtctccaggtgcttctgctgagggccagagttaagaaagagcgagaacctcatcaggaggactgaaggaaaggagccaggctgcagccctctgcctgcccttccgtgccatcatctccaggattaatgaaagggccattcaggaaacagcacaggtgagatgtgggatgggctccgtggctgcctctgtttcctgccttctgtctgtaaacttctgattcaaggaggtggcgtggcctctcagggcagttgtatttttggtttacaggctcgtcagcccccacttatctatcataagtgggacacacatatgggaggaaaagtttccttttccttctacccatcctaggttctctggctgaggtcctataaattagaatggcaaaagacaggttgacaaaatagaaacaaacaaggttattaacatgctcatcatgcacacacatgggagcactcagccatgagtcactccaagggtttattagaacttgggctgatagagcttctaaacaaaataatgacaaattttagaggagtgacaagacaaaggaaaagacctttgggcttctagggcagcaaactgcagccagctaaacacatgggaaatgaatggaggataagggctagttcctagtagtcaagtttgctgagtagattcctccagtgctgtctccaggctgataaggcctagacttgccccagtgattggcttctgtccttcctggtagagacaggagtggggacaccttcactaaattatgtcctgcttttaggcaaagaggggcaggagagagagcttcacttatatctacatcttaaaaattgtcttcagctcaaaatgatccttatgccaaagtggtgtctttgggggtggctgactctgctgctctttacttaccttgaactcccaccatcatggctgcctcagaatcccacagggcatcgagaatgttctatgcaaatggagaggccaggagcagtggcagacgtgcaggtggcacaaatctctgctctcaggcctgctcccggtcccagtgacgtttagagcacacgtccaaagatatgatgaagaatttccaggtggtgacagctgagcattaggcctagcaaggggcctgttgacgaagagccaaactctgtaaaatatttgaagagatttattctgagctgagtatgagtgaccatggcctgtgacacaaccctcaggaggtcctgagaacatgtgcccaaggtggtggggagcagcttggatttatacatcttagggagacatgagacttcaatcaaatacatttaagaagtacattggtttggtccagtaaggtgggacaacttgaagtgctggtgggaggtttgggggacctattgctattaatagcttataggtagatttgaaaatgttctggttgacaatcagttgagtttatctaaagacttggagcaaatagaaagaaattaagataagttaagataacaggttgtggagaccaaagttcttatttacagaggaagccttcaggtagcaggcttcagagggaacagatcacagatgtttcttatcagaggtaaggtctgtgttgatgttagtgctgtaggatataatgaggtctgtccggcccccacttcccgtcgtggcctgaaccagactctcaggttaaaatttaagagtgccctggcagaggaggaggttcattcagatggttggggggccatagaattgtatttttggtttacaggctcgcctgcctgtgggcccctttgtgactgcccaggcaagccgctaacgtgaacgtgctcctcttactgccgccttctaacccaggtgacatcaatcacttactctctttctgctctttgctctggtcccagggaagcaggtccttttactcctttccttcccgggcttgtgcacgctgggtcaggccccatctcaccatgactgctcatctttttgggcaccagagcaataaggaagcaggactcaggcccccaactcctaactccaggtgaagcccaccctgagctcaggaacagagctgcctccatcgggtgtggagagacagagcctcctccccagccatgcctcctcattggcccatgggagctgctgtgactctgaccctgtacctggctctgtcaactggaatagtcagtgggcagccagcacacctttgggtgccatatgtggtgagatcctatcctgacttgacattttaaaaagttgtctataaaaagagccaaactctgtaaaatattggagagatttattctgagccaaacgtgagtgaccatggcccgtgacacagtcctcaggagacccggagaacgtgtggcccaggtgatcagggcacagctaggttttatacatgctatagggcataaggcatcaatcaatacatttaagctgtacatcagttcagacgggaaaggtggcacaccaggaagcaggggcttccagatcacaggcagattcacagattttctgattggcagttggttgaaagagttcatctaaagacctggaaccaatagaaaggaaatatctgggttaggataaggggttgtggagaccaaggtccttactatgctgatgcagcctccaggtagcaggcttagagagaatcgatggtaaatgtttatcagacttaaaatgtgccagaaacttagtggagtatttcctggatgaggaaaaaggcctggaaagggaacaggattttctacagaatatagactttccccacaagagacagctttgcagggacatttcaagatatggccaagaaacatatttagggttaaaatatttggattttcttccttatctgtcatgtgaagttacgccagagtaaggttggaaagagccgagttacacagggttagtaagacccctccaatgaggctttgtggtttgtagggtgacctccccaggccccttaggtaggaatttgggcaggagaagaaaaaggtcagagtttagtcctcaaggcacagacttatgttcttgaccctccttccatctggtggtacattcaggctaatggaaaaatcctacgtattccacgttcggtccgtcctccctcctcctgcctaaagggttctagatgtgtgtagtgatacagctgggatggttatttcttcaggaagcgtcatcctgttcttcttcttcctgtttatcctcctcttcctgcccaaatttctgcttctcacactggagtccttttgtgtttcattcatacattaactcaaggcctggatccagaaggctgattcctgttagtgcctgcagttgatgttttctctatgacactcttagctgactggcggctgtctagatgagggttcaaatccagactccatcactcacctgctacgtgacatgggcaccttctttagtcttgttgagctttgtttcctcatccttaaaaacaataccaatgacaacaacaaaactaccatgcagagcttccatgccctgcacagagactagcgagtaatgaagtaataatacagagtcagcccccattccctatgcagtcgacttctgcaaggtccaagctcacagtgcaaattgctcctgcaaagctactttgattaggctcattccttgaccttcttccagacaaatacgtctcagacagggagaaaaaataagtccttcatacatcaactggtgttaccagacgtggcactgagtcccagagtgtggttctaagatggactgagttctgcttttccaatggcagcaacaccacgtggaagtgttgagggggcctccttccataggagctgaccgtggcatctgtgttttcaggtgtctgggcagttgcatgcaggagacttgggctggtgtgtcactcttctcacttcacactgagctgcctggttgcctgcgaaactctgcagggtctttgggttcctgttggaccagttcagcctgtcattctgccacgtcctcctctggcaggatggccgctggcccacacagcaccagtcccaacagtgaggcaggtggcttcctcagtggcgtttggcaacgtggctttctatctgttggaatacaggtcagtcctcttcacacccttccgtttccctaatgattccccaggttgtcctgagaatgcaaatcagtttccaggagctggcactctccacatttgggctttcatgatacctggtggtcagctcacccacccccaagggcagtcagcggggggatcttccaggaactcttggtcatgagagtggtaacttcctgatgtgcctgcacagacacagtgcgtgtgttcattggcagcatcctcacacctgtgcagcatcaggcaggcctggctctgcatgaggcacatgtcccagcaggctggctggaccagcaggttctgcccagtcagacttccccaccacaccaagcacagacaggatgctgggtccacaccctgctttcatctgtgtccagctcagatgcaaccttgtgctcctcacgggttgtatgctcgagtatccaagaagtgagtcttttgattggacctgagctaatctctctcagattggtgaaagtgcaatgagaatggatgctgtgtattgctgttaactctggttatcctgcagtggcacagaacactgggctccttcctcccgcctagctgtgattttgtgtccatcacacatctctccctacccctcccctctccctaccatttccagcctctagtatcctccattctactttttaactctatgagatcatttttttcttttcttttctttttttttttttagctcacacatatgagtgagaacgtgtggtgttgaactttctgttcctgacttacatcacttaatatcttgtccccagttccattcatgtggccacaatgacagggttttattcctttttatggctgaatagtattccgttgtgtatatatactgcattcttcatccattcatctggtggtggacacctctgttggttccatatcttggctattgtgacagtattgggatgaatgtggggcagatgtctctttgatatactgacttccttccctctggatgaacacccaggagtgggttagctggctcatatcgtgattctatttgtggtttttttgaggaatctccatactattttttatagtagctgtagcagtttacattcctaccaatagttttatgaatttctaaaccttgtacaatagtattattcttcccactttaggggcaagagatgtgagaccccggcagtttaggtgacctgctcgaggacacacactgtgcacagtggctgagcctactcctgccacatccaggagacttcagagtcccgggatcccagctgtgctgtgctcctccttcagctgtgggatccaaggcatggtttattccaggactcttccatgtttgggaaattttcacaggacactactgctgttgtttgtcctccctttctcaagtctaagcaaaaaaaatgtatttatgggtagcattctttagaatttaggaaaccccgggagtcgtggccatccctgtcatcacacctggtttctgctttgacctttggtaccaataaacatgagcagctgccatcctgtgcccagtccccggggtgtacctgcagcccacgctggctgtctttgctgttctgtgcccaggtgagatgcgctgcaggcagcagggagccacacagacaacgcccaccctcctgggacttggcaagcccaaggccatgcacaggccaccacagactcccctgatgtgggctcatcaggggagccagtgggccgggggcacgttacggccagtcaggtgcatttgtctccagtaggatcaccctctgtgaaggtagcagcttgcaccttgttgactggtcaccagtgacatggagtctggccaaggagccatcttcaccctgagaactgcgcctgtgcccccagtgctcctgcctggcttctgctgtgtgcctacaaagctgggctttgtgctggcccctctgccttctggcctgtgacctgccttggcgacctacccttagccggtggagccttccagctggcctctgaccatggggctctccaggccctgagtcactgctggcctgaccaattcaggtgtcctggcttttgctgcagggcttctgtcctgggtctcctgattgtccagttctgggctccccctccacaaaagaacggcccctcctgcaaaagctctggtcagggcaaatccaagggcagaagaggcagattgcaggtcaggcagagagtggacgggcagctgctgggccactgtctccaccgttctctggctatctctgtctctctctctctgactttctctctctctgtctccctctgtctctctatctctctgtctctttctctttctgtctctctctgtctctgtgtctctggctatctgtctctgtctctataactctttctgtctctctggctatctctgtctctctgcctctttgtatctttctgtctctctctgtctctgtgtctctgtctccctatctctatgtctctgttcttctccctctgtctctgtccctctctgtctccttctgtctgtctcttggtcccagctggcagctgactttcctgtcctcccaggccctggcagagccaccaggcgggctcctgtcctgtgctgtcctggacccctcacccttgttgctgctctgggtcagagcgctttcttcttgaagcatcctctacccaccccagggacttgaaaaccggatttgaaatgccaaataggtttaaaattagagctacagaatgtcttcctcagagcccagacttcccgaggggtcctgtcaggcacagacagggctaccacaaaggaaaaagggacacattacattacattacatgaacctcagtcacttgttttcactgacatatacctgagtgagggcgggaagcaagcccagggttggggaaggtttgacaacatggtgtctagaatttatgccaattgcagtcagtagccgaagaggacagtgccacagagaagcagccaaaggccaactcgggtgtccccagggcccgtgaggccagcgcacgtgagactggttcatcagttaccatcaaagctgcacggtgggtgcatgaggctgcagcaccacaactccatggccaaaatggcgctgctgggatcatgaggacccacggcctgccctcacctgacaatcaggaagaatttagactttgtcagtctcaaagaagaaaatgattataaaatccatacagtgttccagggttatctgacaagcaagaacaccagtaacttagttcattagatgccttccagcgacaggatgctacttagacaagttcccctgaaactcagggctgcaagtctctagattgattatctgcaaatgcagccatctgcttcctgctgtgacacttcattcctccgccctggctgcactgcagacagacgctggggagacctcgccttctcagggtggcactgtgtggaagccagggctcacccggctctgttcccacagggtgggagtttttcattttaacagttacagaatcatctacacggatgtcaccctgacagttgtaatgtccaggaaaagttgtcatccatgtgattagcacagcttgccgtgtgttctgttttgatttgggttttgatttttaattaactttgacgaaaatcttttaataaaaatctttgcttcgaattttgaaaaggtacacagcaacctgcaacacacaggcagatgatcaattaaaagaagttaaaaatagtccttttcctgcagagtggtacaaattcactagttaagacatacttattagatgtgttaaaaagaatgtgtttcagtggaaatctatggcacatacttttaggctgttcgttgtctttgaactattttacaactctttgagaattgcaggtaactgacggagatatatatagagagagatagatagagagaaagagagagggacattctgtcctgtctagtagtgatttttactggcttcttcaccctgtaaaaaaacagctttctctccatttgcaattcatttcaaaattcctttacaccatataaatgttttcacttttcctttgaacaggttctaacatctgcctagttccctcctatcgtatgtgtaaaataaaatctttaacacttctgcattttaatatcttggtgcaagtcatgattttacctttttctgaaaattatctttcagatagtatatagatataaagtaaagaacatgctgtactgtttagatttttaacccattgcttatattttattccatgtgagtgagaatgggcttccgggaatcagaaaacatattctttccttgtttcagtcgagtataaccatagatgaagtgtgtaatactcatggaattttccacagaaaaatgtgcgtatattttgcatcaaacagagcacagcaacagaaaaatcaaaggacaaagcttttagtttgcacatagtagagaatgaaaaagatgccagacccttatccttggagaataaaagaagttggcatgcataaaagagagtaggactgcctgacatatgacactcagttgaatttagtttgaatttcagtggagtcctgctgagaaaataagactacatgaattacctagaaaacattaccaggcaatccaccattcactgtgagattgtgtaataagcgatgttcttaaggaagtccatgagcacaagaagatgcttgctttgggagaattccagtgcctttacttcctctttagttcctatcactggccttttattgataagtattagtttgagatttcaaaacccaatctcatgtttcaaggtacagatgtaactgtacatttgatactcaaaagccgaggatgaggtctcaggatcagcaaaactggccacctgccttgagagtggctcctaccccctgcaggctccccgtgagctcagatggtgccttcaaatcctttgtagaggctgggggaggggaaggaggagcacatttgttaatgagggggaaaatgctgtgtgctttcaagggaaaatgctaaattcatttcaataacatatgaattacttgctgttaaggaataggcacccttcatctcaatagaaccctgtctttcaaagccttcacttccgtatccttgaggtttctcttcaaagagggctgagcacattcacccaggcactaggaggccctgtgcattttttgtcctgctgtttccatggataatttaaaaagaattatgaatatctcagtccttagagagtcagacagagagccccgaggccgctcagtctaggtcagctggagtggctccctttgtgggtccctttgctggctggaacctggccagagctcgcaggggacagcactctgtcttatcataagttcctcaaatgattgttgtatagaccaatgcataacctgctgacactggaatgaaactagggaaaaaattgtatgcttcactgttaaggaaatacagcagtattgagttaggtaaccggttggatcaaggttgatactgaaaacgcccatcagcaggcaggcccttaacttgaacttactgtgtcagtaagaaaaaggagtacaaatttatctctatcacagcatttagaatcatcttcaacaggaaacccaagccatacttctttcccttagcaaaacaaacaagcaaatcaacctatttttcagaggttccttctgaagttgaaattatcatgattgcccagaaggatgtcccaccaagaggagcctcaggcggtaatcccaccaaaaggagccccaggaggtcatcccactgacaggagtcccaggaggccatcccactgagaggagcctcggtaggtcatcccactgagaggagccctagaagatcatcccactgaaaggagccccagggggacagcccaccaagagaagcctaaggaggtcatcccacggagaggagccccaggaggaggatgcccaccaaggggagactcaggccaatcattagccattcctcttactcccaagctgcctgtttattctgagaccagagggtcatacatgccctccctggccaggagtgagaatggattggagttgaggatgagatgagttgagctgaatacttcttgtagctaaaaggcagccaggaggcctagcaacagagcaggattctaacactcactccctggcctgcagggccccttgggaaagtgagttttagatgcacgtggggaggagagagtatgtgcaggagccagcaactccacaaaacgcccataaattgtgtatctttttacaacgtagcctgtgtgtggtgaggggagattcaggctccatgactaagctctgggtggattaggggctgtcaaaaaggtgagaggggcttttggcctcatggagttgggactcttcatttgctaggtgctgatgtccacaagtcaagccaagcagtgggctgttcagaagctggcccagcccggccagccagcagcagtgcccacatctgcaggtggagcttggcctgtgtagctgactctcaggctcaccccttgactttcctttcagaggagataaggattctggtttctcaattaaagaaagggaataaacaactccaagtcatggtgacatgtagatgacgacctctacttatttcctgggaaagtagactgagactttatggtctttccttaagattcatatggaaatacatgtgtgttgtgagagataaaaaacaaacagaccagcagactaatttttattgtaccagggagagccgctatgctagaatcagtctttgcagggtggcttatcgtagactttcctgggacggtagacaagtttcagacagggtgatgtagagctgggggatgcctcagtccatcagctgaccaggaaacattttcaatgtgtctgtatcattccagggggtctagaggttctactctcagctagtcaaccatgagagagagtggaggcctgcagggtgtgggtctggccttgtcacaggtaaacaagaggtcatcacacacctgatggggtcaagagaaagtgtgcatagggggccccaccaaggtctgtgggggagggggattttttgtgctgattctttcctggaacagaaaaaggtggggggagatttgggaaaataagaaattggagggattttatgactattattgttttcttggagcatgggttcaggttcacttgaaaatgttgacaagttcattgtcagtaaaaaacaacagattttgtagcaaatgttcaagaaatggtgggttgattatagactttcttgtgtcccaaatatcaggtgaaatgtggattctatatgttgatgaaaaaacctaaactttgtaaagtattagaaaagatttattttgagccaaatgtgaagaccatgatccaggacacagatcctgagaacatgtgcccaaggtggttgggctactgcttggtttcatatgttctagggagacagaagacatcagtcaatgcatgtaatgtgtgcattggttcagtcctgaaaggcgagacgacttgaagcaggggcttccgggtcagaggtgaattcaaagattttctgattggtaatcggttgaaaaagttattatctaaagatctggaatccatagaaaggagtgtctaggttcaggtaaggggttgtgaagaccaaggttttattatgttgatgaagtctcataggtggtacccttagagacaacagatggcaaatgtttcccattcagacatttaaaaaatgctagactctgagctaatcactttggggtccacaaaagacctggaaaaagaagaggattctttagaaaatgtaaattttccctgcaagacacagctttgcagggccatttcaaaatgtgtcaaacaaagttatttttgggtaaaatatttcgatttctttcaaagcctgctatctgtcatgtgatgctataatagagttaggttggaatgtggtgtcttatttctacaaagagtctgttttgtcatgcttaagatctctgttttcatgtgaagtctggccagttgttcctgaattccaaagcaaggagggtataatgaggcacatcggaccttgccttcccatcgtggcctgaactagattgttaggattctatggaatccccttggctgaaaagaggggtccattcagtccgttgcgggtcttacaatttcattttggtctacagttatctgaaagtgggaagggtaaggtggcagggaaagaggtgggtgcaggtacatctgcaaaactgatttctgcgcttgtcctacctctaaaacatgctcactccctcactcccccgcgttgcctgccagctagaatgagttgcggaacatgccaagtttgagatacacacacacaccttaattttcattctttcacagttggtctgatgaataagaggtaacagagacccttcatcatgttcagagagaaattataactactcaatggttaaaagagtatagtcacaagaaagaacatccaaaaaccagcatcaataacaacttacgatgttaaaaagacagtaatttgtagatatttcaaagataaattgagtcttcgtggtatgagggcatttcagcaaacgctttcatagcatcaggatctcacagcacattaaatcccatctgggaaggttcacactcagggtcaggctttccctcattttggcagagcctgtacgttctactaaaactctactaaaatccaacaaatacttgctgaatgcaaacaagtgcgaaacccagggcaaaatgctctctggcttctgctcacttctgggcctggggcagccccacagaacaagccttgttccatcttcaaaacactagggatggggcagattttaccagaaccccatgggtacgggagcacttacagaccctctactgcagcatggaatctttcttcttgttttttaaactttatgtgacatttttcttcatagaccacaatgataacagttgcgtgagcttctagagactggcccagtgcatgacatgcagttggtgttaactaatagctgatgagcagataaatcaagacactcagttcctacaaaataagagacacagtgtgaaggcagtggggtaaaggggtttaaaaacaacttccgaacatccgggctggggagggatgggggacagaggagaggaggactagaaagcgaaggccaggcatgcccatcctctccgctaagccctgttcattaggtttatccacacagagctcacgttgcccacttgagtagatactgatcatggctttcgggccactggaaatacacagctcaatatcattcattaactgaacacactgggtaagaaaaacacaggatattggggattccttggaaaaacagagtcttgcctgtagtgcccacacacagcccattttcctgagaagggccctggtcccgtgtccggggtgcagacccacagtctgggactctgagggcggtcgccacaggtgggtgcgttgccaaatcgtggctgcttgagaacattgggagatcttgctacagaggtccgtgggtccttaccttgggaacgccggacacagcgcacacagcccaccaaccccagacccctggtggtatcacgctgtaagcacagaactcctactcgccttgtagtcctctccataatcctctccagttctcaaaacacatcatcagcttgattttctcctcggctgtgccagcataagccaacctgttccttcccacaccgtctgggccttcgggccctgccaggtggcaccactgcagaggggcaggactgagtgggacacataggtgtgtggttacctgcccgagagagggtggctgaccatctgggacaccatgcccagtcacactccctgccacacaggctggccctgagccatggcatttaggccaaggggaggggccctggctggcatttgtcacacgtcttcccgtgtctaaagtgcagaattcgggaaatacttctgagggcaggattgccatgtagccagctgtctgccagggttcatcccagggcccaatcccactgtgtgcttctttacagctcatcataaacaggtcaggacaaaaggagttgccagccaggaggggaagtgagctggggcctaaatgattggtgatgagccgggactcacactgcagtgcccacatgtgcctcgatggtggcctgactcgcccgtggggctggcggggatgagagttggcctctgtcgcaagcacagggctggagtcgtggaagcggcttccctgcagctgctgctgtctcaggtgacggcatctggtacctgagctggcattcagtttctttataacccactggggtgggggttctggagggcggccctgggcagcagctcaaccaggagaatgggcagcctggagggtaggtggggggcttagcttaccttacagagttctttctacaacaattcctttataaaagtgtagttttctttaaaaattgtattcttcttaaattagatattcttctttaaagtatagaagtagtatataggtgcatgaaataaaaagagtaaacatacccctttcctcccaccaattctatgtccagtgaagagttagttttctttctctctctctctctctctctctatatatatatatatatatacacacacacacacaatgagcctataatacattttgtatatatgcatgtctatatatacatgtctctatttatattcacatatggctatatgaatatatatacatatcttatattcacatatgtatatatggacatgcatatatacaaaatgtgtatatgcatttttagtcaaaacttaagcaataaccttcaatgcttgtctttataagatgttctcccttcatcatatcgagtacctttccagtctgtctgtctatagctttccagcaaaccctttccaaagacagtggagaagtttccagcaggagcagctgctgagagacccacactgcacatacaggccttaccgcccgctgagcgggaagaagcggcacagtggcttctcaagggaccactgaaaagaggcggtcattgcatcgtagctggaaacaaacggggaaaatgcctcagtctcacctgctgacactcgctgagattttagaagccacgcgctgcaatagcggctggagcgaagggactgcaaataggtcacgtcacccaggatggcattatctcgcttggggacaaagttcaaattgtatggatgtttgtggttgtgagagcaaaggcacgaaattatctttggagatttttgggcgtaatttcccatcactgtatctttgtctgtatagacaaaaataattgatagaaaaaatacctagaaaattcaagcatcagccgggtgctgtggctcaagtctttaatcccagcactttgggaggccgaggcgggcggattgcctgagctcaagagttcgtgaccagcctgggcaacacggtgaaaccccgtctctactgaaatacaaaaaattagctgggtgtggtggcgggtgcctgtaatcccagctactcgggaggctgaggcaggagaattgcttgaacccgggaggcggatgttgcagtgagccaagatcgcgccactgcactccagcctgggcgacagagcaagactctgtctcaaaaaaaaaaaaaaaaaaaaaaaaaaattccagcataatcagcactttctgcccctcatccaggcttagaagacatgtaagtggttggctctcggctgtacaatcacagcccggcttcctcggctatccaatcacagccgtatttggctctcagctgtccaatcatagccatacttggccctcagctgtccaatcacagcccggcttcctccactgctcgctgcactcagctggatcttttccacccaaagtgccacttgctccagtttgcagggttcatagaaacggctgctgagctgcagacctggtgatgcttgggtccagccgagctgctctctccaaagctggacactgctctgccgcccgtgtggagatggggtgtggatagcgtgtgtaccaccccatactccctatcgtcccacctgctctagttttgggatcgcacttcttctctccatgggaatttcagttctctattttgcttagttgttcactgtttggttcctccactagaactaggcttctgtgagaatggagacccctggcccttttatcagtgtggtaccccagtacattaggaaggatgcctggcccagggtagacgctcaataaatagtgtggacgactgtagaagtgggtgctgtatcccaggctgcagagggctcatgggaaaggaaaaggacctacgaacttggaaaataaaaagggtgtgtgtgtgtgtgcatgtgtgtgcatatgtgtgtgtgtgcatgcgtgtgtgcatgcgtgtgtgtgtgtgtgtgcactgtgcacatgagtgtgttctgaaccaggacctacacgatccccctgactatgagagtggaacaggccagattctccgcactcgggctcacctagcgttgccgccctgacagggagagtggaagacggtgatcaatcacagagctgctgctctccttcattctggtgcaaaatgagggtgccttagcccaatcagatgctgttgttcagggaccctgcaggcccttgacggtcttggctgggtggtcaggccactcacatgtcccaggtggagacgtgggctgagagaaagacccagaatcccaggacatcaccagcagctttaaccacaccgtggaagctgggaggattcacaaatggtgtgaggatgggagtatttccagccaggcttgccacacgatgggtctctgccctctctgataagtaatggaaattagctaagggtcttggctgagggcctgacatagccaactggccccaaagctttttctctgattggctctctgggttctccttggccgaggaagaagccagagccccgaatgcccgctcagctcaggaggtggcctgtctagccaggggaaggcggagtggtcagcccccgccaagatttaagatgctttggaacatttgctaagagaaaatactctctcaagccatggttgtgttagcacaaattgttcttccttacacacacacacacacacacacacacacacacacacacagcatgagtacatttatttccaaagtgtgaaattccctaaagtagccaagaactcattctactccctatagataccttcttcatctttatgtggataaaaagatgtaagatacatttgagtttatttggtattgcttttattaacaaagatttcagatgtaaatgtcaagaaaattgatattaatttgcttacatgagtacattccttaaaaaagcaaaccattgggtagacttcccttaaattaatctttagattcttggcaggaagtttggtgatttacaaggtgattctacagcatgaagaacgcatggcgcctgtggtgaactcagccgtagcaaaacggtgccatctagtggctggtgaagtctcggttttccggaacacgcgtgctctgagctttgtatcacccagggcatctgtcattttaacgtccaatgagtgacctgcagattcgagcagatctacagaaccacctcttttctcaagctgatagagcccagatgttaattttaaggactgaagtggctattgacaccttttaaatcctttacacgtacccgtctttggcctttggcaggtcagccctgggccaggccatggctccagtgcacacacagagctcataacgccaaaaccagctctgagagccaagccagctctgggtttctagaggttgcactctcttccctcaggcaactccatgtctgcaggaatgtgtaggctgcgggaaggcagcctcaggggtcgggtaagataagagtgtccctttgtttatgacgagaccactgggggaccatgtctaagacctgccctggtcacaggaacactgaggggtgctgggaattatctcctctaagagaagcattttattctgctacagagaaaaggcagagagtgaaatatactgttcatttaaaaaaaatcccttttaacatagataaaggggaggaactgggaggaaaagagagaaaaagcagacgtaactgaagccatggtttcagaaattcaatcctagtagaagtgctggagggacagggagggtgtggctgggaaggatggaaacagaccaggtttatttgtgcacaaagggaagctccttagaaggcataggctggtgaaggggaggggaagagcagcctctggaaacagcccccagagccagagagcgagtcctagaggatggggctggtgagttgaagcaaccaagggagaaagaccagcagacagtgcaataaaacatcaggaaggtcctctaatatcaaaatacaggtcatccatgggaactaatgagaggccagaactgaagtaaactaaagtgttgccaaaaaataaaaataaggtccaagttgattgatcgataacacggttagtatgaagaagtccacattatgctaatttctttacatattattctaatttgtattgtctctgaaagtcaaaatatcatcttagtcaattaacatttattggtgataacatttattggtgaagttgaaccatatatgtatcttgaagttaacatttttgctatatatcgggtgctgttctaggggctttcaaaattatccaagtcttgaacttttgcaaccctcctttttaaagaggaaacaggttcggtgactcagtgacccacctgagatcacctagctaacaaattacaggattagggtgtgaacccgtggagctcatctgtttccatgctcagaatccctttgctagactgcgtggctcttatgtctatgtaagcatgatagtccatgtttagttaatataaaaagctattgttttcataaaactttcattttcactgaaatacattaagtgacaagaactttaccccatttatcattggccctgatcttctgatggtctggcaagcttccctgagtagtgttgccaggatgctagacttacctgcgagatttgccttatagatctaatctagacagaaatggctgacttcacagaactttggaaacaatctgcagacatcaagttttacttataattgaataaaaataatttttcttgcttattagctatgacatttgtggtaagttgcttaaagctccagacttaccccgtctaatacagttgtctctagccacatgtggttaaattttaattgtaattaactaaaaggagatgcagttgtgaactcattttatcagttgcacttgccacatttcagaactcaatagtcacatgtggcgagtggctaccatactggacaacactgccccagaccaaaataccaaatcatttaacttttctgaagctgtttcctgtcttataatgggtctaagatttctaatgatcattagcatagcactattgttggtaacatgaaataatgcatgaaattctttgcatattgtaaagtactatactcatgtaagttgttttttcttttaataattgctgtactgtgttgtgaaactgtacagtctttgcaatactaagactttggccccaggatcttacaatcacgttagctctttttcagaagttgaactatgtgtcttgaagttgacatttatgctttgttctttaagactgaagtcctcattctgcaccactgacaacttctgacagtttctcttactgtggaaggttctattctatatacacataaaaagtgaaacatatcactttaccatctggaccatgtctattagaatttaataggaaaaaagcgcaattaactagaagctggtaagagtaatgatcttttgccccatacaaagtggacattgtggatcacagagaaggtaaatgagtaacagagctcccgtatgcttcatggggtcagtgataaccaagttcattaacgagtgacagtcttaatgactaacacacctctaacatttcacctctagctcagatgagagagagaatgggacttcttggtactgattgtttttcccatgcctcaattggtttcttttagggagctacaaatttacgtgttcactggtgattgatcttttcatccagcacaatggacagaagtctaaggaacgtccttgtggtttcctttgggttcctgcttctctttacagcctatggaggtctgcagagcctgcaggtatgtgtgtccggtcatcaaattacctgaacttcttggcctccaagaatccctgtggtcacagacaataatgaattggaaatttgaaaaatctaattcacctggtgtttctttttcactctgtaccaaatcctctaaaacaaacagtggttctcagatgcagtcctacagtgagcagttcccactcacgtctcaataggattgcacaacagcgaggtgcacgttgctcttggacaaggacagcaggggtcttgggactgtgatttgttgggacattctttgcctttgggtggttaaaaggagacacaggaaaagtcattgtgaattctatgattgattggatgcccttggctttgtggttaggggcagccatgtgaatttatcaaatgtcactagaccttatacattccaagcctactctaagctaaactgtgaactttgacaacatgatctctctatactttgaactccttatggcatgctctcctccatagttccgtgagcccatgaaaaagccaaacggcattctccgaaaggctgcagcattcatcatgtgcacctagacatagacctgacacattttcccaagctggttacatttcaagtctgatctttacctggattccagtctgaattccagggaattccaagggctggtcaggaagcagggctattgttactcccccggcttattcattgccacagtgttgtaccctgtggcctggtgtggtcacataaaacatttcagagcttctgatgacaaattagtgtggtcttacatggttcgtcaatgaagaataagaattgggcacctactgtgtgcatagtatggaaccagaaaagcacacctgggaactcagaatccgaggtttctcctctcactgttgttgtgcaaacacttgggactcctgggttgccaaggaagctggaattcagtcctgaattctcaagtaatgtttccttttgctgaactcctatctggttctatttctgatcaggcttacagaggataaaatggcagccaacagtgactctcaaagtcaagtggaagggaacacagtctcttttcttgccgcaatggttcattacttttggagtccctgctttgcccagaactttgtgttgttgtcacagaatgctggtgtgagtgaaatgcctgttgggttgaggtgagtgcatgttgaatgtggttggtgtgcactttctggaaggagggagtctcaaggatgtggactggtcagtagccctttctctttagaaagctcacctgcctgcagaaggagaccctgctgtcctcctggcacagcagctcccctggggtcagcattcctaggaaccgacagctcccctggggtcagcattcctaggaaccagttctggtggatccgctgtggctcagccactgtctgaaaattggcctctggacttggaagccagaggaagggggctggagggggctgggagctgccaggggtccctcctctcaggctgtgacggcaggacccaaggctgtgggcaaatgcgggcagacaaccctttgcctcttcagccccagtttgggggtgcctcattggggaatcactcatggtggcatctggatgagctccgcagctgtgagcagctgcctggggagtagattgtcccacgccccgccagcacttcccactcctcctgggctggtggaagtgggagctgctgtctcatgatgtcagcccttccttctcaaaagactggagatgcaggggagccagacctccctctctgcagggccccaggactgtggaagggtcccctccactccagctccaccctggttcgaggccccacccgggcctattgtcggcagctgaccttgagcatgcggacgtgctttaaccctctaactgggacagctgtctctgctactcaggactggcatgggcaacacagagtgttcagatagaagtgactcaggattggttttgccccagcatgctgaggagccgagcccacctctctccaagaaccccaaggctactatggggttggcttcgctctcaggccccaacaaggcacatgcatccccaggctccctcctcagagctcagcagccccagtgagaagacagggcctcattccagagagttctcctgagtcctcaccctggtctggactaggtcccctcgtccaaggacaaaggacgctcttttgtggcacctccccctgtagccaccacctcctttcaccctttctggctgcaggcctccaagttctcattcagctctcaacttggaggtcacctccttctccccaccctgccctggagctgaggtctggatggggcacccagcaccctcgtggcggtgtgtgcctgcccgggttgtctccaccagtggtggcggcctgcagtttccaggatacgagggccacgtccctggtccattctcaaaccttagacagtgacgggcactcggaggcgggcgatggatatttggtgaaggaagaaatcattcatgtgcactcagctgcttcatatccttcgggcctccccatgggctgaaggaccccttacattccctgggagcacgcaggctcctcacagatgagttctggcagagtctccagccccatcctgtcacactgtcctgttctcagctgagattcaggcaggtgtccacagaggcgtgagcggctctcacagccatccagccccggcgcaagcactcacaggggtgccgggccttcactccctgatgtttagacacactaactgctttattccgaattcacctgcacttttctcccaccagcttcagaggaggctcccagggcagcaagcctgtggctggcggttcctgggagctgtggcggcctccagcctgggggacactgaggacctgctggtgcctcatcccgctgtgtccatcctgtgctctgacagggctggctttgttcccacagagcagcctgtacagcgaggagggcctgggtgtcacagcgctcagcaccctctatggaggcatgctcctgtcctccatgttcctcccaccgctcctcatcgagaggctgggctgcaaggggaccatcatcctctccatgtgtggctacgtggccttctccgtgggcaacttcttcgccagctggtacgcagccaccaccccctgcccaccccaccccggccgttccccacgctagggacgttcactctgcacatgagttgcatttgcacctgattactgttcactgcaggcattttaaaatgagctctcctgcccctgcacccccgcctcgctttggtgacagacggtgctgggcttccttcctgttttcccaccaaggctcctctgtgccccccactgcttctgtctcctcctcccgatccccgatgctggcctctccctgggatccgtcctggtcctcagctcccctggctgggcgagggttccagtaacacaggggactctaactgcaatgcagatggtgagtctcgtgggcacctaggcagatgtcaccaatggaccgaaagctgcacctcgcccaccattaggaggtgggtatggccagggcaggtcacagggatgggaggccaccctgctccctggtgagatggaccacagagactgagctctgagggctttggcctgcaccccaggccccgggaacacagccatggagcatctcttccagggaccctggttgtgccaggacatgctgctgatgatggctgcaagtccttcttcccggtagctgcagagtcttacatggcatgccgccgctgaggcccgagccggtcactaggtctttttaaccggggctgtccctcggcctccctcgtgctcctcgcctccctcgtgctcctcgcctccctcgtgatcctcggcctccctcgtgctcctcgcctccctcgtgctcctcgcctccctcgtgaacctcgcctccctcgtgatcctcgcctgcctcgtgctcctcgcctgcctcgtgctcctcgcctccctcgtgctcctcgcctccctcgtgatcctcgcctgcctcgtgctcctcgcctccctcgtgctcctcgcctccctcgtgctcctcgcctgcctcgtgctcctcgcctccctcgtgatcctcgcctgcctcgtgctcctcgcctgcctcgtgctcctcgcctccctcgtgctcctcgccttcctcgtgctcctcgcctccctcgtgctcctcaccttgttgtttgcaatcgcatccgatacaaggagcctcactggcttcaatttcacttttgcaaatcagtccaagctaggaaatgcactgatattgctcatttttctgagtgtaatggtgaatccatccatccaaccagcaacactcatcaccacgcttgcaatgggccaggcggtggttccttctcccagattgactaaagaactgcagggacatgggtgcaatgggcttgcgtctcctgttacaggctatgggtctgcattttacccacaggtacactttgatccccacctccatactgctgggactcggggccgccccgctgtggtctgcacagtgcacatacctcacgatcacgggaaacacacatgcagagaaggcgggaaagcgtggcaaagacatggtgaaccagtattttggcatcttcttcctcatattccagtcatccggtgtgtggggcaacttgatctcatcgctggtatttggccagactcccagccaaggtaaaaggaaaaggggcaagcaattgtctccaagtggagcaggggtttcagtgatgggggagagggttcctgatttcagttgcacacctgccttgattctgtaacttgagcaggtgagtcaggccccacaggtgagattctcaacctgcctgtgcttcagagttgcctgttacctgctgtcttctggacagtcgggtgggactgaagaagatctgcgtcttccacaggtgcctccgcaggggcaggggagcccttgggagagggcgccatgggaaactgagggccacgccagtagaatttgtgttcatggagtctcaactgcacaactgtcctttttagactaaggatggggttgcctgatttcttttccctgtgacttgatacaatgaccagattttcaaatgttttatgacaggccccttatcccatgacagatgtggacattggatgggctgatgccctggctcctctgtctctacccgaccttgccctggtataaatataaagtgcatatctcatttgtgcccatgaccttagtgcccacgttgaggctttaagcacagggcagaggacatacatctctttcatgcttacaggaaaactttcccaacggggtaaaaaccaatccagccctcctgactagtatcacaactatttctatcacttcatcaaggttctccatcttgctatcccataaaaatcccacgcttggtaaactctgtagccaaaacccctctccctttttctcatgcgatgtcatgcctgctaagtgcatttgaagaagggaagccgtgaaggtgatgcatagcaatttttactcattattgctgttggtgtcagcaacaatgaaacagaaactggggttacagctcagtctgcatatcacggccagtgaagtggaggaacaggcatttctttcgaagacctttctgcaggtgagttagttctccaagtcagcacaggacacagaatctggggctggagggatttggagggcgtcgtgtgcttctccaccttcttgtaccttctcttatcagctgcacatctcacccacctagaagattttgtgaagctgtctgttatataatttgtgttattaaaataataaaaacactgaatattctttctcccaccacatctttctcctttccccagagattctgacaggacttctgactgagagtcattgctaattcaaattgtatttttctaagagatcacagaactaacgttagttttcaaaaacagaaaagttatgaaatcacctgcccaaagtcattgagttggtaacagatgaatctgaaagagaatccagcattcctggcacccaatctcatgtacttttttctttttgactaattttgaaaacttgaaaaattttaattatgtcagaaaagcagtaaaacaagtaaccagcacttttccaagttcattcttccctgaatctttgcagaacacgaataggattttccacctcccaaagtgtcttaaatcgagtctagggacatgtgcctagactcgatctaaatctattttgagacactgggtctttccacgtgacctgtagtgatgcctccccccaggtgtccaatgtcctttccactgtcactttgatttctcaagaacctacatcttgtcacatttgccgtcatctcatgtctcctgtccactctgacttcatagagacccttccagaagagcagctcacgtcctgtggggccagtgactgcctgatggccaccacaaccaccaacagcacccagaggccctcccagcagctggtctacaccctcctgggcatctacactggtacgagctccatcggcccagggcagggtccctagcaaagcagagccaagcctccttcctgggctgacaaagactgtctctcccaatgtaaaagtaatctctcttcttctgaaatatccttgcaaaatgtattggtctggattatatgcaggcggtgttcttatgaatcaaatgcagtacacccgtgctgtctaacagaggatcctggggtgatgagattgttatacatctccagagcccaacacagcagccattaagcactgtggttgtttacatcttaactgattaaagtttcagttcctaagtctcccagccacactgcaagtgctcagcagtacgggggctggcggctaccattacagacagcttggtggctggctagggcactgggattgactgtttgtgtttcagctgtggccaaggggccctgaacatccataattgctataagccacttttttttttttttctgagaaatgtgctgagtaccttctgtggaaaggctagaggggcgagtgctcccaagtgcttgttgcaccttagctggagacgttgcaagctcatggtgaaagggctgcccaaaggaagttaattgtcatgacgaggctcattcttagaagttcattttaatagagaatgttatgtaatagtttcatatgtgacttcagtgttatagtcaaaggtttattacaactttgaaggggatacatttagagagttttaaaaaccattttgtaaataatttaaatatttttttttttggctgggcatggtggctcacacctgtaatctcagcactttgggaggctgaggcgggcagatcacttgaggtcaggagttcgagaccagcctggccaacatggtgaaaccccatttgcactaaaaatacaaaaattagctgagcgagcatggtggcatatgcctgttatcccagctactcggggggctgaggcaggagaatcacttgaacccgggaggtggaggttgcagtgagccaagatcgcgctgctgcactccagcctgggcaacagagcgagactccatctcaaaaaaaaaaaaatacacacacacacacacacacatatttatatatgcatgtacatatacatatacacgtatatatttctatatgtatatatatatatatatattctttgtcattcttggatttggggattcataaaggccttggaatgggtccttcttaaagatcaaaggcctggcacctgtgagctctgggggtaccaactcctgcactctgccggggtcagaggtgaggagggttcgtgggcactgcagagcttttcctcatgctgagatgatgtgcggcaccaacctcaggtcccctcaggccacttccacatcagaggctctgagtgagcacttgtaaagctatcgctggaagtcgacaaagtgtactgagcacgtgctaggccatgctaggccttcttggtccagacattcagatgactagaagctcgcctttagtaagctgagagcctagtgaaggaggcagacacacacccaactaaccgagaccagtccgacagtgttctgagcacagttcccagctgacttgcagctgcatctccctggagcacggagtttcaggaaagcctccaagggcgggtggtccctaagccgagtctggacaatgagcaagatttggccaggcagggaagtgatgctgaagtccctggaggcgagatgtccaggaagagcccgcagggctgggggcaaggtggaggggcagaaatggggcacaagactagctgtggcccttgatgttgtgccaaagggtctggacgagtgcagacttgccttcttgacagaccccatgccagcgtgacttagaggtgcagagagacagcgggcagagacccactgaggacggagtgctgagtccagaggagggagcaggtacggggaggcagagatggaggggctgagagagaggccagcagggtccgtgtgggttggacatggtgtggggaagagaagacagccctggggttgacaggaagatgagctcaggccgggaacacctggcttgaggacgcagtgggactcttgcatagtgtccagtgggcagtctgacgccgtgcagggctcaggccagaggccaatgcaagtgtggacgtggaggcatcttccaacatggtgactggaatcatgtcagggatgaggctcttagggagaaaaagcagagggaattgttacagagaagggagtatagctggacccctggttcagcaacactgagggccaggcagacaactggagccttggaaggagacagaaaaccaaaccagggtcttggaggacaccagggttgtagaatcagctggggagggggtttgagagtgttgagtgtggcagggcccctaggaggctcaggggggaggctggacgaggctcttagccagtgagaggctgttgatgcccatcaggcgagcaacctggggagggtgctcgtgtgcaaggcccagactgagggtttcagaagtgagtggaaggtgtggacagggagtcaggaggagccacggttttctctggtctgcaagtctctgctgacttggaattgtggtcatgttttcccagcaggccccaaggttcccatcaacatggtcccagggaccagccaggcctgtgcttccccaacacttcccctcaccacctcctctacataactaggaggctgggggactcggggacattgagctgagtcaagaccatcaggtctccttccagctccacaaattccagttaggcagccaccaacaaagacttctcctatctataaaagaacagaattttggagtgggggctgcagccttcctctgtgaagggctgacagcaaatattcctacatgtaagtatctttctgaggatcatatggtccttgttgcaattgttcaacattgtctttgtaatgggaaaaagccatagacaacatgtaagcaaatgagcatgcctgcatgccaataaaactttattttcaaaagcaggcagtgggcaggctttggcccgcaggccatagtttgctggcccctgctctagaggaacagcacaggcttctctgtggcttccaggcccttcattgccagctgtcctccgcaggtggctgttgtctgtggaacctcccctgcagggttacccccagtgtgctctctggccacagccccatctcggttcacggaatcccgcagcctaagggagtccaagtctagaagttatgtagagcagagatcacacacatgtaaatgaagaagtggtcttactattgtgattgtaacagtcctgcaggatcctgtgtgtgtccttttctataaagcaagaccatgtctccataaagaaaaacataggaagagagaaaaatggacctaaaagaacaagaacaccctctccctgggtaactttcctgggtttctgagcattgcattcatagtcaagtttcttgcaaagagccattctctttagaatttaggacacagctgtgcagcatcccccaattcatgccccacagaaggctctgagtcacatgacacccggacatacataattctgaacaaaggggtgtggcttctgtgttcataacctgcctctccccttcccacaaggctttcggggagattgtaggttgtgtcctattgggctgcttgacactgaagtcctggcccacaagacgagattgtgaagaaggcgctgccttcagtgagtggaggaaaaatgtgccttttccacatggtctacacacagtcagctcagggggtcggcttggaagggggccctgatcattgtaaataccctatggcctcctgtgcaggcgtgacaacctgccagaccacatggtggccaggacaacacagaggaaaatcaagggtgaccaagaaacacctgtggcagcaggagtcctgctttcatacgaaatttcacaaacttcatgagaatcttgagttatgaaataggaaggggaatatgtttagccaagatggaaagtagccagataacggaaagtaaagcctagaaataaatctgcatttctaggtggaaccacattaccaatggtgctttctgagacaggtgctaggattctgctgtttctgcacacagcttggaagagagctggctttgcaaacctcccagtttcaggaacgctcagctgccgggcacagtgctgcagcaagtccactgcatgggtcacacgaggacactgatgctgagagagaaagcactagataaggttggtcaggcacagtaagataggataattcccgtcgtctttagaggagcaggggtctaagttctcggaggtagaaatgaaccgttctgaaagattctggcccagagagaagggaaggatcgccaccactcttgagtcatctgtggtgccccaaacactgtgtatcattaccactgccaggtgggaggaaaacagtggagatgcaatggtatcacagacggcacttacaatcatgaggggacgaaagggcttctagtaaagtgagaaacgcctaaataaacatcagttctccatcgacagaaattgaggtggatcaaataataaagtggtgggcagatggagatttagtcatattttggaattatgagaaagtacaggatgtttcctcatggatgaaatgaatagttaaaatatttttttgtatagataacccatttatatagttcaaaatgcaaatccaggagtcccccttgtccccatttcattttgtgtggcttcagtgacctgaggctagctgcggtctgagaaccttaagtggaaaattccagaaataaataattcataaggtttaagttgcgcttgttctgagtagtgtgatggaatctcttgccgtcctgctcaccccgcccaggctgtgacccttccctctgtccagcgtgtccgcaccatagatgctccccgggccatagtctctcagtagccacctctgctgtcagagtgaaaatccgtggtacatgtagagtctgacaccacccgtggtttcaggcatccgctggggccttggaatgaacccctttgggtgggcaagcactgcactgtaaaagggtgtgcggtggggagtctccctctcactgccgtcctcagaccccgttctgcacccatagaaagtccatgcctgctttattcctagacatatttaatgcacatataaacaagcacatctttatgtcctttcttactaaattcaattggtagcgcactctacacagaggtctgcatcttgcttgttttttctctttttaccatttatggtgggggattttcccatccgtgtataaagagcttcttttttattttcttcaaatgcacaacattctgttgtagttcagataccccttaatatctttaaccagttcttattggaggacttttgcacaaaattgtttatttgaaataaacaaaagtgtagcaaatggtaccttgtgggaatcattatcctaaaaaaaaaatcaataaaaagctgtctcctgttagaaattgcgttggggattagaatgagaagcagagtccaatggttaaggacactcagaacttctggggtcgctccggaattttttgtattttatgccggtgaggacaatactgacctattgtggcaggtttcatgtgaaagccggtaagtcttgaggtaatcagagaatcagcacgatcaagtgcaactagacacctgagatccttaagcatgttgtgtctaatgtcgcctgaaatctggatctgaattagccctccctcgcgagaggaggatgagtgactgaaacaaatccttgccaggcaccctgcctctgggcccccatgaaagctgaagcctttgctatgtcctttcagggagtggtgtcctggctgtcctgatgatagctgcgttcctccaacccatacgagatgttcagcgggaaagtgaaggagagaagaaatcagtacctttctggtccactttactgtcgactttcaagctatatagagataaacgtctgtgcctcttaattctgctgccgctgtacagtggattgcagcaaggattcctctccagcgaatacacaagggtatgaacgaaagtgagggccggtggctcaggccatgcgtggcatcactgccttgcctgtgtctgtacctgcaggaccgcagagtgtctcaggccacctgcccagggctggggctggagggagcggggtcctatgctcccagtgctaccatagctgagtttatgattcaaggtctcaacctccaagtaacttccaactcacaggagcttccacttcttgtctcaagggagaacgtcttgcttgatccgtgtcttcctggggaaggagccggaacaagtggatgggcagctgccgctgactcaccccacagacactcatcggtgttacccctgcctggacctcaccctgcactcttactttagagtttacatataggaaaagcattaagtccatgaataccaccaaaatttcttatctctctagtttttttttttctttctttttttctttttttgagatggagtaacactcttgttgcccaggctggagtgcaatggcgccatctcagctcaccgcaacctctgcctcccaggttcaagcgattctcctgcctcagcctcccaagtagctgggattacaggcgtgtgccaccacgcctgggtaattttgtatttttagtagagacagggtttctccatgttggtcaggctggtctcaaactcccaacctcaggtgatctgcctgcctcggcctcccaaagtgctgggattacaggcatgagccactgtgcctggcacctctagttttcaaatcatgcttcacaatctaaaaatcgatgtggctcttgaagcttctgctccatccactcctgccaccttctcccctcaaggtgagagaggcggtgccccacctcagggtgcataaagaaagaagccactcctggaggctgttgagagctgggggccagagctggaccagcaagggcctgtgtctggcagaggctctccttccggaggaaacttctctgctccagatccctcccaggcaaggctgccaacttagcaagataaaaagcacctcagcaggtagaatttgaatttcagataaaccacaaatgtctctccaggagtatgcccaggccatagtgggtgtcctcaactttatctggcagtgctacttttaggacagccttgatggagaatcttaggagcttaaaagagtagaaacaggataacagaaaggtctacttggcgttttggggacagcccctcctgctcctccactggacttgtccttgtcccccctgatgtggctgtggctggtcttctcgtctcagtccctgttctgcgtgcccgcccttgaggtcgcccgtgatgggagtgtggtgcggtgggcatgagacacatgtgcagccggctgctgggctgctctgaggccccggaagaggtgtcagggcaatcttttcattttctctttctctctctgttttttttttaactctctttagacctaacaggtaatgattggccccagcaagggcagggtgtattggcttccatataaaatagtgcccatttcacagcaaatagtgagaaatacatgagaaagaattttgtctgcagttgtccaaactgcctccttttagttctccccaaacaggattttcttacaaacaccagcttttctcctgcatgggagccacagagcctagaggaaggtgtaggcaacactggcctgctggccatctcagagcagatgttctaagcacccgactgcagctttagcttgagcacgggaggcctgggagcgtccatgacgtggctctgcacccctctccccagtcctatgtcacctgcaccctgggcatccagttcgtcggctacgtgatgatctgcttctcggccactgacgcgctgtgctccgtgttgtatggaaaggtctcgcagtacacgggcagggctgtgctgtacgtgctgggtaggtatcagcgtgggtcccatcccagctgtcataacgatttgcagtagcaaaagcgcacagctcacagtcaggacaggctggaaaagtgcccctgaaactgctttgaaatcagtaacgccctgtaagatgcattcattctttcagtcctttcttcaccccctcaacaagcaggaatcagatctctccccaagctggctctgggcaggcactgtgctcggcatgaggccacacagcaagtgcctgctccgagtgggcactcggtgtggtgaccaggccagggtggggcagggcagggtctctgcaggtgcaaatgagggacacgaagccagtggtgaggccatggggttcacggaaagacacgctggggttggggcagctctgttccacatctattcacacagtggataaggacaagacttctaaggccacagactcctccctaaacacacagcaccttccatttttcttgggaagggaagggaagagatgagtcagagatcacgtgaacaatgaggaatgcaggcactacgaaaaacagcgcctggcatgtcaatgccccaggcagggctgggtgtgggggcgcagccagaggaagggcacacggtgagcatctgccagggccatggagcctggaggctctgcctggggtttcctatccgtcttcacggcgccctgtgaagcagacagtgttcccttacaaataggagatcatggagtgcagaagtggagggacttgcctaaggtggcacagccctggggcatgcggtgtggacctgcctttccgctgacagagaccctgctcttcctctgtggcgtcttgagcgtcaatgggcagcctcattactgcatcctagagatgccacagcctgtggaaattggggtcccaaatctgtgacctgctgggacgagtcacaaggtggggcccacagatgctacctgcctggggggtctgtggcctcctcccttttgtccccatgcccctacttggaaggctcagatgaaaccatgggcacactttgtcctaccccctggctactcggaaaggtgctgggatgcttcaatttatacctaatgagaaggcccttctctttctgactttaaaccctcttagcttaggggcaacctcaggcccagacagggtgaccttccttcccaacatgatgccagaccacacccaaggccctccaggctgaggctgcgggtcacgcagcaggtgtatggtgcagagcattgatttagagctagcagcacgcatacacatcagctcacaaattaaatgtcaaggttccaactaaaaagacgacttccagagcattaagggaacattgagcatgaagcaaacattgagacagttccagaggatggttgagacggttgagatggttgagacagttccagaggacggttccagaggacggttgagatggttccagaggatggttgagatggttgagacggttccagaggacaattccagaggatggttgagacagttgagatggttgagacggttccagaggacggttgagatagttgagatggttgagatggttccagaggacaattccagaggacggttgagatggttgagatggttgagacggttccagaggacagttccagaggacggttgagatggttgctccagcactgacccacctccaggcccctccaggccatgatgatggccctcatcgcctggcggtttcccctctgcacccccaggcgcggtgacccacgtgtcctgcatgattgccctactgctgtggagacctcgtgctgaccatctggcagtgttcttcgtattctctggcctgtggggcgtggcagatgccgtctggcagacacaaaacaatggtgagtccccagcccaggccccttcctctgtggcagcagggggcggtccctggccaaggcaactgtggggctcattagatgccaatgggccagagccaagagagatgagttgggagagacgggagggccaagagggctttgatgtcgcctctgagtctgatgtattttctctgagcatttattcagattcatgatgcaaaactggaaaaccacccaaggttccttctgggcaccattccctcaggatgatgtggttttgcttaagtcaagtcgcccattcgagctggggtgcaagactctctacccctaggacagcagtctcttcatgactgaaaacctttattcagatgtgcttgtgagcagaggcacactcccgtgtacctgggcctggggtgtaaacatgcagagccttccaaggagcccacgggacgatgggaggtggcagtgtgagccacaagccacacacatcacaggtcactagggtcagtgtctgtggacggggctctggggcatcctgggcagtggtgggttttctgggagcagcaggtgggggccctgtggatgtgggggagcaggggaggccagggtgggcttcctcctagaggctacatctgcatcacgtatgggctgaccactgtccaggtggggtggggtgcaggaggaaccagggcaggaggtggcagggatgctccaaggccttgctggggctggggcccctaagaaggcggcctggggggagtgcagaggagtggggtggagtggcaagtcgggtccccaagtgtggggccagcatgtgggggagggtcagatgcacctaggtcactggaagcagcagaaagcgctgacacccaggagtgactgggagctatgtggagtcggccccgtgtcacaacaatcaattccaaaaggcaggtgacaaggtccaaggtgcggccctgtggggagccgggagggctggttgtcggatagaaggtgacatcccatgatgatggcaggagccaaatgccaaagtcctcacagaatagggtggcctggccaggaggtcaggcagggcagtgaggacacggatgggagatgagcgggagccaaggagccaagcaggagccagggaggaaggggccccaggctcaggcagctgcactagagaggcctgagggcaagagagctggaaggggacatggccgttgcacctgtaatcccagctactcgggaggctgaggcaggagaatcacttgaactccggaggcagaggtcatagttagccgagatcgcaccactgcactcatgccaggctctgctgagctccgaggtgctttgtgcgggctggctgtgttttccacaaggagatgcgtgagagcgttttggaggaaggtcactaggaagagaaggaagctggggcagtgtgtgtggccgcttgccggagggtgtgcgtactgggtggtgttgaaaatgacacagatgaggacttagggtaggaaccctgaatttcccaaaaaaccccatctaaggccccgaggggtgtcagaggcccaaagaggcaagactgcgtgtctaagagatgctgatgaggtgagatgaagtgtcctctcggaggtgagcatggctcacatgagaccctcttcccttcaggagagacttcaccattctgcctttatctgggaaacactcggggcttagaaaatggaaaaagcaaacccacaaacgaactacaggccaatgtttctgagatgacagacctggctgctgtccctgcactgaggataaagagcacatgtgacctcagatcgcggacagaacactccagccacgtcctttcttgtcttcctggtgggttgcgtatccacaggacagctgaaaatcacctttgaacaaacccacactgttggatttaaggagccgtgtttcacagtcctttctgctgccccagtaatgcaggtggacctagtgaagctcttcaccaaaatgcgtgtgtacttggcccagcgccacactctggcttgttgggatcaaggcctggaggctggaaggggtagactggacccgaggccaggccggggcattgcttaacagaacaaatactgatttaatggaggggagacaaacagcaactcactttggtgttcttggcagtgcagaattataagctagtggcatgtcacctcgctgcaggactcttagctacgttaccaataagcatcaaacagtatttgtttaaactgtcccctggatgtgtggcagagccggtgtttcactgagctccccaaatgcacatcccattaccagaagtgcaccatgacttatctgaacttacatgaattttaaaatgtatttacacattaaatgaaaaggagaacactgggacaaatatccccacaatattccatacgataattccctaaatgctcccaatgaatgtgatcattcatatttggtttttgttcttcctgagctatgtgaacagtggacttaactctccttttccttatatggacacatgatactctcagggaaagccttgttgaattgtgcaaacaaagttacctaaggtcaaacaaagagtatcaacgtccaagtccggtgaatgactggaataaagactccctttaataagggatgctaatttaaattgaaactgtttctgtctttctgtacaggaaaaagtaatttttttcaaaaataaaccaaactggccgggtgcggtgtctcacccctgtaatcccaccactttgggaggatgaaccagacagatcacttaagctcaggagttcaagaccagcctggccaacatggtaaaacctcatctctactaaaaatacaaaaattagccaggcgtgatggcacatgcctgtagtctcagctacgagggaggctgaagctggaggatcacatgaacctgggaggcagaggttgcagtgagctgagatcacgtcattgcactgcagcctgggcgacagagcaagactctgtctcacaaaaaaaatgttggggaaaatattttcatatacttgagaagctcctgtggactttatactcgcaatcgtcatgcgtgagtggcattttagtgccgcgttcctgcactcctggcaggctggctctccatgcagcacagcacacacacaaggtctctgttctctattttttgaaaaaactggaaattttatgtagctttggctacatctcaagaacagctctcttcatttttgtttttctaagtagcaagttagatttctaatcctattctccccaaatgtatgctttcctttaagaacatatgtggaccacgtatgttcttaattaacgacaccgaataaaacccaatgcactttgtcctcacctttcagtcatcactgctcaatttaaagactggtccttacagtctcccacttagaagcaggtcagaagacttcaccatttgagcccctccttcctgggccagaattgaggatccctggctcactgtcccactgggctccagccatcccctggcctctgcaaggggagatctgtgccaggcactcctctctgcttattccctcagacagctaatgaaagatgggtgcagttgccatggcaacccttccccgccaatgcgctgccatgaagatacagaatgtctagtctaaaaatactcttttgctctgttggctgttttcagggtgataaactcagaaaatctcacttcttcagtgccctattcacttaacctgtcttctctgactaaacaagattgctggacttctcatccacatcctggtctctttaaccctgggccacctgggaagaggaggcagacaggccaggctgagagcaatgctttgtctttctaaatacagcttttattttgaaatagttttagatttacagaaaagttgcaaatgtagtacagagagtccccttgaaaggtaccaacctatagatccaatgcatttaccccgtaggccctgtgccagcttccccaaatgctgagcatctcacagagccacggcacattcgtacagctaggaagtaacgctgccatgtgacagttagtggggggacagcctttatttgggttcctccaggcttcccacgagggttcttttttctgtgccaggatcctgtcctggattccctgttggactcagtcatcgtatcttctggctgctctgtgacagcttttcattttccttgtttttcatgacctggacccttttgaagagcaccgtagtctgtaggctgttccttaattttggtttgtttgctgttttctcatgattaggctggggctgtgggtttgcggaggacagctccctggtgaggcactttcttgtcccgtcatatgggggatacaggacagggacaggcctcctcaccagcgatgttaaccttgatcccgttggctccgtggtgccggccacatctctccactgcaaacccactgccttccctttccacacgcggttctgcgggagcgagtgcccagggagccagcagtcaagaagacagcagctaatctccaccctgaggaatgtctatgtgtactctgtaattcttccataaaaaacgcctgtcccttctccccgatgtatttattactcaatcattgatctgcatcagcatgggctcgtatatttactctacactttgggtcaccatccaacaccacattatttctttattaaggtggtaagacacggggcttattctagcccccactgcgtagctgtcgctccattctccggcagccagaagcctggttcccactaggtatgactgcttccttatgtgttcaatcttttacatgtgtacagtcatttcagaattgttgaaataccattttcagtctactttcctttttaaaaaatgtctttccccactatgtccttagctgtgggtagttccatgcaattcaaaacaataaatgcattgctttctttatgtttggattaaaataggaaccaaatcttgagtaattccctgaaaagcctgagtttaattatcactggcattggcctctcctcccctagactgggctgatgtcatccacacgtgtggcttcccctttcccgagtgggacaaacggtttcccctgattcttcctccgtgtttcttaaaggcagttccagcggcttcatctgggtcctaggcgtctccctctgtgggtgtggaccctgcttctgtgggtagagctggattagcagacaggcaggagtgagggtgtcacctctgtctggggccacacctgtcttctttggcctcctccattctgttttgtggccaggggacagcccactttccagccaccttctgggtccccaagtcctccatgctggggaacctactgtctcccaaacacatctaggtgattttgaacacaagtatgtgagctagaagacagtctagctctttctctctttgttgtagatctcctcactaggtccagattttggaaccagagtcagagaatgtcaagttcttcatgtgacatgtgaggcattgagggcccggaaagtttatgtttatggaaaaactcagagggccgaggagaacatggctacttatgaagaagctgaattggccttggaccaaccagaacttgacgaagggagatggtgggggggctgggggagtggagtgagtccctttcttggaggacaacgatttctaatcacggcagcacaatataaatttcatcttgaaattcttgaatgacagcaacccatattcccaaaaagttagcttaaaattagagttgcctgtattactagaatatttataatctgggtccattggctctggttttccgacctgcccagggtgtagccgggagcttttagccacagaacatggcatgatctaccacttatagccatggtgtctcaacttggattttcttccctagaaccttggttttggatcccatgctaacagtcaccatcaaaaaacagacaagaggtgtttagaatagtctcagaagccaactaaatcaaaatttggttattcagttctctttggtcattacttttattaaggtggacaatgtgcagactgtgggacaagaagggtgccttgtcctgaggcttccaaagagcttcttgtttcccaaacatccatgagctgttgacagtgtgaatcttagggctctagcagggcactcccctgctgtaagcgcatctgcgttggtcttcagcagtagagggagcattcatgatgtgagttgtttcgtataaaactcattaacacatttagtgctgggcctccccacacacggcattgtctccagcactaagggaggggtgggcagagcgaatcttcggcaagacggttctttccacactcctgtgtgtcttgcgctgaaccaggtgccatggagtttacaaaattaaatgccatcctccctgcctcaaggaccccatggctggcagtctggaatcctcctggggaaccacatgcttctgcccctggtttcaggccctgctgcctgcagttaaggtcaccgcacaccctgcctcaccggggctcaggctgccactgtccctgctcctgtccctgccccccacctgcctacttcgcctcaggctgtggagggttttcctgggtctctgtggccagcagcctgggtggagccccaaaaggagccctgtgtttaaatcacaagcaggaaaatcctggggctccaaaatccctaagctaaagggaaaagtctagctgggaactgcttagcaccaacgtgcctcccgttctattcaaagtcacccctctgctcactgagagaaatgcagatctgattgtttcctttgaagaggctaatcagaaactcaaaagaatgccaccatttgtctcttatctacccgtgacccggaagccccctccctgcttccagtcttcctacctttgcttggagttgtcttgcctttctggacaaaaccaatgctcatcttaaccaaaccaatgttcatcttacgtatgttgattgatgtctcatgtctccctagagtgtataaatctacagtgtgttctgaccaccttgggcacatctcgtcaggacctcctgaggctgtgtcacgggcaccggtcctcaacctgggcaaaataaacattctaagttaactgagacctgcctcaggttttcggggttcatgctatcatctggcatgtaaaatcattctgttgtgaaaaaagaaaaatgtcttgatttagttgagaaaatggggcagtgggaaagctgtgctcttttcacaaacagggtcactgtggggcccatggcagagctctcactccgctctctcctctgcagctctctacggcgttctgtttgagaagagcaaggaagctgccttcgccaattaccgcctgtgggaggccctgggcttcgtcattgccttcgggtacagcatgtttttgtgcgtgcacgtcaagctctacattctgctgggggtcctgagcctgaccatggtggcgtatgggcttgtggagtgcgtggagtccaagaacccgatcagaccccacgctccaggacaggtcaaccaggcagaggatgaagaaatacaaacaaaaatgtgagagcagtgaggtccgaggaggatgaactcagaaagcaccagccagagaattttcttagaagatgcctcaggacatagagcggctcctcatcaccatctcagcacaatttggccattctgaagagatcatgttatttcactcttcatgtattttttttctattctaacaaatttttcgtccaccatcttaacagagatcaagtgtatacatgaaggtatcagttcatttaattttagatgcaaaagaaaaaggtctaacgtacaatcagccaattagaatttgcctgaaatcatagactcaccctagttttattgctgtagttgtttttaagaattggaagcctgcttaaaaaatgtagttgagccccataattttacaaatgggcgaacttttaaacttctaactctacttggatcaaaacctcatacattttacaaaggggtcctgacaagtcagctgactcaacctcacagagtcagggggtgacaaagccagactggggctcaggattcctgaaacgtgtggggtctgcgtttctaaataaagacggttatttaatggacttacctcctgcccaagtactgttgtgctaagtactcacatagacacacacacacgcttcatcacatcagtgctttagtgtgctgtggccttcgcagaccttcgagagcatttcaggtgaagatgctacatgtgtctgttaacatggaaaatggtgccgggcacgggttgggtgatatttgcccatctcacagtcatcgtcttgtcccttggcacctggtctcctctctcccttgttcttcctagcagcactgccgcctgcccatctccaaggcttcttccttgtccactgcactcaggtccccaggccctccccagccctcccccattactagcaccaccttgcccagccccttcccgcctcccgctcatcctctcccacaacccaccctccccggccctacccctgccccccccacccctccccagaccccttcctggcccctttcctaccctccttggcacccccccacccttcccccactcccgtgccctccccacccccgccaaccgccttccctgcccccccccaccaccctcgcttcctggacctgccccgcccaccctggacccccccccccaccccctcactcctgggacctccctggcctgtgggcctggagcttgggatctcttttgtcctttaaccctaagctgcttccttccccttcccttcctcttcctccccctccccttcccctttggttcacactgaggcttcttctagaccttatgtgtcctgtctgtggctctcccgctgcatgttgttcgtttattgtttctacgagcatctcctcctcctggaaattcagctttccagtgtctagtacacagcactagcaggtgcttcatatgtgcagaaggaaatgggcctctctgtgaaattccaaatacttccttcactcaccctcattcattaggatgctggctgcctctggccatgggagggggagcaaatgcctcctggccctggccctttctccttctagtcagtgtcagccaggtgcccagacgggcgatgatcaaaggcagagaaaagtgcagctgccacgagctaatgcttcctggcctctcaaatgttacctctcaagcttccccacgacgagctgggcattttctcccaactgttagaattcccctgatagcccagtgtctctgaccaccagcagccttcttcttgttacccaggctcatgtgccctttatgtgccactctgtccctggcctggctgatcagggaggaggccctgccattcctcccccaggctgccgatcctctgcctccattccattccctgtcgatcctctgcctccattccattccctgtcggctgcttcctggttcattgtcctccctgcagggctcctcttatcctccatccgggctattgagagagggatttcactaaacacaggacacttcacctccagcgcccatctaaagagcacagtcttacccactggccgggacagtccaggcctccgtgagttaatcccagctgcctctctagccttccgtccgtttcaccagacttctctgtccaatgcttctgttaaataccgaggtccttcccttatgggcccttcgctcatgctgtccctgtgtctctatccaaaccacgtttatcctcccagacccagtggaatgccgttaactctttgcaggcttcaaccatcttcctaaagctgggcctctgcactctctaatccctgccctgctttgtcctcccctttcctgccttgcaccacgggctgcctggtgccatccctgtctgtgggatccatggccgtcttgcccagcgccatgcctgtttgtgggatccatgatggtctttgcagctcccacaacagggtcatgtcaaaaggagtcaagactggctagggtatttgtgtagagggcgttcatcgagggtaaggtgacatgtcatgtcccctccatttggaggtttaggattttgtgaattgatgatgggcactcctggtgctcctcaggataagtcttatttggaactggtctttggtttctcagtctgctcagagcattttgaaccctgtagaccctaagtcagtaggaactccttagaccttcgggggtagtgaggcctttgcagaatgtcttggagacaatgaactaggcctgctcatgaggtgtggggggcactaaggagtgagccctgggcctaaggctggaggggaggacccagaggtgagaggagttggggagtgcatgtgcatttgtccaaaccagtgtgcatctgcgtggctccagccggccgttcagaagtgaggtggagcagggcagcctctccaagtgctcctgggacagagagcttgctagtttagaagagtccagttggggttgcaggatcatcagaattctgctcagagactgagccatgatcgtgttctgctgatgttgatgcttacaggaaagtgccagactctgtgtgacaggagcctgagcctcctctgagtcactggaggggttcaattgagctcaacggaggatctgtgtgacaggagcctgagcctcctctgagtcactggaggggttcaatcgagttcaacggagggtctgtgtgacaggagcccgagcctcctccgagtcactgggggggttccgttgagcttgacggaaggtctggttgttgggtgtccatgtggagcggccagctggacctatgaagatgccctcaacacacagcatttcccactgctatgcacctgaccagcggcttgtctggacagccaggctctccctgaaggtggccggtggcattggggacttttctgatttcttcatcctttgcattttggaactgaagcatttgtggctgcgcccaagtgccctggtgagagcctagagaaagagcaaaccagattctaatctcttcctggtcccggggggagggtgtgtggctgggtccctgggtcgtatcggtattgccagcccagcacgtgcttagcgggaaagttgaacagtaaccggacttcaaagcaaatttttggtttttcgggtctccagatagcatttatttcaatcagatcatctacgcactacagaaaaaatagtttctctctctggttttcgcatgactgctggtgcgtccaggtcactttgatcacaaaacctttctaaccagtttcctggttaagggtccaatttatgaaactcttaataggagcctcactttccattgtgtcaaagcaaattagttaaactcactcttttttagtattcagtgtgtaaactgggaatattcctacttcacaaagaaaaattaaaagagtgtgtatcataaaatgctatcaagagctatacaatggaacaataagaacagccatcccctagaccaagcttaaaatgcagtgcttttctgtcaatccctgaactgcagtgcgctcttctaagctttcataacatttcattcatcagtcttaagtttccatggcccaactcccaggactcagaggcaaatgtgccctgtttttacttgatcagagatttgatgaaggcaagatttttaaaaaatataatgtatgccacaatatattatacaaaattttctaaaatctaaagatctatctataagaaagcccttaaatatagaaattaaaacgttaagagcatataatgaagagacagggagggtgccgctgacccagatctgttgcccatctgcagttactattgcattctaagattagccctgagcttgctggcagccacggcagaaaaataaatgcaaattataaaatagtcagttttgatgaaaagaggcctgccagcatcaagaaagagattcgttttctaggtcccaaaatgtaaggggattttcatgtgggtccccggccaaaaaacatggagcgagtgtagtggacactcttctctgatgggttgttacggctgtttggtgactgtgatctttgctaactgcagtgatctcattggaacgtgattctctgaacgtgtgtgagcaaggtctgctaatgagaccaggagtgtgcaccctcctgagatgagggccgtccacgcctgggcttggggcctctgtatcacccgcctagcctgggtctgtttagtcagtgactcatcgctacctcaccccagtgaaagccgtgatgccgagatagctaacccgcaggagagctccaaagcactgaggtgtctggcctttgtcaaggtacttgagtctgttccagcttcacagccaaataacaaacagacattacttctttttcctaagttcatttccaggcccaagtcaaagctgcctgagtccccggggccccactccagtccctctggaatgttctctcagaagttcccagcccaccttctcctagcgtcccgaggacagatcacgccagctgaaagaagatctgagtctggggaaggaatcaggaaacttgtcttccttcctccttccccttttcttcccatggggtcagcaccctggaaggggtaggaaatccagaaggaagcacgtgtgtggcgggaatcattcttgagagagctgcgggtgccacggggccagccacgctccttcccccgagaccgcctgcccaggcccctgctcggccagacccgcacacaaaggagcagcggccggagacgtggtgccctggtggacaggggctgtaccgtggcctcaaggaacgtgcatgggcagagaacagtctcctgtggtgaaagacagatgccgccgtgggtttcccctggtgactataaagcctccatcctacccacgttgcaaatgtcccactctgctccctcctgtgcctgactcactatccctgtctggagagcatctgtccgactcccaacgcgacacgccctccctcagtccctgactccctcccttcccttagtcattctgtttgcaaaaataagacaaaacaaaaatctacacaggcgttcgaccagaccgctttggaaggtaaagtctcacaccgggaacgcaaagcaagttatttatctcccatgacgcctccgtctgcctgtcctgatgcgtgtgggcaataggaagcctccttccttagggaatagttctttcctgcccattgctggcagggcaggctttgcttcatctccagccatggcctaaaagggcaccaatgacagggtgggcctttgaaaatatggccctgaaacccagagggtttacctgttcaacttggaagtgtgcccatgagcacccgtgtgtgtgtgtgcacatccgatgagctgcacagtccacacactcagctccgaggagagcacagcggccttgaagagaagcagattcgggaacctcacattcaatactgagccatggatctcactcggcctccaagtacaggagaaagccccacccaccacccctgtccctccttcccgggccttcccgccaggccagcccccttccagggccgtcccctcactcctccctcacctgcccagtcctgcagaaggcaattgtgatttctgtttttgcagcaacctttcctgagacctcatctatctgttccacttccatccttaaccctgacaaattccaagcaggtctcattctcatcatgcaagaaaattaataagcagattaggatatttattcattcatccaagaagtatgtacttaatatcaagcatttgctaagtgccacatattgacctagatatagtgaatcaagcaggcattaaacggcaatgttttgttctcaataagtttctattctacagaaaaaatgtaaaatcggtttgtgggtggccagaggcaggaagagcaatggaattgggtgagggcatgaggacagacatggcacagctgtgtgcagggcggaaacaccgcttcctctgacgaggtggtgggagaggctgcagcacccagcgggaaagccagggaggtaaagcaggggctgaggtctgagaggaggcccacggagggggcccagatcgcacagggcccagcaccgaggtaaggcccttaagttttattctgagccacatgggaacccgtattcatttcctagggtgtcataataaagcaccacaaatttgagtggcaaaaacagcaggaattcattcattttctcacagtttagaggccagaattctatcaagatggcagtagggccaggcccttctgaaaaccctaagggagggtacttcctggctcttcagcttccggagctgcgggccatccccagtgttccttggcccgtagatggaccactccaatctctgctgccatctccatgcggcctcttccccatgtgtctgtatctttgctcagccttctcctctgtgtctctgtgtctagttcctctaagaggaacttcatgccactggtgtccacagaaggacactagtcatattggattaaccacatctgcaacagccccatttccaaaggtcacactctgaggttctgggaagacatgaattttgggggacactgttgatcccagtacagaacctgctagaaggccttgattagaggagtggcaggcatgaagtgacttctttataaaaagatcattctggctacaagaagcattttaaaaagaacatgcttatgtaaccagcacccagagcaggtcatggaacgccaccagcagcagccgagaccctggggacccaacaccaccacttcccccaaggcaacagcttccaaaactggaggctcgttttatgtactgaatttgatgtatctctgtcttcattaacatttattatgaaagcatcatgttcattatagtccttcaaacagtactgaagtaaagatggtaataaaagtccattctcagttaatattgactatctcccccagtgaatcaggtactgtgctcgtcggggggtttttgaggaatgctaactggaaaaatgtctaggctttggccaccgggttgggaagatctttgggaggcacagaagtccccccgaattcccttaagccacgctgtttttcagtctttctccctcaggctcagtagagggtagaaggggttctccttccatcaaccacctgggatgagagtcttgatgctcactggagggataggataggggtgtcataaaatggagaaaattctacgtattggtacagagttttcttgcactttgccaaaattatagatgtaaacatcataatgaatctaacctcctcttgattccacaggagggtgcgtaaaataagtgtgttctggtgccaacagtgggaagcgggggatagatttatgccataatagtgggcatttgtgagttccacacaacagaacatagggagcccccaagcacgctgactgcagcacgaagccagggcgggaggagacgctggaccaacactgtggtgggatccagtgctcctctgggttgggtctctgacgttaaagtccagaatctgtgtggtcagtccctaggaggtgcaaagcccatctccaagcctttccatatccagtaaccaggagttaggtggagaactgaagccaaggagaggagtgagccccatgtgaaatcagggaaataatcaaagggaacaacaaatggtttggggaaatgtgtttgcttctagtgctcacttcagacaaaaatacatttttataaaaaatgcacaccgcatatttttcttgccaaaatgcccctaggagtctcctctagtcttgatagctttgcccttcttctgccagatacccaagtggagagtcagcacgaagtctcggaggtgcaggtgtaacatctccaatggaagggacagatgaaacatggctgagtaaatgcatgatttacaaatcgacacaccagtgatctgagcccaggtgctcttgcttgtgccaggattgccttccctgggagtgcaggaagcccagataaagtaaccccacccacccacccttcctcgcacgctcaggaagacagtcctggtggaagaacctcatttcacttcatttttacaaaatttaccccaccacgtgctgggagaaaaacaataaataattaacaatgcatgaacatgtcaaatggaaaaagaaaaatgcctttcagattatatcttatgaatgacttttgttcttggtttgtggataaggaaattagccatgtttccctgtgcttgacagaacttgggcaacctcctcagcagcttggtgtgcagtttttatagagttacgtgaagcaattgattgtttctggaagacggtggcaatgcctgtaatcgaatagatggcaataaagcattcaactgtcatccacagaggcagccacttgccagagccaacatgtgccgagggtagagagtctacggctctgagacgcctggcaaggcctctccagttcctgcagtcctgaacctcaggggtggtggccggaggccgttagattagcgaggacacagcctgagctggaaggaggggtccaactgggatctctgacacaaacatggcttaaacaaaaagacacgtaattcattttggaatctcaactgcttttgtgtagacataactttttttttttttttttttttgagatggagtcttgctctgtcgcccggctagagtgcagcggcgcaatcatggctcactgcaatgtccacctcctgggttcaagcagttctcctgcctcagcttcccaattagctgggattacaggcacccaccaccatgaccaactaatttttgtattttttttagtagagacgggatttcaactcgattatctccatctcctgaccttgtaatctgcctgccttggcctcacaaagtgctgggattacaggcatgagccaccgcacccagcccacgttaaatattaagattccatgcaggcgaagcaacaggagaacctggcaagaacagatgccaccccgccaggcagcccacaaggcctgccccctgtgtgctggccgctgaggcctgaggcatggggactggcaggaggcccactgggtcggagagagaactctgaagcttggagggaggaaggtgtgatgaagcctgggtccctgtccctaaggggtcctgacagtctgggccccaccctgagtctatgactggcttcccctttgtgaggagagcagaccctgcatcatcagcaaccagtgctccctccagcctccgcgcatttcagctggcgctgcagctgctgcacagagacccacagaggccaccctcggaaccagcgcccaatgagagggcgggacctgtgttcctccacacaaagccaggcgctggggtaagcgtaggaggcgacacgtaggatgggagggtggccccgatcatgcctctgttccaggaccagccccttcccgagagcacaggggccagggtcactaggagcagcgagtgtgcactgggacccccgaggggcaatttgtagtcagcccttcatactccttcaagggaaaagcagtccagcattgtatgaagtcatgtacttttcaatccaaaaatttcctatggtgtccagtgcctcctgcatgctgaggtgccagttatataagagtgaacgaagtagacccattcctgagactaaagttaccaaaggaggggagtgtaagttaactgcatcccatagtgggtacaggaaattcaactgaattcaaccaaagccgattgaatggccgctgtgctctgggaactgtgacagatgctagggttatgagacggaactggatcatctatgaaacacacatggttgtaattcagggccgagcagaattgtttccataggataagtgtgaagtggtatggaccccacgggggaaaagaaaatccccccagtgtagaaaggaagggcttcaaggaggagtgggcattcatgctgggcttcctgggagaggtgggcttccatcagcagaaactcaggggctctaggggcatttgaggctgaggagggtgggctgaagcactgggctcctgttgtcacatgcgagcgggaagcgggctgtgacaggccgaacagcggccgagaacgggtgcaaggccgtgagtgcctgccggcctgtagcctccacaccgcaggcagaggtcatgatgagggaagagatcacacctgcccatctccagtcttcaaagaggcaaagtcagctctcccaacttgggctagtgatggcgtttgcgtttcaagcagctcagtctaccccgggtttgttggaaatgaggctactctgggtgtcttggggctgagcgtacacatgggacttgatctttgacctctgcgaccttagaactttcttgagaaaacagaactttcctgataattaacagaaaaaatagtgcatgatttctggtttaataataaaataattattctgtgtttcaagcaatacaaatttttattcaaaagaacatttaggtaggaagtttttttaagttggtcaactcaaaaaacgggactgtctcatctataattggggtgaaaagcattctacattccatataaactataagccacagctatcaactatgcatcaggaaaggtgacaagcagaatgtggaccatttacaggccaagtgcttgagggtgactgatctccacaaatggcttcaatgacctagaacaatcacgcacaaggcctgcagctactgtgcgttcctacccaataaaggtgggatattttctatgtctacaccaagcttgtccaatccgaagtccttgggtctcatgcaacccaggagagctttgaatgtggcccaacacaaatttgtaaactttcttaaaacatcatgaattttttgtgattttgttttgtgtttttagctcatcagctgtcgttagtgtgagtgtattttatgtgtggcccaagacaattcttcttccaatgggcccagggcagccaaaagactggacacccctggtagacaatgtaaatcaaagaaaatgaccaccgcaagtctcaatcatttaagaagtttatgtgccaaggttaaggatgtacccaggaaaaagaacacagaaccacaggaaaaggctgtggcttatgctttttcccccatagagggtctggggaccttaataagtaaagagaaaagagtaggtattgggggaaagaggaaggaaaaaaaaaggagggtctgtaagagggaagcagttgcaactttttgaatctttggtcagcattcactgaatacacattttataagtggggcgggtagaggaacagtcgcttagcattcgtcttgcttagtgaaacttcatttttatataagatgaaataaacataggacagaggatgccatcagttatgcatttgcctcaggtaaatggagggatgactttgagttctgtcctttgtcccgtgcctgtgaagatgagttatcatcttacattgtcagggtgaaattcagcagaactgttcttgggtaaagatcttggagcccaccaggaatttccttgtgagggaggtctgtatgtagcttttgcatctttgcagccatcttctttaggagtaaaatgggaggcaggtttgcctgatgcagttcccagcttgacttttccctttggcttagtgggtttgtggtcttgagatttattttccttttacaacaactcacttctaaatttggaactcactgtgctaagccgtgtggaacaacagctgtgtgtatgaattttacattcacaccaagatggcatataggtttttacatatttacggcttggctacaggggtggctattaatagttaaaaagtgaaggaaaccatattcgcacaagagaaacggaaacatacaggttatgtatggtgaatctccaggaattccaagtaaagcagggaaatgcttttgtaattaacctctgaaatcctaaaagtataggtctttttatataaaaatgtacacttttctttctatctcttgcacatgaaagaggcaaagagcagcattgcctattcattggcggatgttttctttggttctctatgttggtgaaaactccttttacagcatctggtatcaaggtcacttgagaagggcccctctccttgaccccaaaatattttctcctcatttcagttcgatgacacctgaaattcctggtgttgaatcacatggtttaacccttcagctggatcccggtcaaatggaaagttgctctggggctctgtcctgtaagcagtgaatgtgccaaaaagataaaatgtgaagaaaaagactcttagttatttttgcagagcctgtcttggatggaagaaagcaccaaaactaggagctgtcggctaaggaggctgccgtccctgggagccgctctctcctactgcatcctgttgtccctcagtcttctgggcaaatcagtgggccctcatctagagatcgggattcccgcagtgatggaatacattatttttggctgacttccttgccatggggccccatacacccaggaatatcatcaaggtatggaaaaagggggctcttcccccttcctacaccaggaggctgtggctcttaagaaattgggtcactcctggtcattggaatgctgtctatgccctgatgacattgactggtgttctagcccttgaagagggaagagctgtgctggcttcaaagtgtctgtctgttggctgcatggtggaagatgccatatgtgtttccttgttctaggtgcatatgcagttgggttaaatggtggcttagtactgaatggtgggtggtattttccttccagatgaggactctgaccttagaagttttcagcgggtggcgtttcacagtaatggagtctgacatacacaaatgggacatccacctccattgcctgttcttgtaggctgtgatgtggcaacaactctgtttaatctccaggatctcagagtttacatcctctgagcttggtactgggtgcttcaccagtgatagtgagattccaggcagggctttccctacctatggaaacaggcacaggggtgtccactctctgaatgtgcactcccttcctgaacactggttgggggaatagctcagatgtactctagtttccttctggaagcttctatgtggaggtctgactgcactctcctaggatgctgcccagtcagggactctttatataccaggtgtcattgacaaaagagcactttcagtgtccgcagttcaaagggcccatccctctctctgtggcccccaacctcgttaaggacctgctcgcagaacccctcccacgggccgcacctgaaacacaggctcccacctcaggaagcttttggcagtgcaaggtggagatcatgacgttgctgatataatcagaaagttccttggtagtttacatattagtagcaaaatcacacttttacctacttcagagactatcatgactcaacagcgtgacttcccagtgaggctgaaaaccctcactgaggccctgaaaacccaaatacagtttttcgacattttgagcttatgttgaatgacttcttttcagataaatcttgtaggcccggagagcggttttagttgggctgttctgtctatgctcagggttaagactgggttggttaaattgacaggtgtcccagcttctgccccaaataagtggcaaatgctgttacataattcataatttcacgttatatttttgttgtaatatatttgtatatttgtatagtacatttgtatcatattacacgtccctttgccttttaaatctgagtacggtaaacctactttattcttctctagataattttaattattgattataagctttggctaatataaatggatgccttcagggcctagccaggacccagcctctgcaatcaagtgccccagaccctgtggttttatgtgttatttgtatctttcgtgaattttattatgctagcagtcgttcttgtctggttccagcaccatctcaccagttccccaccagcacatctgatgtattataggctagaagtccaaatattcaaaagcacattttgtattatataaatgtttccatgtatatgtataaatatacacccagatgtgatacacacacatgtacatgcagcacacactgatttaagcactgagggtaaaagtgtaggactcactctctttggtaaaatgtcaggttttgtgatgtttgttttcactgagagtagatattctactgaattttgggttcaaagccaagagggttaagttagccataaatctcctggcttccgacctagaaaacagatgttataaaaatggaggaagaattttaggtagatatgagcaatggaatgggaattgtgtgtctgtattacttgtactcagtacagtttttcaatgtttgaaataaaaacaatgtactggccaggtgcagtggctcattcctgtagccccagcactttgggaggctgaggcaggtggatcacctgaggtcaggggtttgagaccagcctgaccgacatggtgaaaccccgtctctactaaaaatacaaaacaaattatccaggcgtggtggtgcccacctgtaatcccaactacttgagaggctgaggcaggagaatcgcttgaaccagggaggcagaggttgcagtgagccaagtgtgccattgcactccagcctgggggacaaaagcgaaaatccatctcacaacaacaaaaaaaaagaaaaaagaaagaaagaaaacaatatacaaaatgttttattccattaatgtaaaggaaaagatctagacccctgtacccctccctccctgcactttggtgtgttggttcattcatttattccacaaacatgagggcaccctgtccaggaacacagattaaaaggacacccgtggcctcatatttcagccagcgaggcagccaatggacatttcccaaatcacacaggccccaggaccaaaaagggcagtgagggagagcgtttggggtggaggctcagccagagacccaggagggcagcgtgggcattcccgtgatcccttctgcagtgcacaacactgcagcatgagctcgatagcgcctgactgggcaagcctgcagctcagctccttgtccagccggacccagtcgctccccgggtgtgctgggagaacacagggtgaggtcatggtgcaccagtgcccttcctgttcctgcacaagttggctttctaagagctactcagtacaaatgagtgtcattttctctttattttcattattttattttattaactgaaaaatattaattgtatatattcattgggtactagtgaagttttgttatgtataatgtataacgatctgatcagagtaattagcatatctattgtctcaaatatttatcatttcctgtggtgaggatgttcaatatcctccttccagctatttgaaactattatatattacactgctgttaagcctggtcactctgcagtggcatagaacactaggactccttcctcctgtgtggatgtgactttgtgtgctttaacaaatgtctccctatgtcccctcctcctaaccttcccagcctctagaaacctctgttgtacgttttacttcaattagatccactgtttttttagctttcacctatgagtaagaacatgcggtgtttaactttctgttcttggcttatttcattttatgtaatgttctccagttccatccatgatggcatgaatgacaggatttcattctgttttgtggctgaatagtgttaaagtgaagtaaatatggccagagaagggctccgtacttttatatttgagtccttctggataggtagacaagattgaaaccccaacttaggagtatgcacctgtaacaatcgctgagtcctggccaatccccgcagctgtacttcaaccactcatacactggcgagtgctcaaactgtgttcaaataaggcaaacagcaacctgtaaccaatccagctgttgctgtacctcactcccgatttctatacgccgctttacttttacgtctgtaaatttgttctgacgacgaggcacccctgcagtctctctgaatctgctgtgactctgggggctgtatgattcgtgaatcattcgttgctcaactaaactcctttaaatttaatttggctgaagtttttttttaacaatagtattccattgctaaaagaaaaaccttagataaattaaatgtaacagagtttaactaagaaggaactcttcacgaatttggcagtcaccaaaccagaacaggttcaaagaccccacactgcgtccgggtgggtgagaattcatggagagaaaaaggaaagtgaggcacggaaaatggaagtgaagtacagaacctcctgtttgttacagcacggggtttgccttttttgaacacagtttcagcagttggctgcctgtggtcggctgattagtagtgtgctaatcactacttggtgattagtacaacagtaagttacagtttgtttaccctcccgttagctgacagctcactgtgtatgaaggaacctttagacccaacttataaggaggcaatgttaggcgaaattcaatttaatatgaactttaaagtagttttttccaattctgtgaagaaagtcattggtagcttgatggggatggcattgaatctataaatcaccttgggcagtatggccattttcacgatattgattcttcctacccatgagcatggaatgttcttccatttgtttgtatcctcttttatttccttgagcagtggtttgtagttctccttgaagaggtccttcacatcccttgtaagttggattcctaggtattttattctctttgaagcaattgtgaatgggagttcactcatgatttggctctctgtttgtctgttgttggtgtataagaatgcttgtgatttttgtacattgattttgtatcctgacactttgctgaagttgcttatcagcttaaggagattttgggctgagacaatggggttttctagatatacaatcatgtcgtctgcaaacagggacaatttgacttcctcttttcctaattgaataccctttatttccttctcctgcctaattgccctggccagaacttccaacactatgttgaataggagtggtgagagagggcatccctgtcttgtgccagttttcaaagggaatgcttccagtttttgcccattcagtatgatattggctgtgggtttgtcatagatagctcttattattttgaaatatgtcccatcaatacctaatttattgagagtttttagcatgaagcgttgttgaattttgtcaaaggctttttctgcatctattgagataatcatgtggtttttgtctttggctctgtttatatgctggattacatttattgatttgcgtatattgaaccagccttgcatcccagggatgaagcccacttgatcattgtggataagctttttgatgtgctgctggattcggtttgccagtattttattgaggatttttgcatcaatgttcatcaaggatattggtctaaaattctcttttttggttgtgtctctgcccggctttggtatcagaatgatgctggcctcataaaatgagttagggaggattccctctttttctattgattggaatagtttcagaaggaatggtaccagttcctccttgtacctctggtagaattcggctgtgaatccatgtggtcctggactctttttggttggtaaactattgattattgccacaatttcagctcctgttattggtctattcagagattcaacttcttcctggtttagtcttgggagagtgtatgtgtcgaggaatttatccatttcttctagattttctagtttatttgcgtagaggtgtttgtagtattctctgatggtagtttgtatttctgtgggatcggtggtgatatcccctttatcattttttattgtgtctatttgattcttctctctttttttctttgttagtcttgctagcggtctatcaattttgttgatcctttcaaaaaaccagctcctggattcattgattttttgaagggttttttgtgtctctatttccttcagttctgctctgattttagttatttcttgccttctgctagcttttgaatgtgtttgctcttgcttttctagttcttttaattgtgatgttagggtgtcaattttggatctttcctgctttctcttgtgggcatatagtgctataaatttccctctacacactgctttgaatgcgtcccagagattctggtatgttgtgtctttgttctcgttggtttcaaagaacatctttatttctgccttcatttcgttatgtacccagtagtcattcaggagcaggttgttcagtttccatgtagttgagcggctttgagtgggattcttaatcctgagttctagtctgattgcactgtggtctgagagatagtttgttataatttctcttcttttacatttgctgaggagagctttacttccaactatgtggtcaattttggaataggtgtggtgtggtgctgaaaaaaaatgtatattctgttgatttggggtggagagttctgtagatgtctattaggtccgcttggtgcagagctgagttcaattcctgggtatccttgttgactttcaagtcaaccctaagccaaaagaacaaagctggaggaatcacactacctgacttcaaactatactacaaggctacagtaaccaaaacagcatggtactggtaccaaaacagagatatagatcaatggaacagaacagagccctcagaaataacgccacatacctacaactatctgatctttgacaaacctgagaaaaacaagcaatggggaaaggattccctatttaataaatggtgctgggaaaactggctagccatatgtaggaagctgaaactggatcccttccttacaccttatacaaaaatcaattcaagatggattaaagatttaaacgttagacctaaaaccataaaaaccctagaagaaaacctaggcattaccattcaggacataggcatgggcaaggacttcatgtccaaaacaccaaaagcaatggcaacaaaagacaaaattgacaaatgggatctaattaaactaaagagcttctgcacagcaaaagaaactaccatcagagtgaacaggcaacctacaaaatgggagaaaattttcgcaacctactcatctgacaaagggctaatatccagaatctacaatgaactcaaacaaatttacaagaaaaaaacaaacaaccctatcaaaaagtgggtgaaggacatgaacagacacttctcaaaagaagacatttatgcagccaaaaaacacatgaaaaaatgctcatcatcactggccatcagagaaatgcaaatcaaaaccactatgagattccatctcacaccagttagaatggcaatcattaaaaagtcaggaaacaacaggtgctggagaggatgcggagaaataggaacacttttacactgttggtgggactgtaaactggttcaaccattgtggaagtcagtgtggcgattcctcagggatctagaactagaaataccatttgacccagccatcccattactgggtatatacccaaatgactataaatcatgctgctataaagacacatgcacacgtatgtttattgcggcattattcacaatagcaaagacttggaaccaacccaaatgtccaacaatgatagactggattaagaaaatgtggcatatatacaccatggaatactatgcagccataaaaaatgatgagttcatgtcctttgtagggacatggatgaagctggaaaccatcattctcagtaaactatcgcaagaacaaaaaaccaaacaccacatattctcactcataggtgggaattgaacattgagatcacatggacacaggaaggggaatatcatactctggggactgtggtggggtggggggaggggggagggatagcattgggagatatacctaatgctagatgacgagttagtgggtgcagcgcaccagcatggcacatgtatacatatgtaactaacctgcacaatgtgcacatgtaccctaaaacttaaagtataattaaaaaaagaaatggaaaaaaaaaaaaagaaattcaatttaatagagtagagaccacatttcctgtatccatctctccctgaatggacccctgggtagattccggaccttgggtattgtgactgtgccatagtaaacacaggtgccgttgcctcttggatgaactgtttcctttccttcctacagatgtccagtgtgggggcagctgaggatcatgggggttctgcttgtaattttatgaggagcctccatgctgctctctacagtggctgtactggtttccattcccaccaacagtgtatgagagtccttttttctccacatcctcgccagccagcctccttcactgaaagaagaaataataatatatgttatgatataatatatctaattaagtattgtcactatgttctatatttatttagcatattacataagatgttattgttgtatactaatttgtattaggtattaataatatactatttagaatataaattaagcatataaatatataattaaatcaattccctgccatgggtcgtgggtggcattgctcatccccatcctccttctcagcgatggggactttgtccccctcagcacagatcaaggaagaaaatctgcagggagaactgtcctcttaccatagggacgagagtccctccgagacaagacagtggttttgctcgttggctcagctgtcctgttccagaacgggggctcggcctcacccgtgcagaactaaaaattgcactgaagagcttgtggtcttgtttgttccaaacaggcagtctctaccccaaccccacaggcaaactccaccactacagctagggtgacggaacatcctcagtcagctttaaaaacagcatttgcttccttcagaattgggaggtggagccatttaactgaaaagaagcatttcctcccctctgtgtgggccttggggggctcctccccacctctgtcccccgccctgggatgatggccaatcaggccacaccatgacccacaccccagccctcaccctggccctcttcacagccacaggacaaagtgctggctctccctcccatgccaggggctgcagacgtgtcccagccaacttcaacaaaccgcacatgctttccacacacaatcaaaccaaccgctggctgtggtcagcatcttcaagtctgagaaaggcaggatacaagacatctgtggtagttccaaaaggactttgagaagaaaaagttcttgagtatgcattgctctctggaggacactccaatgggaaggcagatgcgtagttgaaatggggtccccaacccggcatggcttgcctgggcagccctgggaaggggcaaagcctcatggactgctccagggagggccggccactcctcttgctgctgtggggagacggaactgaggtttgcagacctgccctgtctcggacggcgctcgctgaccaggcacggtggagcctggggggtccaggccaggccctaaaagcctattccaggggaggcagggctcaggccagggcgcgccaaccttctagagcctggatgcagcgttctcaaggctgggaaaaggtgggggtgccagagactggacaacattcagtctgcagtctggcgcggtgtccccacattggtttgtgaaatggcgactgagcttccacaagattcaagagggagctgtgatcagataacagcgtatttcttggtgataggaaagaagcatttttaactttgtttaatccagtatccatggttattccactctggatttcctcctacacacacatgcacacacacacacaccacacacaacacatacacacagataacacacacaacatacacacaacacacagacatgcaacgcaccacacacacaacacaaaatatacacacaatataagcagcatacacacaatgcacacaacatacacagcacatacaacacacacaacccatgaaacacacaacacacatacataccacgtataacacacaatacacattcacatatacacagcagacatacacagcacatacaacacaccacatgcaatacaacacacactcatacacaacataaaacatacaagcagcacaaacaaaacacacaccacatgcaacacacgacacacatacatgatacatacaacacaatacacaatacacacacaacataaacacacagcacatacaacacacaactcgtgcataccacatgcaacacacaacacacacaacatacacacaacacaagcaacacacacaactcatacaacatacacaacacacagcaaacatacatgctagatgcaacacaacacacatgacacacatgcatgccatatgcaacacacaatacactcacacaacacacaacatacagacaacacataccacatgtgacacacaatacacacaacatgcacagacaacacagaaacaacaaacacactcaacaggcacaacatagtcacacacacacacacacacacactgcttgaaacttattgatagcatggaacaatttgaaagcattactgcaaactaggacaactgaattttaataaccatgatggattgatcaattctgtatgttccttattaaagcaacagtgacaagggagatgctgtgtgttcattgttgatgctgctttgttcacagatctttgagaaccaccaccccagcctttacccttaacattccatccgaggcaaaccacactgagcagccgcctgcaggcctgggagcaaggctacaggaagcaggtgtttccatccctcccaggcgaggccgcccaacaccaacactggagaagaaggtgggtgggcaagccaggtagttccttccttccttccttccttccttccttccttccttccttctttcctccttcttttttcccctccctcccctcttccttcttctttttctttcctccttctctccttccttcccttcctccttcctgctctccctctttctttctctgcttgcttccctccctccttcctgccctccctccttcctccttttctactctttccttccctcatttcctccttccttccttccctccctccctccttcctttcttgtaaaaccttcacggaaagtacagcatctgtcaaaatttacttcttttatatcaatcagaaattttcaaacactacagaatttccaccaagtaagttatttatatcattatgtgatcaattttgcacgaacaatacaaatcaaaattgccttagcttgaaaattttgatgagcacgttgtctcaggactttgacatatgtacatttttatcaagagtctttgacgttttttaccttttctctagatcttaatgaaacaacacacttcatcatcagttatgatcgtcttaagaattattctgctttccttcttcgaagttcaaaagaatatttcaaatctgccttttatcttttaaaatgtgaggcaaaatctctacattattatttttactgaataggttttaaaaacttaagttgttctttccgactctctttgtcactaataaccacttatttgagtgacccaagcctctatgcaccgaaacccctccagtgggcctgatgggtcaggtgggtgcatggggaaccatggtaggtgcctggccttcttaaatttctcaggccaaaagaactcttactaattttatgacatcattgtttcacacctcttgtaacatacttgaattcatttaactaaatgaaagttgacattcgtgttttgttcttaatcatgctcactttttaggccaacaggacgggccgcagatatgggtctgcagggactcagccctcaaaagtatgatagagtatttgcaaacatttttaacatgttactaacagaatgcaatagcagggcaaaatcggaagaaagagtaaaggggttcccaggacaagatggatttattctaataaagggagcagagatgggtgcattggtgaagagacgtgggtgtccggtgagactgcacagtgggagggtggacacacaggacagctggcagcaccgggtgcacggtttcctcagaaaaatctactaggttatggtcttgaccactctcctaacctttctcaatgatccatttttagaaaaaacctcatttgatggcggaagatgaaccttcaggggccctcttgaagccgctggtttttcgcgttgacgagaccaccccggctgtggtgcaaagcgtcctcctggagagggggtggaataagtttgataagcaggagcagaacgcggaggactggaacctgtactggaggacatcctctttccgaatgaccgaacacaacagtgttaaaccgtggcagcagctaaaccaccaccctggaaccaccaagcttaccaggaaagactgtttggccaaacacctgaagcacatgaggaggatgtatggcacttccctgtaccagttcatccccctgacgttcgtcatgcccaatgactataccaagttcgtggctgaatactttcaggagaggcagatgctgggcaccaagcatagctattggatttgcaagcctgctgagttatctcgtgggagggggatactaattttcagtgactttaaagacttcatctttgatgatatgtacatagtgcagaaatatatctccaatcctttacttattggcagatataaatgtgatctccgcatctatgtttgtgttactggctttaagcctttgaccatttatgtttatcaggaagggttggttcggtttgccacggaaaagtttgacctcagtaatttgcaaaacaattatgcccatttgaccaacagcagcatcaataaatccggggcctcttatgagaagatcaaagaagtgattggtcatggttgtaaatggacgctcagcagatttttttcctaccttcgtagctgggatgtggacgatctgcttttgtggaagaaaatccaccgcatggttattctcaccattctcgccattgcaccatctgtcccctttgctgccaattgctttgagctctttgggtttgatattttgattgatgacaacttgaaaccatggcttttagaggtcaactacagcccagccttgaccttggattgttcaacagatgtgttggtgaagagaaaacttgtccatgatattattgacctgatttacttaaatggtctaagaaatgaggggagagaagccagtaatgccacacatggaaattccaacatcgacgctgcaaaaagtgacagaggtgggcttgatgctcctgactgtcttccttatgattctctttcgttcacaagcagaatgtacaacgaggatgactctgtggtggagaaagctgtgagtgtgcgtcctgaagctgcacctgcctcccagctggaaggagagatgagtgggcaggattttcatctgtcaacaagggagatgccacaaagcaagcccaagttacggagcaggcacacgcctcacaagacactcatgccctacgcgtccctcttccagtcgcactcctgcaagaccaagacctccccgtgtgtcctgtcagaccgtggcaaagctccagatccccaagcaggcaactttgttcttgtttttcctttcaatgaagcaactctcggagcttccaggaatggattaaatgtcaaaagaataatccaagagctccagaaactaatgaataagcaacattcctaagtggtaaaaaatcaaatcaagaaaaagtgacatggatttttaaaaaccaaggatcctgtcctagagaaagcaatagttcaagtccctacctgtgccaccagcatgttaactatgacattgggactgaagatgtggccatatgtataaatataacagctctgacaaagcacaatatgttcaagtggtgattaaactacattacatcccatgtttatttgctcaggtgtcttgaaagaattctacaaataccacacagcctcccaccagtaattgaatgtgctacactacgattatgctatgtatgtatttaaagaggagaaaaagattattctaatatttttaaaggattattaggtgaaaacagtacaaaagaagccaggagttaactttctgtgtgtttttttttaaatcaaccagttatttgttaaaattattttgttaacttaagatcagacaatcattcagagtgagataaatcactgaaagccctaatgactctgttgtttacaaatcctgggcttgaaatcagactttgcaccaaagagctccctgtgggggcatctttgggctgtatttaaatagtggccccttggccttgtcaccatttgtttaccatcacagcatgtgaggtcatggcctcccagatcaaagtatgctgtcattcctgccacataaaaagcatctgcagtcctaagacataaaaattccagtaggttacttgaaaacattattctagtgaaagtagtcagatacaaaaggccacatgttgtatgactccgttgatatggaatgtcagaattggcaaatccatcaaaagcagattggtggcttaggggaggggtaatgaggagtgcctactgatgggtagggggcttccctttggggtgacagaaatgttctggaactatatagaggtgatggttgcacaacacggggaattcactaagtatcactcatggtacattttgtgttatgtgtgttttaccacaataaaaaagttaaaagctggccatggtggctcatgccttcaatcccagcattttgggaggacaaggtgggaggatctcttgagcccaggtgtttaagaccagcctgagcaacataacaagactcttctcacttaaaaaaaagaaaaattatttttttattttaaaaaaaaaggtagggatggggaagtgcagacaggcgtatctcccagcaggttcctgggtgggcaggcctggtcgcaggtcatagctgagaagagctggagccagttgagaagatcccccgtggaccaaggtcagaagtcagcctgcaggggcactgctagacgtgtgcctccagggtccccaggtggacagaaccactctcagtctgcaggcaggatgggccaggaccgaggtccagggccctttgaggatctgccataggacagaggttggcaagcctactccagggacggaattgtgtgtctcctggcaggaccccggctcggcagaactctcccagatcatagcctggtaggaaaggctagacccgagccccagggctgtgtcaggatctgcaagggtccaagttcattaagctccatccaggggcactggtgggtgagactctagcagttccctatgtgactggaacttctcctgggtggcagtagaatggggctggagtcagcattcagagcttgttcaggctctgcaatgggacagaggccagcaaccctatcgtggtggcctagaccagcgagtctcccagcaggcccctgtgttgttaagagggctcctgggtcacagccgagagggcctagagccaagagagggtcccgtcagcatctgctgtggaacaagacccaccgcaagcctctgggtgtttcagatgggtgggtctctctctgggtcctcgtaggagcaggattaacctgcaaccacagctgaggggggctggtgccaaggcacagggtaattttcacatccacagctgggaccatgtaggtggacctgcctgctgaggcactgctgtgcgtgacttctccaggactccttggcaggtggtttaggtagactgaaagtgaagggatggaaaaagatatttcaggcaaatggaaaccaaaagagagcaagaatggctatccttatgtctgaaaaaacagactttaagtcaataactgtaaaaagagacaaagatggtccttacataataataaaggggcccattcatcaagagcatgttacaatttttaagtctgtgtacccaacattgggccacctaaatatgtaaagccaataataatcaatctgaaaggagacatagactgcaatatgatagcagcaggagggcttcaatacccgactttcaacagcagacagatcatccagacagaaaatcagtaaggaaacattgggcttgaaactcacattggcccaactggacctaacagtcatgcacagaacattctccaggatagatcataggtgaggccacaaagcaaatcttagcagctttaagaggactggattcatatcaggtttcttctctgaccacagtggaataaaaatagacatcaaaaacaggacgattttttttaaaaaatcacaaacatgtggaaattaagcaatatgctcctgaacaaccactgagtcaaagaagaaattaaaaaggaaattttaaaatatcttgatacaaatgaaaatggaaacacaacataccaaaacttatgggatgcagcaaaagaagttataaaagaaaagtttataccaataaatgtccatatcaaaaaaaaaaaaagatctcaaataaacatctgaacaatgcatttcagggaagtaggagaataaactcaacccaaagtcagaagaaaggaaataaaaactagagcagaaataaatgaaatagacactagaaaaacaatagaaaagaacaatgaaactacttggttttttaaaaacataaaaaaattgttaaatctttcactaactgaggaaaaaaaagatgacaataaaatcagaaatgaaagaggagacattacaactgataccacagaaatacaaagaatcataagagactattgtgaataattatattccaagtaattggataacctaagagaaatggataaacttctagacacatacaacctaacaagacttaatcatgaagaaatggaaagcctgaatagaccaataacaagtaaggatattgaatccataatagaaagttgctcattaaaaaaagtccaggacctgatgacttcacttctaaattctaccaaatatttaaagaagaacaaataccaatactcctcaactcttccaaaaacctgaagaaaatacttctaaattcattttacaaggccagacaaggacactacaagaaagaaaattatagaccaatatctctgatgaacatagatgcagaaatcctcaacaaaatactagcaaactgaattcaacagcacttcaaaggatcagaatcaagtggattttcccctgggatttgaggatggttcaacataggcaaattaataaatatagtaccccatattaacagaacaaagggcaaaaatcatttgatcatcttgatagacacacatacaaaaaaaggatttgacaaattcaaaaacctttcatgataaaaattctcagcaaagtagaatcaaagaggttacctcaacacagtaaagatcgtatatggcaagcctgaagctcccatcatactcaatagtaaaatgttgaaaccttttcctctaaggtcaggaacaacatgaggatacctgctctcaccacttctgctcaacatcatactggaagtcctagtcagcattaagaaaacaaacaaacaaacaaactaataggaaagaaagaaataaaattgtctctgtttgttgatgacataatcttatatatagaaaaccctagagatctcaccccaaactgttgcaaactcaaacaaattcagtaaagttgcaggatacaaaatcaacaagcaaaaagcagttgcatttctacacactaacaacaaactatataaaaaagaaattaagaaaatctcatttacaataacatcaaaacaataaaaatacttagcagtaaatttaaccaaagaggtgaaaaatatgtacgctgaaaattgtaaaatgtgatgaaagaaattgaagatgacacatattaaaatattatcctgtgttcataaactgtcagaatgaatattgttaaaatgtctgcactacccaaagcaatctacagattcaatacaatttctatcaaaatcccaatatcatttttcatagaaatagaaaacacaatcctaaaatttgtatggaaccacaagagaccccaaatagacacagcaatcctgaacatagagaacagagctagaagcatagcactatttattttcaaaacagattacaaagctagagtaaccaagccagcatggtggttgcatgaacacatacgcatcgaccagtgggacgggatagagaggccagaaatcaagccacgtatttacagggaattgatctttgactaaggtgccaagaacacacaacaggaaagagcagtctcttcatcaaatggtgctgggaaaactaagtgcagaaagatgagattggaccttttgttcacaccacatacaaaaatcaactcaaaatggattagaggcccaaacaaaagacctgaaactgtgcaagtactagaacaaaacataaggaaaaagctgcacaacattggtctggtcaatgatttcttggatatcaccccaaaagagtaggtaacaaaaacaaaaataaatgggattagatcaaactaaaagcgcctacacagcaaaggaaacaacagaggggagacacaacccccaggctgggaggaaatatttgtaaactctgtatgtgataaggggctagtttcaaaaatatatttaaaaattcaaatacgagcaaaggacctgactagacattctcaaaagaagacacacaaatggccgagagatacatgaaaaaatgctcactatcatgaatcatcagggaaatgcaaattaaaaccactagagcacttcatacctgttagaatggatattattaaaaaggtgatccattacaatatcccttctaacaggtatgaagtgatatcacactttgtgttttgctggggatgtggagaaaaggaagtctttgtacactgctagtaggaatgtaaattaatacagccattgttttaaaaaagtatggatgttcctcaagaaacaaaaaatggaattaccatatgatccagcaatcccacttctgggtatattttcaagagaaatgaaatcaacatgtcaaagagatgtctgcacctccatgttcctggcatcattattccccataagacacggaagcaaccgaagtgtccaaccacagatgagtggataaagaaaggctggtgtatatctacaatgaaacgccattcagcctttaaaaaagaaggacactgtcatttgtgacaacatgggtaaacctaaaacacattatgctaagtgaagaaagccaggcgcagaaaaataagtatcacaggtcttcccttgtacatgtaatctaaaaatgttaagttaattgaagtagagagtagaatgctggttaccagaggctgaggagtgggtaggggtggcaaatgaagaaatgctagtcaaagggtacaaagttcagtgaggcagaagaactaagttctatgaagccgtggtggggaactgctgcgggaggggccgggggagcggctgcgctcttggtcggccaagtggaaacccatgtgccttggtctgtgggcctggctgaggcgatgcagctctcccaggagcagagaatcaccctggcaggagcgtggaatcctggctgagttcttcccatttggtatcaacagcattttatatcagcacagcacatacccacctgaagccttcattggagtgcagagtacagactcaccttgcttgtaactacagatcctgtgctcatacaatacctaaataatgtgctcgaacaaccaaaggattggctatacaaatgttcgttcataaattcgccacagtcattgcaaatattgaaagtggtgatgtccttgaaggaaggcactttgatactgagtgtgacaagactgcaaaagatgacggtgcacccagagaacagagagcgcacccagagaaaggaggacaggtaacccagagaaaggaggacactgaacccagagaaaagtctcagaaagctatccaggacaaaatccatccagcgatcagatgaaccacagttagtgacatttctgcaactgttgaattttcttgttcattcgatctatgatttatgcaaagatctggttgtacctggaagatgggaagagtggggaccacagttcatgaccaatccgagcaagtctcccttcattcatttgctgctacatccacacagctcacagcgtggtgacccacaaaaccttgtcaatgaccgaggatgacatgaggaagatagtgtaattttcaaacgtggttttcctgaaaccaagtcaactatagctgatatgttttatttcactggttaatgttgacatgggaaaaaccaatattatactttactgaactttgtgtaattggtcaatttttttgatacctgttaggcttaccatggggttgacataatgaatttattgcacattgttcaaaaggaaccaggaggtttttgtcagcaccgtagtgtaaattccattgcagatggtaactgtagatggaaaaacttttgctataaaatgaaatgcttccttaaatcagacattctggtaaagtggcttgactcagcacaggtagggagatatttaaatataaaatacaatgaaagcagtctaaatatttagaatcttggtttagatcctgaaagtaactaataatccataagcaatgcaatattgctctactggatccttttgacatttatttcatcatgtagttttccatatttaataaatttacagatttaatttatataacttgaacctatgaaggaacagatatttctactgtttaatgtcctgtgatgtagaactcttgaaaaaattttttattttatataatcaagctttaagtaaaaaatgaagaaataaagttaaacgtgttattattttttaattaattaattaattatttttttttggcagagtcttgctctgtcgccaggctggagtgcagtggcgccatctcggctcactgcaacttccgcctcataggttcaagtcattctcctgcctcagcctcctgagtagctgggactacaggtgagtgccaccatgcccagctaatttttgcattttagtagagacggggtttcaccgtgttggtcttgaactcctgaccttgtgatctgcctgcctcggcctcccaaagtgctggaataaaagaagttctagtgatctgttgcatagcatggtgacgatagtcaataataatgtagtgtatatttcgaaattgctaaaataatagattttcaatgttttcttcacacagaaaaaatgatgcctgtaaagtaatggatatgttatttagcttcattcaatcattccacaatgcaaacatacatcaaaacttcacattgtacctaagaaatatatacaattaccgtcggttgaaattattttgaaagaggccagattaagctgctgcaagtagggatgcagagtgggtggcacaactgcaaagagcaagggtcaccgccagggtcaagacagtgacctctaaccgtggctgggtgcacagggagactgcgggtacagctgacaaagcctatgacctcatccaggcgtgggggtgtgcacctgtggtcccagctactccagaggctgatgcaggagaattgcttgaacctgggaggcggaggttgcagtgagctgagatcgcgccactgcactccagcctgggagacagagtgagagtctgtgaaaaaagaaaaaaaaaaaaaaggctgtgacttgacctgcatggagttcagagaaaaggcaggagaaaaaacatgttccggggaatttagacacgagactggaatgaacactttgttcattgcctgttttcacgcatttatacatttatacgttctcaactctgttccaggaaagatttaaaggacgcaagtaagaacgcaagcccgtcaaggctgctccgattttaaatgtcagttcagctcctactttatggggtttggcaaatagagttaagggccttttcctcaaatgctcaaacattccaatgagactaaatcaagcaactggaatcgcttgaaaaccagagaccagattccattctccctccgtttttttgaaatcttcacttctttatcactagctgggtttcgatgactcttcaggtgtaaaggtcaacctcacagaaatgggaaaacctgtgttgttaggaaggatggttttatgtgagcatttgaagttttagggcaagaatggcctcgggccatctgtcaggagaagctgccacatctggcagtatctctcctagggtgaaacgtgcgcagattaaattgaagtaataacgagctcacgtggagtctgagacgagacaggaaatttgtatgcacggcatgtgccttcggtgcccgggctatggaggaaagaacacagacagtcttcctgaggtggggcagacaaaaccggtgaaagtgaaggagaattaaggcgctacacggtggtcattcaaaaagcctcagaattcccctcctaagaagatggaacaggcgtgcgttttcctccgtcccgcaggtgcaaccggaaacctcgggcagtgcccatcagacaaacgcaggaagacgagaggcggagagaggaagcccgggggagccgggggaccctgagaacgacagggtggggcgttcctgggtttttttttttttgactcttccaccccaaactgggtgctcacaaggacgcggaggaagacagccaccgctgctgtctccagccagagcactgggagaggcgcggctccaggaaacatttcaaggaccctgggaaatgggtggagatctccgaatctaaaaaaccttcaggagactggaagtgttttgaagttgagggttgtggttctttctcatttggtttcaaaacaggatccccatttcccttaatgtaggattcgaaggcataagcagaagaggaaaggggtgtcaaggtcagagccgcctagaagcagaagcgcaggccagcgagatgctcttcagagtgacttcgctgtgggctgcggcaggcaacagaaggaactcagcatccactggccacgatcccctccccggagcggaggacagagcccagtttcttcaggcggtggctccagccagctctgccccacagggaaggagcgcgcagctgccacacaccgcaggcagcgctgacagactcggccttccgggagcgcaggcgggtggggggcgccgcccttgtcgctgtccggagccccgcaggcccgtggccccctgcctggttctcccgcctctgcaagcctagccttcaggactccgcctcgcccccctcttttctgttcggagactcacggggccgtctgtctggaccacgtgtgcacatttctgaccacgattcctccgcacaccagctacaggcaccgcagcgctggggacggcacagctgaactgtgctggcagcgaaggggcctcacggggacggctcagctccctgagggcgcaacccacctggtccgggggcgggggggggggtgaggaataaacttccgcggttttcagtgacccagtttgttgcatggcacatgttggaaaggtgaatctgaccgcgttgaccgcgttacttcagagatgcgctgtgagctgctttgtgccgcgaaatgacctgtttacccgacagcgccctctgcagcccagcgccggaacgggctttttcatgatgttcctgcgttgtgtttacagcctccctgcgaggggttcgcacgcacaggcggacctcgttttgttgcgccttgctctattgtgcctcgcagatactgcacttgtttttacaaattggaagtttgtggtaactccgttggggcacatctgtgggtcccgttttcaaacagcttgtgctcacttcatatctctgtttcacattttggtaattcttgtaatatttcgaattttttcattatcattatatctgtcatggtgatctgtacttagtgatcttcgattttactctgtaattgttttggggaaccaacaactgcacccacgtaagacagaaaacgtaataaatgtcacgtgtgttccacatgctccactgaccagctgcccccatctctctccctcccctcaggcctccctattcccattacactattaataacctacaacggcctctaagtgttcaagtaaaaggaagagacacacatctctcactttaaatcgaaagctagagatgattaagcttagtggggaaagcctgttcaaagttaagatagactgaaagcaaggccttttgcacccaggagttagctcagttgtgaatgcaaagaaaaacctcttaaaggaaattaaaagtgctgcttcagtgaacacatgaatgacgagaaagtgaaacagctttattgctgatatggatccctcaagccaaagcctaatccagagcaaggcctcaactctcttcagttccgcaaagactgagaggagtgagaaagctgtagaagaaaagtttgaatgtagcagaggttggttcatgaggtttaaggaaataaaccatgtccataacataaaagtgcaacatgaagcaacaagtgctgatggagaagctgcagcaagttatccagagacctagctaaggtaagtgatggaggtggccacaccaaaccacagattgtcagtgtagatgaaacagccttctgttggaagaagatgccatctaggactttcatagctagagaggagaagtcaatgcctatcttcaaacttccaaggacaggatgtctcttgctaagagctaatgcagctggtgacttaaacttgcggccaatctcatttactattccgaaaatcctagggcccttaagaattttgctaaatcaggaggccgaggtgggtggatcaccagaagtcaggagtttgagaccagcctgaccaacatggagaaaccccgtctctactaaaaaaaaaaaaaatacaaaaaatttgccaagcatggtggtgggtgcctgtaataccagctactctggaggctgagaaaggagaattgcttgaatccgggaggcggaggttgcggtgagccaagatcatgccatcatactccagcctggacaacaagagtcaaactctgtctcaaaaaaaaaaaaaaaaaaaaaaaaaaaaaaaagaattatgctaaatctactctgtcttggctctataagtagaataacaaagccggatgggagcacatctgtttacagagtggtttactgaatattttgaggccactgttgagatctactgctcagaaaaaaagactattttcaaattattactgttcattgacaatgcacccaagggctctgatggagatgtgcaaggagaggaatgttgctttcatgcctgctaacaccacatccattctgcagcccatggatcaaggagtaatttcaactttcaagtcttgttacttaagaaatacatctcaaaaggctatagctgccatagatagtgattcctcagatggatctgggcaaagtcaattaaaaaccatctagaaaggattcaccattctagatgccattaacaacattcatgattcacgggaggagaaccaatatcaacattaacaggagtttagaagaagttgatttcattcctcatgaatgattttgaggggttcaagccttcactgcagaaagtaactgtagatgaggtggaaataacaaaagaactagaattagaagtggggcctaaaaatgtgactgaattgctgcaatctcaggataaaatttgaacagatcaggagtggcttcttatggttgaggaaagaaagtggtttcttgagatagaattgactcctggtgaagatgctgtgaacgttattgatatgacaacaaatgatttagaatattccatgaacttagttgatggggcagtgggtagggtttgaggggattgactccaattttaaaagaagttgtactgtgggtaaaatgctatcaaacagcatcgcatgctacagagaaacctttcatgagaggaagagtcagtcaatgcagtaaatttcattgtggtcttatttcagatattgccacagtcaccccaaccttcagcaacctccaccctgatcagtcagcagccatcaacatccaggcaaggccctccaccagcaaaacaattataactcactgagggctcagatgatcattagcattttttaaatcaatacactatttttaaattaagatatgttcatattttagacataatgctattatacacttaatagactacagtataatataaaccaaacttttataggcactggggaaacaaaatatttgtgtgacttgctctgttgcaatatgggctttattgtggtggcctggaaccaaatccacagtatccccaaggcctgcctgtaaggtgaggcagcagcctaggagctagtgcagcctgccaggtgctgtgtgttcccagcaagcaaggacacttgggaagtgatacaaagacagaaaagttttggtcgtttgagaatcaactcataataaaaaataaataatgaaatatggttaattgaagtaagttgattacaaactgaaaatgatattcagaagaaaaaagttatatacaaagatggttgtgatacaaaagaatataatgacacatttaattttattccctttaataaatgaggaatgtggtcttactccttccattgtctgcttctaaagtatagatataaacctgtatctatctgcagatgcagataagaaacctgggaaaccacaagaaagccaagtagcctgggaaaaaatgggcattgagccaagagcaaaaaataagagtcgatcccgttggtgccacctgacagcagagatggctgaggacccccgagcgtgagtccagagagctgccctgcagccccaccctgcctttccaggatgaaccttctctgggaagccactgctcattcggaaagtgaagaatgcctgtgtttccaacaccaacaccagctctcctgacgtctcagaatgccaggaccacgcgtgatggaacaccaggcaggggagactcaaatatacaaggcgagaggccaggcagggccagcgtctccctcaggcacatgagggcccacgatacttttaggaacccacgaaaatgttttaatttctcttaaaaatcagaaggaaacaaataaactcttaggtataagaaaatgtttcaatatacacgattgatatatccacctttatacaaatgcagtaacaaaacttacgtgtttaaattttttaatggaaaaaagatcccacaaaggcaatgaaagtcatgatgtggcctgatcccaggttgcaaaaaactaaaacatttgtgaacggcgttcattagaaacacaagaatgctaatgtagcatgtcaggtttaaccataaaatgttgaatacgatgtccagtgacttgagtttaaaatgctggaggaggaataaccagagagtaacacagtttccgctgtcacacccacacccacagcaagacgaactacagaatttctgtttttctttttaaagcagggaaagaagtaaaaatgacaacaaaatataattatagtaataattctaggaaaatataaaaattaaatatagaataatgaggaaatggttaatgctgtagagtaggttcaaagtggaggtaagaagtaggtgataatctgaattgtttggttgtgtctcttgtataaggtatttgttcaaaagaatcagccatgctaaaactataattgcagtactcattaagacaacttaattagaatcaatctttaagtgctcaagcaaaggttgtttcaaaggtgaatttgataaactgagcatcagagtcctcatttttgggcgtcagcctccatgttgaaatccctttcactttaacaccaataatcagagttcacgaggcccctctccatgttctcacctcttcgtttgctccagagcctctgaggctccactctccactctagctgctggggagagaaggtgaaggtgactgagctccatcctcaatgtgttctctagatggggacgggcaggtcccagggtcattgggatacagtgtgaggaggacccgaggggtgcagggttcagggagctcttgggggctttagcctggggatggagcagggtgagccaaggaaggtttgcagaaggaatgatgagtcggaggaagcaggactgacctaagggagggccttctgcttgatgtcggccatgaggagcaggagagaaggggcgggaggggctgcgcctgatggccatgaaacttgggggcccatgctctgagagggacctgtgctccttaggaaaacatggagcccacaggactccacgcgcagagacaggagggccccacccgagactcccttcaggagcagcacctgggtggaatggacgagatgactctgtcctggtcccttgtcacccatccccacagcatccctgagccaagcaggggatgaagtgtcacccacttagggaaaaggaagtgggggacagctgagggtttcttccaaggtggcagtagacagtggctcagatgggtgtgactcaccccatcttccagccctttatactctgtcattgtttcatgattgtcttaatgctacctttttgaacaagtaaatgtgcttgtttacaatttgtgcataaatgtgcctgcaaataggtaaatacggaccccctcctcaaaattaatgtaataaatataatcagattgtacatctaataagaagcctttaggagattgttaagaactaaaagtaaattctggctttttgcaaatcagtatgaagtgttgttttaataagcttgtactgatttccaatatcacagaatgtatattccacgaagggcttcccgccgaatgcgcacactgaattaatcctatttggatgacagattttacacccatcactattggagagtgcaccgcagatgatatttaatgaaaacttccagtcaggcaggtgatctgatgcctgagcatggcttcctgataaaattgcatgtttctttcttcctcgatctcccacagataatgagaagtgcattttttgagtacagctgtgtatcgttttgtttgcttcagcgacaattcttagtataagctgattcaaaacaatcaaagcaataggcaagtccattctttcagccaaatgcaaagtagctttttaataatggatttgttttgccagttgtgcctgacaaacagccttgcattgctttagcattcatctgaaaagaaaaggcctccatccactgtaattgcagaattctttttttttccttcaaagccagatagcacatgcttcttgagtcactttaaatagcattaccaaatattgagggctacaatgatgcatgcacaattttaaggttaaaataatccctggccctaaaatatggtattgtatttcataaaaacatgagtacataatggaaaaaaattaactatgcatcttctgataagattttcaagaaattatatctttccaaaatcatgttgggggcatctacatttcagtataaaaattaggtgaattggcattttgtatttctaggtggcctgcaaaacaacaaaagaagtaagtaactggttatcatttttatattgggatttaagaaatctcgagtttcaagaggcgacgtgctccccgggctgcgagaggccacgataactgcactattggagccctgactcagacaccccttgggtgtccttgtagtgactagaattgtctccctcttgtcccagcgaggacaggggtgtcggtgaccagaggggagcaggccaggctgagcttctataattctggaggaatgagccgtgcctggggtgggccacacggggaagaggggctcagcactttgtgaatcagctggtccaacggcacttgctctgcagagacctcctgggtccatcacaaggcagaaatggcccctgtgatgatcaaggagggtgcagccttgctgggggcactgaaaatcgttcttttgtgagcctcctgttctccgacgtgtgctgctctaaccaagtttcctaaataggggagagaatgtcttttcctttgcaatttctagatgacttgggtagtcctaaagttttggtggctctccaagatcatttagggcagctaatatgttattagtttttgtctgttttagcaaaaatctgcaattggcatttcccatgtgatgctgcgtgttgagggctcatctgcttctcgtccaggacgacatttccagcttcatctttgatcttaaccctcccggaggcatacttggtttcctgacagccgctgcaatacacagtcttgacggtgccatccgggtactccctcctcttgaaccgggctgtgtggatttctttctgcccgttgctgagcacaatggttttgtcgccgttcctgagaggagaaacacatggtaaggcggcctgtgccagggtggaggccagtgggggttgggggcgcacagaataatgcccccacccgggtctggagccctccttccaaatctcgttagatgagggtgcagaaggccacgggcaggggcaggaaaggtgcacggggggctcagggaatcggcagaaactcggtgtgggtgagagagggcaggtggggagggccaggaggcagggcgggaggtcagccgcatctgctcacctgcaggctgaagcctgtgctgacagctggctctgatggtgagagggatggcagggttgacacagggagtgacagagacacacattgaatcatttcagaaaagtggccccggaggtgacagggaaggttctgactgctgtgaggaagctgggggagtctattgtaattgcccaggggagaaatggtgagagcgggagacctcagatctcagagaaagggtggaggcgagacagcgaggagacacagcccacagcgctccgtgttcactttgatatcaggaaagaaagggaaggtgtaaaacaacttcccacactctccctcgggcagctgagtggatctttactttctgcacaaactagcattgaaatagcagctctgatgagctcttccttggtgtgccttaaacatttgcttgcacatgttctgcaatagactcgggcttctagaccacatggtctgaggtgagcactgaagactggagtgatttttacggttataattcaaacgaagctaatgttggtgaagtaaatacctaaaagcccatttgaaacccacagtctgtagaaagggattcaaatcaaggccataagacaaaacttctagagtcaatgacattattttctttttttttatacaagcacttaaatgtttgcaaaaatctaaattaatataaagaaattattaaatacacaaacaaaaactggggatgtttcgaattcgcattgtctgacattactgacctttccacccttacgattgtcccatcaggaaataaggtctcttcctgtccatccttgagatgttccaccgtcccgtcgggaaacacgatttctttggagccattggggtagaatttttctgcagaatgcagtttttcagtatatgttacattgaatctgtttagaaacatgttctatgcaaataatctataaaatattcatgagatttatagagagtattttctttccttttcttttcttttcttttttttttttgagacagagtctcactctgtcacccaggctgcagggcagtggcaggatcttggctcactgcaagctctgcctcccgggttcacgccattctcctgcctcagcctcccgagtagctgggactacaggcgcctgccaccacgcccggctaatgttttgtatttttagtagagacggggtttccccctgtgttagccaggctgattgtgatctctctaccttgtgatccgcccgccaacgcctcccaaagtgctgggattacaggcgtgagctacagagagtattttctaatcatctggctttataactaggattgccaggtataatacaaaatggccagtgaagtttgaattttagataaatgatgaataatttatttttattattattatttttttgagacagagtctcactctgttgcccaggctggagtgcaatggcatgatctcggctcactgcaaactccacctccccagttcaagcgattctcctgcctcagcctcctgagtagctggaattacaggcattcgccaccacacctggctaatttttgtatttttagtagagacagggtttcaccatgtttgctaggctgctctcagactcctgacttcagatgatc

SEQ ID NO: 59659 - DNA, 415 bp, Homo Sapiens; identical to SEQ ID NO: 38614

SEQ ID NO: 59660 - DNA, 464 bp, Homo Sapiens
  misc_feature (96)..(96): n is a, c, g, or t
  misc_feature (116)..(116): n is a, c, g, or t
  misc_feature (400)..(400): n is a, c, g, or t
taataaaaacggaggtcattcctcttgctttcaggagcttgaaaaataagccagagcgaccaagggctgcaaggctttgaccttctggtgaagacnagcctttagcaggaggaacnctaatcccaggaagttgtctgtactttgctttctgctaccacactagaagattacttgatcaaacaaatgggcatttttccccatgatatctctgtatcatgaaaaagtacatttgtcatttaatttttatctaattgtattgccgtttccttctccgcctctttctcccacctacccccacccctcctacactggcattctctgtggtcaaagaatctgtttcagtattagtgttcaatatagcaaatgtcaagtaaacactctacacatttcctgtgctatntaaagcaccctaagcaattatttgctcttaagtattaaactgtagattttcttaactggtgccc

SEQ ID NO: 59661 - DNA, 561 bp, Homo Sapiens
tttctccatcaatatttctgatttttctaaaatagacaactattcttaggttccaaaaggcatttttacattcttttttaaaacttccactaaatattaaaattccttaatcccctggaaacatttttctaataaaaatacatggctaaaattatggtttcagtacagctggtacccactagtttaaataaaatttgggaatgtctcagaagagagatttcacaacagtcaataattaaggcagaaataattaaccccaaaaggaaaataatcttagcctacaacaaaagacttagtagcacagaagttccagggatttgggtgttctttttggttttgcactgtgagtgagcgtatttgtttttattacatgcatacattattctgttttgaaatcttgctaaaagatcacaacccctcctaccactcagctattcccctagggactaggcagcctgccacataaaaataaatgcaggaagtgaagaagagctaacaaagacatcagcaccatatggaaatcacgaaactgttgaccaaataaattaacagcctggatgg

SEQ ID NO: 59662 - DNA, 233738 bp, Homo Sapiens
gaattccagggatttttcttgcttggaagtaactggacctccagccctgaattcctctccccaggagagcttgttcccctgctcagaacaaataacacatttcctggttaatcagagggcagaatcgctgaaggaaagtttgactgggcccccagccttccagacgggagccgctcatgggcttggatgttctgctccagacactgggcagctgggaccccagcactgcgcagcctcagcctccagtttggaaggtgcaggccgtacagagaggtgccgactccctcctgtgtgaggttgttaaggcccgcaaaggctgccagaaccattccaccttaggtgccatgacctggcgtcccctcaagaattcacaaccaccctgccctggtctgccggtgcctgtctcctccaagtgggtatgacatgctggctggtggtgatagccatggtatggatgttcctgcaaaggtaaggtgagctggcctgtatttcagagtgtgctggaaagggccctcccacaaacatgtggtgaacatttacgtcttctgtgagcggagcacagttctgagctcatttccgtcttctgtgaatgcagcacagttctgagcttcatttggcttctactttcttatctgaaagttgagataatgatgttctttttgccatttttctcttcaggacaaactagctagccagccctgtttaccctgtcatggggctaggggcaggtgtcaattactactcctccatttaccaactgatatttcatttattgtttgtttgtttgtttgagacagggtctcactctgtcacccaggctggagtgcagtggcacaatctcggctcactgcagcatccacctcctgggttcaagcaatcctccagcttcagccccccaagtagctgggactgtaggtgcacgccaccaagcctggctaatttgtattttttgtagagacggggttttgccattttgcccaggctggtcttgaacccctggactcaagtgatcctcccgtctcggcctcctaaagtgttgggattataggtgtgagccaccacatccagccttggtatttcttgagcactcagaaggtaccaggcactgtgccaagtcatcttatagtcacttccttgtttaatgagaagcgctattgatgaaggaagtgctattatttccccacatagcagatgaggaaatgaaggctcggggaagtaaatgactcatccacagtcacaagccagtaggtggctgcgctgggattcactcctggtttgtctggtcccagatgctaaaccaatgccagcttccaggggaagggagaccaccgacagctgcatttttctcagagctggaagcatgcacagctgtttgtggtgtggtgggggtgctaatggctgcatgggactgtggtcacaggtcagcccccaccaagcatcccccattctcctcaggcctgtttaccagctaggggtccgctctgagtcagggcggtgaatctgattcgcacccacagagaagaaggaaggaagtcacagccacactcaccccacctccatcaagtagtctgcagttgctgaatagagctcatctcaactcgtagcttttctctttgggaaagagaaatgacatacatacaatgtctatttagctctgtgtggtagaggtgttgccattcccatttcacaagcccagaggggtagtcgcttgctcaaggccacacagctgggagttgagccaggattcaactaaaaagtctgaacaactccaaagtccatgctgttttccctgcagcacactgcactcacaccagggtgtcctgcaatgatgggaaatgggcagctctttcaaatcacttagttcacttcgcttcccttcatttccagtctctggtgcatgggtgggctgatctgaaagctccgtgccattcactataagctgagatgtcatttcctatttacctgcataaattccttcagtccctggctgggggtggaggggtggaggaatcttctaaacccccgggggagcctgaagcataacttctcctcaagcacagtctctgaagacctgagcaggacaacagtgtgagcagctggaagacctcctccctgtaattcctcccagtgagaccaaggggacttcatatgctctgctggaggtggagagagttacccagatggggagagctcatgtacctggattattctttcaaaatccccaggaagaaaaccctgtgggctgggggattgtgcaggcctatctaggcttctagaatggctgtgcaggaatttgaggacaaaaaaggacaagaagcagcttcccttggctgtcgctggcatcttccagcctgtgcccaccttggctttgagctgggtcatagtaacactcctcacaccctgagggatgagggatgcaggggcagagaggaaggtctacagtagggtctttcctaaaacaagctctccccagggaggcctgcaagccagctccctctcactctccattgtcaagacaaagagaggaagaggatgccttctgccatcatcccctgagtccattttccctggatcatccatggagagtgggggctcaatgatgtttgccctggtgcccccaataccctctctagggccccagtccctcaggaacagacccagacctggcaaatccccaggaaagggcacagacaccaggctgagggggcaggcgaggtgcagcagatcccagtgggccccggctagtcctagtctgaatgactcattccttgtttccgtccactgtggtctgagtgccttggcccaggggcccccaagaggttgtaacacaggctggcctctcgcccatcagggctcagcagacaaaaattaaagatctcactcctcaggaactcacacagacagcacaggcatgctctgtactctgcctcaccagaccagacctcaggccagaggaggctgatggccaagagaggaaggaaagtcgtctccagctgctcctcctcctcttcaccccccatgacctgccatgaaggcctggccctgcccactgtcttcttactccccctctggtcctccgcctaacagtggtggtgccagcggcatctcctcagctctgttccgttcctccccatttctgactgaagacaacagcaaaggtgaaacagcctgtgcctcccaggaggaacagacttatagggaactaaccatacattttctggcagcccatttctgattaagtcactcacctgctcaacaaccttcaatggatccccactacttcacaaatcaatcccaaacttcttactgggtttgacacacaagcttgtttcataaccctcccagccatgtatgctgacactccgcacagtctcaccctctcagaatcccacccagtttcctctcccccatcccctcacccaaacaccttggctgacattatttccttgatctggaatgttcttcaccacccctgcctgtttgtttaaactcccattttaaaggccgcctcttccatgaagacttcctgggcacctccctccatctggaaagtttgctgcttccaccaaatccctgtagccctcaacgtactgcactctgctctgcatgactagtccacagctatgggtcctggagtagtaggaagaacaaggggctttgtggttctaacctcagcaccatcatttaccagttatgtgccctgggctaagtgactcattgagccagtttcctcaccaagacaatagagatccaatagatacctttctaaacaatgcctagaaaaagcaactgtacttatcagtgacataacactccaggccacagtggattgaaccaaagataagcacctgagccacaggcagccctttcactggccagtcagtgacctaagatttctgtgggctgacttaaatacagacatcattggttgctgaacaaatgagattctctctgaaatttcaactaagaaactttactttgaaagccaaccccctgggattaaaacagacaagtccatgttccctagagcttacagcccaatggagctcgtataaccacaccgcaataaagccagagaggtggagtgacttgcccagggtcacacagctagtcagttacacagagaaggctagagctcaggtctccccaccagggcttggtctaggttggttggcttctactacaggatcaaaaggatggaccctgaactgattgcctacagaaggctgaagaggcaccagccataccctatgtgaacctatgctaggcacatgggcggctttggtgcaaagaattcttccattccaagcagtcattaaaaccaaagtcagatcatgtctgggagcagactccagttggaattctgtgtctgcccttagtacatctttctgatcacaccccttcccctccctgggcctcagattcctcatctacaaaaagaagatttttacaaattccctgtcaacactaagattttgatttgagcagcagacagataaggagagcatgtggatccaaggaactgcagggtccacagaatgtgcatgtggaggggactccccgagataggccatcccatttcttcaatttatggcagggcaaactgaggcccaaagagggagagatgctggcccaaggtcatgtgactggttattggccagcacttgaaccagggcctcctgactcccaggcctttcaactctttcagctgctgcaagaagctgggagctatctggccgtctgggccagggaagccaagagtcactatgcatgtcagggcagggcctcggggcttgggaacatctctgatggtgagtgtaagtggcaaagctgctggtggagaggggtggctcgagggtcccggagggcgtattggagatgagctgtcagcagcttccctcctctggctgacaagaagaaacagggaagggtccatgatggttgaagggaaacagtccccatttctgataaagccactgctccatggagtgccccccgcaactcacacacacactatccacccctgcctggctgctgagacctcccacccgcaatctccgtctcaggttgtgtattggtatcctcaggcacactattttgtgaagcctggaattcctttcactgcctgagatgcttccaagcacccatttctaaaattcagcctgtttggctgggatcatgatgccctcccattccacagacattttttgagcacctaatatgtgtcaggcactgtgctaggcacggggacaacttcactccctttgtgatgttaagtgcttccataggggaattgacacagccttttggacttactgaaaaactgctaattgtgcgaggaggggcttggttggagaacatttctcagaaagtcatgactctgacttaaatcttttttgagacagggttttgctgtgtcatccaggctggagtgcagtggcacaatcacagttcactgcagcctcaaaccaaggctcaagagatcctcccacctcagcctcccaagcagctgggactactggcatgcaccagcacactcggctaatttttgtatttttcgtagagacagggtttcaccatgttccctgggctggttccaaactcccgagctcaagtaatccatcctcctcggcctcccaaaatgctaggattacaggtgtgagccaccacgcctggtttctgacttaaatgttttttgttttttttttttactggagacagggtcttactttcacccaggctggagtgcagtggtgcaatctcagctcactgcaacctctgcctcctgggctcaagtgatcctcccacctcaacctcccaagtagctggaaccacaggcacacaccaccatgcctggctactttttgtcttttttatagagacggggtttcaccatgttacccaggcttgtctcgaactcctgagctcaagtgatccacccgcctcggcctcccaaagtgctgggaatataaatgtgagtcactgtgcccagcctctgacttaaatcttaaagtctaagaagcagtttagcatatggggaagggtggggcatgccaaggcaaaggcagtgaacgtgcaaatcctgagtgactggaaggattgcaagaagcttgtatggctgaagtttccatagaaagaaggttatggaaagggaggaggctggaggggaaggctggggctaatgcatgtggagcttagctctaacgagctccttcgctcagaaaaaggaatctggccaggcacggtggctcacgcctgtaatcccaggactttgggaggccaaggcgggtggatcacctgaggtcagaagtttaagaccagcctggccaacatggcaaaaccccgtctctactaaaaatacaaaaaaattagctgggcatggtggcacgcacctgtaatcccagctactcaggaggctgaggcaggagaatcactagaatccgggaggcggaggttgcagtgagctgagatcacaccattgcactccagcctggtaaaaacaagagcaaaactcagtctcaaaaaaaaaaaaaaaaaagaaaagaaaaggaaaaaagaatctttttcccacatccaagccaccagctggccccagagtgggcagacaactacctggaattctgaaactgatgtcttctggttaacagggaggtcacttgggtgaggaggaagcagcatgatcttattctcatcaaccctcactaaagccaccccaaaataaacatctaaacataaagtcgtacagatgccagacaggtatttgccatgcttaaaacaatgcccagtcctgcttcccagcactgcatccccccatggcttctcttttctagaaagtgaggagctgccagtgcaacagctctggcctggcccctgggctcctgccgccatgacccactagccagactgtgtctcttccttgccccagctacctccacttttctaaaccctctctgaatttcctactccctttggaccccccgggttcctctggggactcagcctcagtcaggctcttgtccccagtcactcattcttgctgggcctcaggttcttctctgatcccataagctcaagttgaagttatatcatgccgggtgtcacaatatacatctccaagcccacctgctcttcggcctccctcatagctttgcttcatagatagagaagccttatgtgcttgacatcaaacagatacctgaggagtgcctggtgcatttcagccattatttcttgagtatccctttgtcaggcatcagagttgccaagaagaataaggctaaggacggtccctaccctcaagcagctgccagtatagtaggaaaggcagacagtacatatcatggtaagtgctgtgagtgagataagatcagggtacaatgtgaatacaaggacagggtacctaatccagcctgggagcataggatggtcagggaaggtcctagagaagatgctgtctgagctggggctggaaggctgggcatgtctcagccaggagaaggtgaaaaggctgaggaagagaaggcaaagctgtgattaccagagccaggttcacacaaactaaaccacaccccattcaaccccgtttctttttttttttttaagacagagtctcactctactagagtgatgtggcccaatcttggttcattgcaacctctgcctcccaggctcaagcgatcctcccacctcagcctcccaagcagctgggactacaggtgcgcgccagcacgctcggctaatttttgtattttttgtagagacagggtcttgccatgttacccagggctggtctcaaactccaggtctcaagcagtcctcccgccttggcctcccaaagtgctaggattacaaatgtgagccacagaacccagccccagttcctttttcaatagggttcctgaccagagaaatgttgtcctatttttaatgatattcaaatgaaatggaaatgatattcaatgtggataggctgagaaaatgtggagctcatggtaatgcaattaggcatatgtgtagatgtttaaacaaccattccccacattgatgaatgaatggaggtcattgagacctataaacatgcatgagacagggatgtaacctacacaaaacttctcacaattttgagatcagaaaaataatttttaggccgggcgcagtggcccacgcctgtaatcccagcactttgggaggctgaggcaggtggatcacctgaggttgggagttccagaccagcctgaccagcatggagaaaccctgtctctactaaaaatacaaaaaaattagccaggtgtggtaatgcttgcctgtaatcccggctactcgggaggctgagtcaggagaattgcttgaacccgggaggtggaggttgcggtgagccgagatcacaccattgcactccagcctgggcaagaagagcaaaactccatctcaaaaaaaaaaagaaaaagaaaagaaaaataatttttatcaaattttcacatgacatagaactagaagaataaatgataaaactggatgatagaagcaaaatataaactgatcttatctagaaatttaatagagataagtaaaaaagtcttacatcttggtccagataaattaataattaacttaaggataagagatacttgctttgggccgggcgtggtggctcaagcctgtaatcccagcactttgggaggccgaggtgggtggatcacatgaggtcaggagttcaggactcccagctacttgggaggctgaggcgggagaaatgcttgaacccgggaggcggaggttgcagtgagccaggatcacgccattgtactccagcctgggtgacagagagagactccatctcaaaaaagagaaaaaaaaagagatacttgttttgataccagctcatgtgaaatgacccaaatttggggagacagtggtgcaaactattcagcagtgaatagggagagcctaggtagctactggttcaaaataaactaacaatacaacttccttaaaggtctagtgccatcttggatagaatccagggctcagaagccaggtgcggtggctcatgtctgtaataccagcactttgggaggccgagcggggaggatcacttgaggcccggagttcaagaccagcctgggcaacatagcaagactctgtctctacaaaatggtctggtaagaacctatctctacaaaaaaaattaaaaattagctgggtgtggtgcacacctgtagtctcagctattcaggaggctgaggcaagagtatcatttgagcccaggagttcaaatccagcctaagtaacacagagagactctgtcacagagagagacaaaaagtatatttaagggcgagggttaacagtaaatgggcatcacatcttattgggatgataaaatgttccaatattgatttacagtgatggttgtaaaacttggtaagtttactaaaaattgaattatgcacttgaaaatggtagattatatgatatacaatatatgcctctataattttttttataagagttaagagtttcaggccaggcgtggtggctcacgcctgtaatcccagcgctttgggaggccaaggcaggcggatcacctgaggtcaggagaacagcctgaccaacatggagaaaccccatctctactaaaaatacaaaattagctgggcgtggtggtacatgcctgtaatcccagctacttgggaggctgaggcaggaaaattgcttggacctgggaggtggaggttgcggtgagccaagatagagctattgcactccagcctgggcaacaaaagcaaaactctgtctcaaaaaaaaaaaaaaaagaatttcgggcaggcgaggaggtggcttacgcctgtaatctcagcactttgggaggccaaggcaggcggatcacctgaagtcaggagttccagaccagcctggccaccatggcacaaccctgtctctactaaaaaaaaaaaaaaaaatacaaaaattagcagggtgtggtggtgcatgcctgtaatcccagctacctgggaggctgaggcaggagaatggcttgaacttgggaggcagaggttgcagtgagctgagatcgtgtcattgcactccagcccgagtgacaagagtgaaactatgtctcaaaaaaaaaaaaaagagagaggagtttcgtacttcaaggttggggaaaggagaatatcctgcaaaggagataatgaagaaaagtccgaagtggaaaggggaagtgccatagaacccgatgaaagagacattttaaagaaggaaactgtggccaactctaggcaaagccaccgaggtgtcacataaaatggaaacttaatagtttccattaaccaggcacgatggctcacccctacaatcccagcactttgggaggtggaggcaggctgatgcttgaccccaggagttcgagaccagcctgggcaacatggcaaaaccctgtctcttctaaaaatacaaaaattagccaggcatggtggtgtacacctgtaatcccagctacttggaaggctgaggcacaagaatcagttgaacctgggaagcggaggttgcagtgaactgagatcgcgccactgtactccagcctgggcaacagagcaagaatctatctcaaaaaaaaaaaaaaatagtactttatttatcacagtggagttcacaatagagtttcagattcaggactaggaacagcaaaaacatggaaatacagatttccgctctagtaaatgcagcacgtggagctctccaacggcaggacagatcccactgctgagtaatgaatgagctctctgacaccggtagtattcaaagagagcctggatgaggcattgtagaagggatttctacatggaaggaagatctttaaggagtacgagtctgtgaaaggcccagggttttcctaagatttcatgacttctctttgctgaagacctcttctccacccctggccttgggctcctcatctcaagcattgagagcttgacctgtgggaaggcagaatggcccagcctcctgaagccccagggacctcactgctgttgggtaggggtccttcaacctctgatggctcccttgagtaatgagctagcccaggggtgggtgatcacacaacagcaggttttcccaaagtcagtggagagaactgagtaatcctgggagaccaggagaaagagactgaagggcaagggagatggcatgggaggactggtcctcctttttaaatatgtggggccagctgtctttgtgtctctgcctcaccctcacacaacatttccccagggataagatgtgggaaggagaggctacaagatgaagttcatggtaactgtgtggagggttcctgagataggaagaggaggaggatataaagcacctagccaggcatggtggtgcgcacccgtagtcccagctacttgggaggctgaggtgaaaggactgcttgagcccaggagtttcagaactggtcaacatagcaagaccctgtttttaaaaaataaaaaacttggaaagctgtgtggagcttctgcactgcttgagctgctgatggtcaggtctgtgtcagctggcattgttccaacatgaactttgaacccatagcaaaggggaaggaatccttgacaactcccagagtgggcctgacaagctacggtgctgcctggtcaccaaaaaggacacacaagaggcaatccattctcccagccaacatttcctgggcatcttctatgtgccaggccccctcacagagcttgcagtcgttcattctgctcattcattaatacgaggaaactgccccaaaactgcaaggaaaatgccaaccaggctaggtaacagagctgaaggaaaaagagccaagtgcatgctttgagcctgcctcatgaagtcaagtcaaacatctttctttcttgtctctgtacaagaactccagctggggaggaaggaggaggtgacagcaacagtacatgcttcccattgtacagatggcaatcttgatctccgaactgctgcatgcccagccacagggggcatcccatgtgacaaggaattagaactacactgcttcctaatactatatttcgtggcaggaggagttggaaccaagggacctcaggttactctcccaggatgtgggaggggaaaggtaaaggtagtgtgaagtgggcctcagcagaacctcagagccaaaaggaactccggggaccatctgacctgcagcccctccacccccagcccccattccacaaacaaccatcccatagcccatattgctcccctgggttccaggagacagtgtcccaggttttgccttctctggtcttttcttccacatgccctgaatctaaggaaacactggggcccatcaggctcacagatgactgtgttcccacttccacaccaaatggtaccagcagcacatgtcagctgggagcagtggctttcaaaccttttaaccacaactcatactaattacttttttttttgagatggagtttcgctcttgttgcccaggctagagtgcaatggcaccatctcggctcactgcaacttctgcctcccaggttcaagcaattctcctgcctcagcctccctagtagctgggattacaggcacccatgaccatgcccagctaatttttgtatttttagtagagacgggttttcaccatgttggccaggctggtcttgaacttctgacctcaggtgatccacctgcctcggcctcccaaagtgctgggattacagacgtgagccaccacgcctggccctgttttgtttttaatgctggttgtgactcactatggtgatttcacaacccacatgtgcatttcaatgcccacctgggctagaggtacaggctcagctgccggagtccttaacagaggtggggataactaagggcaaaccaagagggtaaggcatgaaggagcagcaggatgggcagtttatatgtccccagaagaaaggccttggaacccctcagcctgaagaaaaaggaggccaagggcaggctctgtcagatcttcacctataccaaggcgttttcttcatttgcttgtttgtcccatatagaagacagtgagcggtattcttcacactgagcacaagaaaaggggagttgacaaaaactgcagtggaaaataagtcagtgcaacacaggctgggtgggtgagtatgtgcagggagtgagggcagcaagagattctacgcattaaaaaaggatcgtggccaagtgcagtggctcacacctacaatcccagcactttggaaggctgaggcaggtggatcacttgagctcaggagtttgagaccagcctttacaacacagcaagaccctgtctccaccaaaaatacaaaaaattagccgagcgtggtggtgcatgccctgtagtcccagctattcgggaggctgaggtggtagggatcacttgagcaggggaggcagaggttgcagtgagctgagatcgcactactgcaccccagcctgggcaacagagtgagaccctgtctcaaaacaaaacaaaacaaaacaaaaaacggttcatgtgacgtttcttcttattaaaggtaaggggaagtggggaagtcagttgtccaagaaaactggtaaatgctcagcaatccgggatggttgtgatgtttcccagaagacactggaagggctaagatgatttgagggggtcctgtccagccctgggagttcactacctccttagctcgccccaacaaaacctgccagtggactttcaccctggcttggggttggctgaggaaggtttggctagatccacaggctgcccaggcagaaaggcctccccatttccagaccctgaaagagaaccaggccagggaaaatctgagagagagagtgagaacctgtggaggggccaggtgtagggaggaggccgcacactgtgtgctgtatccaagtgttccagactgggtgggaagcactgggagctggggcaggggacgggaaggggtcgctgagcaggagccgtgaggtcagtgttgggcaagaggcaagtctggctcccatcatacctgcactaatgagctggaagcagacggaaacggcacagcgtgtgaaggccagcaagggaagatcctccccatgccagctggacgggaaaagaccgagcgtggtggaaacagggcctgtcccctccccatcccctggaatctcaagctagaggctggaacagccaggagaaggggttgggaggtgagggctgatcagatgaggctgaaacaagacctcctgggggaaaggggattagaaagatgccaagggactgcggcatggaggagagaaagccaaggggctacagaggcaccctgccaaccctggggagggaggaggccccaggggggttgtcagctgcaggcaccggccctgaggagaacagctggactgagccaaaggctggacagttgactgacttaaaagggcagacggaatgggcaagtccatcctgccccgtcagggcagcagaaatggccacaagtattcacagactgtaaacactaaggcagggcttgtctgggactgggaagatctggctaggcctggcaggggagagccgagggctggaaggaggcctgagcctggtgacttctgcagtggactgtcctgagacccaggaggagggtcactttgggagccccaaggatcactcacaaagcctcactggagccaggagctagacacagctctagacagacagcaggggctgtcttttgtgtgcgtgcagggggcagatcaccccagcaggtagtttttcctctccgacgtccaggatccagggactcgagagtggcctttctgcctgcatcctgggcatggtgttagaagtggaggggtgctgactctacctcccagctccagtgggcccaacgcaggtggataaatatttacagaacatctgcattaacctttcacaggcagggtggcccctcccagtggctttcatatggaccctcacccccaccccacctctggtacagaaaattcctaccagaagcagagcctatggatccagtttgaccctgtgcactcctggttcagcatcaacattggctgcaggtgaaaacctaaggctgtgaccacagacaagtggcctctccccttggggcctcagtttatccacctataacacaagaggactgaaccctctctgcacccagtgattttcattgattccagccttttgctcggcctatggttgctatggaaacagcacaagggaatagtgcaccccgcagacagggtggcaccctccagcctgtgactatcacgggctctgtctgcccagcatccttcctctcttattctcctaccagcatccattttcctttagggaactgctcttcccttttctaggctgtctgatggaacagccagttgcaatatttgcaatggggcaaacaacccaaactggcccaatcagattctctcccatgatttggccctgaagcagagacacacagttataactaaaccatccaatcgcagctccccaaaaagttcccggggctgggagcctcattactgcctacattcctggcattcttcctatctacttgttcagttcttatttctattatgtttgctcctaaaatctttgtggtaaccttactcttttttaatgtacaaatgagagtcctggccaggtgcagtggctcacacctgtaatcccagcactttgggaggccaaggttggaggatcactgggcccaggagtttgagatcagccttggcaagatggtgagattccatctctacaaaaaatcaaaatattattcaggcgtcgtagcacacacctgtggtctcagctacttgggaagctgaggctggagaactgctcgagcgcgggagttgaagtctgccatgagccatgatctcggcacacactccagcctgggtgacggagcgagaccctgtctcaaaaaataaattaataaataacaaaaaataaaaattagaatccttattgctcataagaaaagaactctagctgggcacagtggctcccacctgtaatcccagcacttcgggaggccaagaggggtagatcacctgagatcaggaatttgagaccagcttggccaacatggtgaaacaccatctctattaaaaatacaaaagaaattagctgggcattgtggcgggcacctgtagtcccagctactcaggaggctgaggcaggagaatcacttgaacccaggcggcagaggttgcagtgagctaagattgtgccactgcactccagcctgggtgacagagtgagactctcaaaaaaaaaaaaaaaaaaaaaaaaaagaactccaatttatataccagctgagagagacaggctaggtggactccagccctccctgctttgcaatcctagggccatgggctcagctctcccacagcattcagttcatgtagtcagcatggtgggtttggctctgtttgctcaacaagactgcaaacatgaacagctgtatctcagacacctgactcagaaccttacacacactggaggtgcttagttgcatggaattgtgatcttacagcttgaggcaggtaactccagtgggaacaaaacttaatgagtatcaggggataattcccagagaaccgatataaacagctgcccaacagaccaggtctgggacaaggcaattcccactgcatccaagtgacggataagtgcaggggagaaggggtcagggttcatggcagggcgttttagggaaagtctactctgccccctgaaatctctctcccacctcttcacgaatacttctgatttctgaaacaagatgctaaggcactcggtcagcacttagaaatgcatctgcccaagaggagatcaaagagaatgttttcatttactctgaagtataaagattgggtaaagacccagcacggtggctcacacctgtaatcccagcactttgggaggccaaggcaggtggatcatgaagtcaggagatcaagaccatcctggccaacatggtgaaacccatctctactaaaaatacaaaaatcagctgggcgtggtggcaggcacctgtaatcccagctactcgggaggctgagacaggagaattgcctgaacgcaggagtcagaggttgcagtgagctgagatcgtggcactgcactccagcctggcgacagagtgagactccctcccgccgccccccctcccaaaaaaaagattggggatagactctttcctaagcgttcttgacaggggaaaaaggttagggggcataaaggttttcagggtgtggaaagtaaaaatggattttcaggtagaacatgagaaagagaaagggctggaaaagaaggctgggatacaagcgtatgggatacacatcagctttggctgcaagttacagaagctggctctggcaaacataagtggcgaaagagaatttgttggaaagatacatggtactgaaggaggccttcaacactcaggcctgagaagggaccagggcagctttgggggtctgggtagcgggaactcatgagctgtctggctttggatgattctaaagcaactgccttccattatgggtaatgactccaactcagattcaaattccccaggaaaaagtctgacagatcttgggtctatgctcaccctttgagaatggagggttgggagagtcctgtggctggcagccccaccaggaatgcatggaattggggagtttgagtttcccaaaggaaagctgagtttctgttactcaaggaagggaagaagtgctgggcatatgtgcacagcagatgttctctacacatgggatgtcaattgagagaggtgggggatggatggggtgggggatgggaatttccaggacgctgcagaacctgccataggggccaaggctcctgccacagccctggattgcatctccctctcctcctataaaagcaagctcaggaaaagaacattgtttctgttcttgacagctccatagaattgtctccttagcttccagtcacgctcagctcctgctagaataattaccacccacctgttctccatacaagaattcacagccagtggacacacatctggcctgtaaaagacatgcttggaagtctcccaggctgcttggaacaggcaggagacaacacagggtcagccactaattcaaaggcaaggaaacagctggcctgagagctatggtcactggagcctaagtggcagcgaactcctcccctgccaggcagctcaatggatgtgggacaggtgtgtcctgagacaaacaaaccccctgagactcagaggaggtttgagtgctgggccctgtcctcttcttccagcacatggctgtcttccccacccccatctgcttctctagtgggtggagggggctaataccctgcctttcttggagttcctttatttttcttcccattactgtttacatcactcccttctaaacaccatggaaattaagaaaaggccaggtaaagttttaatggggagggccagaaatattttggtggtgaaggtaattgcatccaagttttaaggatgtggatgcagaattggaagggagcagggcgcggtggctcacgcctgtaatcccaacaatttgggaggtcaaggcaagtggatgtcttgagaccagaagttcgagaccagcctggccaacatggtgaaaccccatctctactaaaaacaaaaattaaccaggcatggtggcacacacccgtaatcccagctactcaggaggctgaggcaggagaatagcatgaacccatgaggcagaggttgcagtgagccaagatcgcaccactgcactccagcctgggcaactgagcgagactgtctcaaagaaaaaaaaaatggaattggaaggggactgactgagagagcctctaggccagcggttttcaacttttttttttttttttttttgagcaaaacctttgtgcagtgtttcagcattcaacaaatatttactgaatgccaactctgtcccaggtgctgtgctaggggatacagcagcatgcaatccagacctgattccagcccttgtgagcatacagtgtagtggaggagacagacactgggaaaataattagataagtagatcaacagtgagctgcaattgaagtagagctaagaaagagacgtatgcagctagatgacctaatacagacttgggaggggatttggggaaggtatccccaaaggaatgacattggagctgagatctgaagggtgcacagaactcagaaaggaggtatggaggaggacggtcaggaggagatgtcataagatcctggaggtaggaaggctcttgtgctggaggaactcacaggcaaggcaagcagagtagtgtgggatgcaggggctagggattcagggaccagactgccaggggttcaggagtcagatccaagatgtgaacaggaaactggggagctcctgtggctggaaaggggcccgcccttgatctctccccaaacaccccaacacacatacttccctttgccttatagcctctgaggcatcttggaggaacgttggggcttgtccgaataccgcttgaaaaccacaaatccagccctattgccattttcagatgtgaagactgagaatcaacaattgccccctcccagtgccctctctgttaactctgggcagctaatccagcctccctggagagagtgtgatgcggtgacagactctgaggacactgcagacagctcagtgtttcaggaatgatggggacagccttgagagccagcccagggctctggcatggggaatggaccccaaagatgagaggttggcccagtctggggcactcagtcttttctgcctgtgctgggagagtctctgaccctcttagcccatccccatcattcatccagaggcgcaggcaggccgcctgccaggatagcagatcccactcagctctggcctcaacattcctctccccgccggggggaaaggtcaagtgtaggatattttcccaagccctggagaacagcagcacctcctgatatctacagctactacccagcttgaagggcaactaccagggcagacaggcaggacgggagagcagtcagctggccctctaagcagggctgcagggggaagggactggggaggcagggcctgaaatatatcaacaacttcagccccaagaagtagagtagagagtgggtgatgggaaaagggcttgcatggcaggggtctgaggctgaggctccgtctgcctcaggaaggctaaaacgttcctgcttcaacccagctggtcctcatttaactaactccagggtctggcctctctggagaccccctgctggcccgtctgcagctcctggagcagaagccaaaagcagccaccagcttagagacagcagctgaacccagagccccccaagcaggagacaggcagtgcaggcattgcaggcccctttgcaaccctgcaaggagtcaaaagccaagtaggtggggctggggggaaggcttcagagataaagaaggcagaggcaattgtctctaagccagatcaggagcagctatggagagaaaaatctcttggagcctggaaggtggtttcatcagtcaaggctgtcctaaggcaaactatgcaacagtagcctcccttcttcccccgtctcccttctgcccctcatccagcacactgctctgtgagcactgggcacttgccatcctgccatcctcccccaggggaaggcaggtacagaggaacaagggagcaggtgccagaaggcctgaattcaaatctagctgctccctattctagccgtgtgaccttcggcaaagatctgaacctctgagactctgctcctgcttctgtaaaaatgggatggataagagctatgtcataggactgtagaaatgattgaatgagaaaatgaaggtaaagatcttaggtcttattgagtttgccatggatactcctcatgggacaagagagagagaagggggaagtggggaagtactggggactgttgaatgatccaaatgggatgcctgatgaatggggcagctcccaaatgtttcaaccctgtttccaaggtagaggctgggccagagagtgggtggtgagggcctgaggtagggaaagttattctgtattgaaaagaaaacagagagaggaagtcagatctcacgacgtgcgtcagccaagagcctgggcagacagtgtctcctccagaggaagggctggtactccggcactctgttgccctctggcagccgctaagctcctgttttcctcattaagctgtccgcaacctggccccctttacactgctgataagggccagaaacaattcagaatccccaacagatggcatctgtggttttcaatgtcacctcccgatggaatcaacaaggtggggctgaactcaggtggactgcagggagtcagggcagaaaagcaccaactctgaggggtggagtccaggattcgggaacctcactgtgtgcccagcgatgttaggcctcgtggacacataaaatggtaaaagctagtatttgttgggcacacactatttgccaagctttggtgctaagcacataagtttattatctcatttaatccccataacaaccctacgaagttgatagcattattattcctattttataggcagaggaactgaggcagagtgcctcaggggcttataatttgttggggagtcaagaacacaggttaatacccccaagggagaagagaacaaaatctgagctgtttctcaccatcccaagtggccctgtcctcagttttgcatcactgtctgcctcagtttccccagatttccagctaccaccatggtggctgagctcaaaaggcagcctccaatcactgttctagggatggacatgctcattttcccaaagttcagccaaggcagaatttgtcaaaataagtttatctaggaaacgtagaagaggatggaacaaaataatataaaaagcaaatgctctgggaagagagcagcttatgaggcagttttcatgtcccaagatgaggaaaataataatagctattggtgtgccaagtatcagacactgtgctatgctcttgattatgttattttgtttaatcctcaaggggactgaagtattacacaagcattattgtcctcatttcacaaataagggaacagatgttcagagaggttaagcaacttgtccaggtcacatagcttgtaaggaatagagagctaggagtcaagcttgcctttgcttttaacaatttaaataaaggagacaggcatggtgagtacaaccagctgacaaccagacaggcctcttgcttccaggccccatttaggtctaatggagagatttgactgaacaacctagatcctaaatggcaggttttcaggatagctctgctgatcctccatctgacagattttcagatcttgctcaggaaataatcagaacacttttcctactggacaagtctggaaaaaaccttggcaaatctgtaccctccagttctcctagtccccatttacacagcccaaaacaaaacaaacaaacaaaacccaaaacaccccaataaattaaaaccctgtatttgcacttgcacttcatttcaaatgaagtacacgcctcatggccaggcacagtggctcaggcctataatcccagcactttgggaggctgaggtgggtggatcacgaggtcaggagtccaagaccagcctggccaagatggtgaaaccccgtctctactaaaaatacaaaaaaatgtagccgggtgtggtggtgggcacttgtaatcccagctacccgggaggctgaggcagagaactgcttgaacccaggaggcggaggttgcagtgagctgagattgcaccactaaattccagcctgggcaacaaagtgagactttgtctcaaaaaacaaacaaaaaaccaaaacaaaacaacaacaacaacaaacaaacagaaaaaataccaaattaccctcataacatgctacaatttccacactatttcactggttaactgatggttcttcaagcccagagataatgtgagtaagcccgtaacccagtgcctggcaagagatgcgttgttgctgcaattatcattaagagacctcttcctgtgttcacatcagcaagtcatccctgatacccttggaataaagcagtatgaaattaagtactaattgaatggttgatatcaatagctattgataagtaatatttattaagcagctactgcatgccagattttagtctatatagctttacacgcattatctcttttaatctttataacaaccccatgagataggaattattgttactccctctgttttaaagacaatgaaactaaggcctggaagtactaaataatttgcttatggtcacacaacacccagatggcgggagtgggatttgaacccagacagctaagttcagaacctgcaccagtaacctctttcctctcctgcctcccgtgatgggtttgacaataggatacagagggtcaaagaaagaagatgtccttgtgtgctgggggagttgggggaagcttcctggagggaatgggctctactggacttgaaagaaggacaagagaagtgaagcaaaacagacatcaattttaggctggaagatgatcctgaagtctcatgggacccaaaaatgggacatcaggagagctctcatctttggaacatgagggattgcttatcctctgaagcagtgtcatttggccaacttgtcagtccaaggaaggactcagagcttatcaggaacctgtggggtctgcactgggtctgtagcatcaaaatagaggaggaggacagcaacagatctcctgggaggccctggggatagggccaggattagatcaactccctgccatctccatactgatcacaggatttgcttagaggaagttgtgtttggtttgctgtgaccatggcagggttgccccagcaggtatggatgcagaggggctcaaggacccacaagtctgtaggagttcacagaaatcttagagagaagcttcaacttcacttaagccacaaaaatattgggggctggggaagaattaaattccaggctaggtaggctcccagctgacaccatgttagagtcttcccgcccaccacccgccaaaggcatgtctgggagggccaaatgagacatacctggcacgtggcaagtgcccttaaaggttcagcaactggctgggcgtggtggctcacacctgtaatcccagcactttgggaggctgaggcaggcacatcacctgaggttacctgagtttgagaccagcctggccaacataatgaaaccccgtctttactaaaaatacaaaatttagctgggtgtggtggtgcatgcctgtaataccagctgcttggtgggaggctgaggtgggaaaatcacttgaattcgggaggtagaggttgcagtgaaccgagattgcaccactgcactccagcctgggcgacagagcaagactctgccaaaaaaaaaaaaaaaaaaaaaaaaaaagattcagcaaccttctccaggccccatctttcagagctcacttgcttggctgtggattacaaatctgtcaaccagactcccagatgccacctgctacctgtttgtgaacacgcacatcttcctgcacagtcccctgtgtgaatatgtgttacaaacctttccaggaagcagagttaaactgagaagattctatctgttcgggtcccagcggcccacagtatggcctccctggacttaaagtctagaatgactttgcatggattgagatgctatgagggtggagtgttatgagagcttgccaagctgagactggctggggaggggacatcacaggtactcttaggaggcctgagaatccgaacaaaacggtatcactaggcagaatgtggccgaagctactagttgggtgctgagcatagttcggcaattttgtgagcatatttgtaagaacatatatgtttatcagtagaaataatgcactgtctgggttgactggctctgtttgtgtacattcttggatcccagagagccctggggagcaatacatcacacaagcatttctcgcctgagagctggtcagagggatcattccagggaaagctgggctggtgttgaccagctgaggtctgagagagaacatgtgtgcaccccaaggccaggcctggctctcataagcactggtggaatttctgagtgcatcagttactctgcacctgtccctttacacttagccccagcctggcctggcccggcccagcaagtctgcagccagaggtagcctggaaagaactggccaacgctttcgagaaccaggctgaggccagaaggcacgcaaagcctgaaggattcctctctgctcaggatcccatgtgagaagtctggggctcctgtcacgtatgttctcagctgtcaccgcacagctcactttcttttatcatggccacgtgtgtgcatgttttgctctcctactgcacttcaagccattgttactcaatgtgtggtccgtgggcccatagcatcagcgtcaaccaggagcttgttagaaacacagaatctcggggcccatcacagacatatcagatcacaatctgtatattaacaagaaccccagtgatttgaatgcacattaaagtttgagaaacactgctacttgaaagcaggagtgaaccttgtcacggtgatctttgtacaactaagcttttgtatcccagatgcttggtggtaattaggtgctcaataaatacatgttttaacatttcattttgaaataattatagacttagagaagagttgcaaaaatagtacagtgatgtatgtgaaccactaatactaacagcttacataaccagagtacaattaccaaattaacatgggaaattaacataggtatcattaaccaaactacagggccttttctaatttcctctgttttccccatgtcccttttctgctctcagattgctcagggtatttagttgttgggtctccttagtctcctctaatctatggcagctctctagtctatccttgtctttcatgaccttgactcttttaatgagtacccctcagttattttgtagtctatctttcaacttgggtatgtctgctgtcttcttgtgattagattgaggttatacacagaatagaggtgatgctgtgacctcaaggcatcgtctcaggggatacgtaatgtcaacacatcttattcctggtgatgttaatcttgatctcttagttaagctcatatatgccggatttctccactgtttctccactctaaaattactactatacttccctctttagttaataagtatattggggaagataatttgagactgtgcaaatatcctgattctcccactgatttgagtggccatcactggtggatcttatcaacaactttgtttttgtttttgatttttgttcctggccgacaattattactattgtgtctgcatagtggtgattctgtatttccctcctttcttctatatttattaattgaaattcttctgccaagaagagttgttacttcttccccatttttttaattcaattgcttatttcagtaggggctctcgggtatttattgtatcccaggggttataattcaatgttatcattattttatgttcttgcttaaaccgttccagccactgggagctcctacaagttggctgttgtgtcctttcaacatgcccatctttttccgagtacttccttattccctggtaccacaagatgtttcagactcatcttgttccatatagtttgaatgaatgaatgggagaatgaaaaaataggctgtatgtataaactcagccttcctgtgattccccaactaagaagctgtatttaattcaattctcagctgggaggaagaacgcatgttcagatgccccatagaatcactcacctccagctggacatggtggctcacacctgtaatcccagcagtttgagaggctgaggctggtggatcacctgaggtcaggagttcaagaccggccttgccaacatagtgaaaccccatctctactaaaaataaataaataaataaataaataaataaataaataaataaatagctgggtgtggtggcacgcacctgtagtcccagctactcaggaggctgaggcaggagaatcgcttgagccctggaggcggaggttgcagtgagccaagatcatgccattgcactccaacccaggcgacagagcaagaccctgtatttaaaaaataataacaaacaaaaagcaacagaatcactcacctccactgttctgtgagcctcgagtaaagctggagaaacttttaacctaaagacaaaggaaactgtatccgtggaaactgtaggctggaaaattggcttgccctgaaagtccgactcatggacttggcacatctaccaagcagtatgagatagtgcttaagagtggctgtgctggagccagatgccttggtctaaatccttatagccacttactgtgtaaccacctcatgcctcagtttccccatcagtaaagtgcaggtgataatgacagtcctggccatggatttgtgtaattactgagtttacatatacagattgcttagaacagcccgtgatacatgtaaacatttaataaccattagttaggagtctgatatttccagcaattagctcatcctgctaaattcattcagcaattgcttattaagcatctacatcatagtacacactgttgcgagtcctgggatctcagcagtgaacgaaagtgacatcactgctctcacagagcatacattcttctggaataaaaataatctaaccaaataacagactacactacttttttttttttttttgagatggagtctcactctgttgcccaggatggagtgcagtggtgccatcttggctcactgcaagctctacctcctgggttcacaccattctcctgcctcagcctcccaagtagctgggactacatgtgcccgccaccatgcccagctaattttttttttgtatttttagtagagaaggggtttcaccatgttagccaggatggtctcaatctcctgacctcatgatccgcccgcctcagcctcccaaagtgctgggattacaggcgtgagccaatgtgcccggccacagactacactactttttaagacagtagagggggacaggaacagctgcatttttgtcatctagcaaaaccattcacccctcttgacataagtatccattttcctctgtagacccacaccctggtatcatgtgattcatgcgttggtcaatcaaataactgtattgccctagccacagtgattggttcaggcaaggacacaagacctaatcagcactagagagaattttgcagctggggcttttcatggtaaaaccagtgagctaagagcttgcggcttgagaataaagccaacacccctgaaggcagagccgggagtggaggggaaagtcctgatgggttgtacaagcccctgaatcaagaatgggccgaagttcatcccaggcttgacttctcagttacacgagacagtcaattcccttctactacttgttactgagagagttctgagcttacttcaatccctcagaaagctgacagctgagcaggaagcaggagcttgtcctgattcccccactgtgcctgtgtcctgagcccctggtcttgctctagtacttctcagtttcctgccttcccctaacatacacaccaccaccaccccactgcccacctcgggccacccccttacttcctctcaaggagattcctgccccgtcctccacagagctggagcctctccctcttgctcacctggcttccctcccatattcttctgcccaagcctcttcttcccaggcaagtctggctgaatccccagctctgtttcgcctcgtggtctggcctcctcctctccagaggcctgaggggctgatgcgtggtttcagatggccagcagaatgctacccccaacctcaggagtcccaccgaagctcacactgcggagggtcccctttttattacctaatctcctgcctctcatgtcttcctgtaactccaggcctgagcggcttcagggcagaatcaaggatgttcgagttctcccacctctatgttctgttagagagccatgtcctcagagcagacggggagacaccaaactcccacttcctttgggaagatttccatttctcttttccaaaatcctagggaatgtactgcgtaagccccttaattatacattgactcacgacgttgcttgtgctgttctctcccctcaagctatctttcattcactagaagatttgcctcttatttgctgtaagcctagcacagtgctcaataaacactgaatgaagaaatgagtggttgaataaatgaattattgaatgggtgctgaaaatagtaagtgaatgaataaataaatgaatagactaatgaggagaggcagtgaaaggcctgggacggagtggcagaagggtcaaaaaaaccctggaggggataggtcctgagcccagggaagggaagatggggcactcaccatggcagaatggcaggagggagacagatgttgtcaagtctctaagccttgtgtttacataaaaaactggagtttgggcctgggttgttttatcgaacccatttattagctttttaaaactttttttaaaaacacatggccgggtgcggtggctcacgcctgtaatcccagcactttgggaggccaaggggggcgtggatcacttgaggtcaggagtttgagaccagcctggccaagatagtaaaaccccatctctaccaaaaatataaaaaattacccgggtatggtggcacgtgcctgtaatcccggctactcggcaggctgaggcagaagaattgcttgaacccaggaggtagaggttgcagtgagccgagatcatgccactgcactccagcctgggtgacagagcgagactcagtctaagaaaaaaaaaaaaacataaacataaaaaaaacatacaaacgccattttcaaggccattgcacatcttgcaatgacatggccggttgtggctctgcctcagcaccccacttcccagatacagaaaggaccaattggccatgccgacagcacgccaggtgcagcctcgggggaaggacctgggagatccagtggacttggggtgcctcccaaagcccttcagcaaggactcaagttctctgcaggtcacaggcagagggcctctttcttcccccccgactcccttctccttcctctgccattgactctccatcctgaatccacactggcactgccgggagccctgtggggcctcaggcaacccaagagagctgaagatgactccatggatttgcagctacaaatgaaaaaccacggtttgttttgaatggattgtggctctggcgagaaagccttgggatataaatccgccatgagtggggatgcagatgggaagcagatgtggggatgttgaaagcccccgctccagcacctaaggcccaccttggagaacacatgccttccactgaaaaatgcagatgggtgaggcagctcagacactgtgggagccccagctaagagcccagtctgctcagctgtcaccttctccttcttccccctccctctaggcaatgaagcactccttctgcattcttggaggatatgcctcctctccctgcctccctctccctctgtcttcataccactgcctgtcttactgtctcttgctctcaggcgttctctgactccatgtctgtccttggtctgtgcctctccctccctccctcttcctggctgctgcccaaggccagtgcccctacccttcatgcttggataagtctgccaatcagcttgaacccctggggtgaagaacgggaagaacagtccaagggcagacggcagccccagtttcatgaaggaaggcgatttcaagccagagacgcctgggcaggatgaggccaagaactgctcacttacccacagggctggatatttagtttgagttggggagggcaggtggcaaccagcctggagctcccaagcctgcaagagcagctctgccccagcccctacccagctttaggtttcattcagtgtggccttctctccttcctggcctggagccagccctctccagcaccaggaagaggcagcacagctgggtaccatggtcacaattacccccaaggacacgggcccaggtgaaggctaggcaggacaggatggagcatgttttgtatcctccactgctctccagagagctaggagcagcccttccctttcaacccctgcagggccccagacagcctccaaaggcaaatgtgctttttctttggcttgtatacagtctaaatactttatccaattgatacgggctctatatccagttgtcttattttcctttttgggtctgtccacagctctctgagctctcaggcaggattttgggaccatttgtggcacattccagaggccactagcaatctcacaaattaattctaaacttgtacacaggctgtgaatgctatacaacttttaggggggacttgagggacacaccaaaaaccatccaaaaatagaatgttgccattcccaggagactggaatcatttagaggacaatttcacaaacgcttctgccgatatggaggaggctgctgtcggaatgcagctgggacccatctccctggcactctcgagtctctgcttaggggctttcccttcccagcaggcactcattccaggatccacaggcaccttgcggtccccagcactgggcggcactgagggggtatcactgtggcaccataccgtaaggcatgatcccaggaggcttggcatttagtgtggaggctaagctcttggttctaggttcctttatgcattgagcatctttttcacacatgcctgaggctgtgttaggcagtgagtgtgaatggcgaacaaaccagacagggagcctctgctcgtgcaagaaacaaacagggtgctgagacctggaataactttcaggaagactgaagagagcagcttgcagctgagggagatctcaggcaggtctcagcagctgcctctgggcttcagtttcttcacccataaaatgggggtgctaacagcgctactttgaggattcaatgagataatcaatacaggataactcctagtcataacaagccactaatgaggaccatacaaccaaagcagttaggagcagacagggcaggaggatagcagacgcagtcagcactctgcccccatgtcttccgatccccgtatcacttcaggacacatggttcactcccaacagcccacacctgcctgtttgtcagcgggctgccctcaggctgttggaacctgctctggccacctgcatggagggcaggccagtgccggggaggtttcgtccctgagcccctacaggcagcccctgaccagtgactctgagtgtggaggtagaaatatctcctccatctccagagctcttgcagactgagccacttacccttcgtggccttttgcttgacattgtatccttgcttggcctcctcttttcagtccccttcccctactcctgggaagatttgggaaaaaatcaccactttcacacaaacccttgtttgctgggtctgcttttggggaaaacatcttaagacactgggaaatgctaaacattaggaggtgtctcctaagctgtgtgaccctgtcttcctgcagagctgcccttgggccaaggcaagtcctcccaagtttctaaggaattagtcacaacaagatagccttctaactcaggaaatctgtgctccttgtatttgaacatggcaaaggccagcaccataggaaccctggatggcccctggcatgtagttctcggctctcaactcaggaaactgtctgagctgctgccttcgggactgtgtactccctccaggaacctgcacagggaggccaaaaaaagggcataaaattcatatttcattattgttattcttctctattcctggaaactccagtcatcctgaagatgattctttagcgtctctcttcccatgaaatggtggactggtgaggcaggcacacaggcggccaacagggcacatccaagatgcaggtctggattatttgtctagactttatgatgtttgtggtatttgccagctttttaagttttaggatttgttgtgatttttttttcttatttcaaaattttccttcatatttaattttgtattcttttttttttttaaagggatcccaaaattatgtaagctttaggcaacagaagacctcggtaggttttgagcatctgaggactgagaggctttttcacagactagcttctagctccatacttttctttttaatatacagggtctcactctgtcacccaggctggagtgcagtggcacaagcacggctcactgcagcctcaacctcccaagctcaggtgacaggtgatcctcccacctcagcctcatgagtagctgggattacaggcgcctgccaccatgcccgtctaatttttgtattttttgtaaagacagggtttcaccatgttgcccaggctggtctcgaactcctgggctcaagtgatctgcccacctcatcctcccaaagtgctgggattataggcgggagccaccacaccccacctggctccatacatttcaactcttgtttttcctctcctgtcttcatacttctggtcccaatgtgacagctgctgatcctgcacctgccactgtgtcaggtgaatcagcacagtgtatggtggaattatttctacaagccatttataatcaggacagttagcaataaatatactacatgacatacacatattacatacaacccaacggagtgttttcccaacataaccaaatgaatatattacagaaggcccaactgagtatattcccaactcaaattcctttagtcatactcccaaatgccacagccacctcaccacagcctgacatgaagggaggtgtgacagataagaaatcagggtggagactgactacagttaaatttttttgggaggagacagggtcttgctatgttgcccaggctggagtgtggtggctattcacaggtgtgatcatagtgcactactctctcaaactcctgggctcaattgatccacctgcctcagcctcccaagtgctgagactacaggtgcataccaccacacctagctatagttttttggttttttttgtttgtttgttgtttttaccttagcaaatactatgactttgaaaaaaaatatgaccttggaaggaactcctgtaggtgagcggccctcaatgtaagcctcattagcttctcaggaaactggcctctggtagctggacttgctgtgaggcttgggcacataatattttaaggtctgtaagttttagccacatcctgggtgtgtgtgtaagggaggagggtggctcagaattgttctgggctcttcatttcctcagtgcccttcaactctgaatccatgtcaggaagaccctggcaagactgaggagggagagcaaatggtaactatggccataactgacagtgagtttggcccctgaggttggacttagtagcaggagacatcagtattccaaaagcccaatcactcctcttcttttgcattttcctttagtttagtcctttaattttttaaaccaaagtttcttctgaaaaaattcttggtttgtctttgctgaatggaagagcaaaggaatttagctatacccaggtcaggccaaggtcagtaccagtggacgtgggagaggcaatgttggaattaagaggatgttttgtgatttacaaaacactattcacatccattgtctcatttaagctttacgtgccctctgtcgggtacacttgtacgttgttagaatcactatttcccagttaaagttaagagcgactaagcaatttatgcagagtatacacctaggcagtggcaagtcagaaatttgaacccagatcttccaaattcaaatccacaacataaccaaagacaactgtggatagtggtttactattgctaactactaatttttttttttacacttagtgtcagacacagtaccggcacttttcatgagttctcttatttaatcctcatatcctctggcacgagccaggtttgaaggatggggaggtagcagggaggaaggacgggatgggcctcattccttgcagagtgcacagaacaagtaaaggaacaaaggcaggaacgagctgagatggttcagaccacgttcactgagagctggtggtgcttcacagccaccgtccttgggcctctggcctggtcaggtaagcctcctagaacctttcatcttagtaaaaatgggctgtgcccatggaaagtggcctctggctcagccctggaagcaacagctggaagaggcctgtggcctgtcactatccacacggttgcttctctgcaagacagaggcccgccacggtgagctggtctgtccaaccagctcctgagttgccagtcaaatgatgggctcggcctcagcgctcagctttgaagtttaatggggatcctggtagcccacaggtcttggccagatcttgccctttagtaagtgtcttcttccacttcccatcaggggcctggagcctggccaactccctgaggcatctctcccagcttatttggattgagggatggagggtgcctcctgccctggagagggaggtggagaatggaacccgtaccctgattgggaaacagaaacctcaggaggcaccaggcagcaggactggacaaagaagtgccggccagactggctccctggggtcccagaagtcacagacctacacaatgtctccctgggttagaggatgaacagaacactagcaactctcttaccagtgttctccagacttgtctgtcctgcccctaactccacctcctttgggcttgtgtgagaaaacgtgtcagagccaatttgacacctacatccatccactggacatgtaatcctgcgcaacttacttctctgtacttcagtttcctcatctgtaaaatgggaataatgattgtcttcagcttatagaatgatgtgaatattaaatgaattaacacagacaaagtgcttagaatagggcctggcacagagtaagcatgtattagatgttggctgctattattattattattacaagagttctgagattactcccttaggccccagtattttcctctggggtgttttttgtcactttctgtcacttaaaatggattgagattttagggcaaacactggagaagcttctcaattcctcctaatgggcctgctgagggtgccgtggctgactgtgggcaccggcttgctgctcctctcctggccgcctccagttccaggctgcttttgctgctctgcctcactggtctgttcggagtatccacagctgctagctggagaagcggtgttaatacctcattagcaccttcggctgctccttgtgggcactaatcacttcagtttgctgcctctggagtgactctgtgctgcctttgaaaagcaggccatgtgatggcgcagagacttctccagctggtcccaattccctccctcagattgttacttttacccaggaagtgaaacaacttactgtttacattttgtatacacacacacacacaaatataaaattttttaatagatcaaatccttactccttcatcaggacctgaaactaaacctgtaagcagcttcttccagagccttcctcttcttccccagtccacacctgcagacctgcccctcacccgtgccacccgcggtttgtacaggaatcagacaagaaggcaagggcccgaattggaagcagatgtttgggacgatgagtgaggttggggtggagacaataggaaggacgtagaccctgctagagctgcttgttgctctgacataccgccaaggctcagaaaaatagagtgactgttcctggttaaatacccagctgttactcgtgccaaactttcctgggcctcaatcctcagagtctctggctctgcttccaaagttctccatatcctcatgccaaccactatcttggccccttcttcccaccatgccaagcccccaagaccagccatacccctaaaagtcaggactggagttttactcaccccgccccacaaagctaacccacgatgccatttttttgaagcctaaactcaagatatggtctgacaaaagaggttttgctgattctgggtgtgagagtctactggaagacatggcttggacgccaagaccacagagttttcaaggtttagagggatgataggtcagaattgttaaaccagaccactgcggagtatgcagatgggtggctgttgactgcacccactttagaacatctccagagctgcacatgagcctgccaggagccaacagcacatttgtctaccctgactgtgacataaaatgctagatctataggagaacacccaagtttaattccattgttttgatttttcaaggagacacaagttggcatcatcatgaacaaggtttcagagaaatcccattggaaagagaggctaaataactggttttctaaaggcgatggcctgacccaacccctatccagagctgtgatcccagtcagaagcttaggacatcaactttaagatctgcccaatccccaggaggaatagatgtcagctgctgtatacgacagagagataaccagggactctagtttcctggtttaatattaagggaaattccactgaagctcagtgtttccacccatagtggtcacaaccaaccaatttcatgggtgttcataaaattgatttgccttttcacgcctctgagtttattggaaatggtattcctttgactttcctctgccacactgattataaccatagcacaaaccctttgattgctattagtgttggagatacctccctctccccatccactcaagattctaatttcattcactgagctgcaggctattggccagttccctattgccaaagtcaacacttccggtctgctttgtctgggagagcagattaaagggagagtgggccctaagattaccgagtcccctttcccaggctgtcccaggacctgcccaagtgatggcctatttatggcacaataatgcgcttgctccttgggtctcttggtttggaatctatctttacaagggttctttcttctctgaaaatcaacagggagagagtaacttccctctctgtaggaagctagactaatttcacttgtagcaacagcaactctataatatagaaagtctccaaatacataaagaaatgctccccaccaagtaaacaggagaaactattgaagggggggacagtggtgatgggtttgggtgcccaagcttcaggagaaggaaactctaaggaaaatagattgtttatatctgtctcccaagattgtaagcttctcagaggccaggatcacattctaccttgtgtgtccctagctccccgcacagtgcttgatacataggaaacgtctgctgaaatgcagagctgcacagaactcaagaaaaaaaaagggaggctacaaacccagggatggaacagaaatacctgactgggaggggaggaggttaggaaatgaaatgacaacttagagcaggattggacgtaggagaccaagcacaaaatgatgacacacacataatcttcctcttgcacaataacacaacattttgttttcaacataacataaaagccatcaaaggctctctagctggcttgcaaatactctgatatccctgactctgctaatgggcaaacagaggaatgtcttggcaactccctcaagtgggagttctgaggagagaggaaacattgttggtctgtagaagaagggaagattcagaaaaactcctttatgtgcaaatccataatgcaggtgaagtggggggttgcagaaagagcgacttcactcaagagagttacagaaaccccctcaccctggaaaagatactatgcttatggtttcaacagaatagtttcatagtatcttcacagtcttgtttagggtgtgtgttgtctccctttaactctggcattcttgaaaatgtttgcttcctcagtgagatatccaccaggaatttggcctttgccaaatggtgctatttcatatgagcagagtttagagacaaaagatttattccaataagtctttttctgcagacttaattaccagagataaacatcagggtattatgtaacatatctgacctcattatttcatttgatacctattgagtttccaccaaagcaaggatactaaaatttcagggcctttttcctcagttatatcctcaagggtgtcttgtattctttatatagaattcacttaaacttggaagtcactttgctcattagttggtagtctaaggaactttctacatgcaaaagattctaaagccattactaatagctgtatctcttaaaatctctctaccctgcatgagtagggccttttcccataaatcccaaatccccaagtgactgataggtaagccaaggtataaagtgttaatctgtcacacacagcatcaccaagtgaacaaggcagagtcagcgagcacagtggcccagtgcctgggctgtttcttagtctaaactaatctgctagagacaaaccagaaatgtggagtttgggcttcgacacgaaacagacccatgttcaaatacagctctaccacttgccagctaagaaaccttggcagttacttatcctctgtgtgcctcaactgtgttttgtgtaaaatggagaaaacaagacataccttgcagggttgttgtgaatgagacaataaatactaaagctcctagcatatgggaagagctaaaaaaaaaaaaaaaaaatggtagctattatcatgattcagtaatcaggtgaattaaaggaagtcaaggttcctaccacatgacataggattgagatacagctccctcaaatacctcttccgtccttacaggatcatgcaaaggaggaagtctcttctgacttggtgtcttcttcatgaatgtttgggccaggtgtcttgagtactcattctctctggcctgcctggacacggcaaggtgaaaaacagagtcaccaccccctgggaatttccacaccagtcatcgactctagcattctcaactgcccccagacccatacagcctcctgctacagaaactaccagggccctaagtcacagtcagcatggtaacacacatactatatataggaaaacttttttcccaagaactcttaagttattagtcgattttcttaattggttaatagcatcattttgcaggtcaggaaactgatactgaaagaaggttgtcttgcccaaagttgaaccacgggagttaaaaataaaaatatgaacatttggctgggccccatggctcatgcttgtgatcccagcactttgggaggccgaggcaggcggaatacctgaggtcaggagttcaagaccagtctggccaacatggtgaaaccccgtctctactaaaaacacaaaaattagccagacatggtggcacacacctgttattcgggaggctgaggcaggagaatagcttgaacctgggaggtgaaggttacggtgagctctgagatcatcccactgcactcgagcctgggtgaccaagtgagactctgtctcaaaaaaaacaaacaacaaaacaaaaaaacaaaaaaaattcaagcccatcaattcatggttttctatcctttgagggtcccattttgcaaacttgatgcaaacgtgtccaacggtaccttcttcgagaaaacacccagtgacacgagatgcctatcctgcaaggagtgctggaggcccagggcccctagagtcagaaacataggatacaagtaaattcctgtcaacaggatggaccatctggtagaggacataatgaggtttataaagaagcctcctctcctacctccaagactgacttcttcctagagtcatacctaaaagatgaactcctaaaacctcacttggaaatttgcctggtttgccaggtgaacctggtctcaggcattcacagccatcacagactacaaaagccatggtggcctgcttattattgggtattccagggaaatagcaacacaggcctcatctggataaactatccatcatctccctgaagggaggctacaaggggaactagatggggagtcccactctgttcttgcaaggtgactggatgctatgattctgtgctggtgtgtctgatccctatccctagaggtaccaacattgccactatcccatggttaagaagctgctgctggctagtattgacaagtcagggctatatcgacagcctgaacaactgtgctaaagccacctctgataccatattgaaaaacctacaggtatcattccttgacttctggaaagagactgtgttctccacatctccttccaggaattaactgcccatcttatagagaccacacctgaattcactccagagaaccaggtccctgctgtggctatcataaaatgtccttaaatgagcaaaattaaagcaaactaaatccgggaggggaaaaaagggatatttataacaaggtatatctgaactctaggcagcaccactctattggatacaaaccaaggtcaacatgacctgcagatctctaaatccaccctcctgtactccaaataaaagctaaaaaacaaaaacaaaaaaaactaagctcaccaataactttgggatagctgttaggtggtgtgcagactcagtattctgagttagaaatactagcctattccacaatttttgagacattttagtgctgagtcatttttaatactactacacatacatgatactcaagaatttcctgctgaccagcctacaaaaactgcttagggtttagggtataaaaacaaaggagatccaatttggagtatctggaggaaaaatctttacagaaataagatactttatagtcttagaataattaatcagattcagcatcaggaatccagactagattctcacagggcaattatggcctcagaagacttttcaaaccaattatgaggtctagaaattactatggagaaactgaccttggttagcttcttatcatgacacacgtgggctctttttgcccctctccactttttttttttttttttttttgagacacagtcttgctctgtcgtccaagctagagtgcagtggcgcgatctcggctcactgaaagctccacctcctgggttcacgccattctcctgcctcagcctcccgagtagctgggactacagatgcccgccaccacgcccatttaattttttgtatttttagtacagatggggtttcaccgtgttacccaggatggtcttgatctcctgacctcatcatccgcccgcctcggcctcccaaagtgctgggattacaggcgtgagccaccgcacccagccgcccctccccactattaacgtgaggacaggctgtttgaaaaggggcctggtgaaataatgatcataagtcaggacagtagttacctttagtgggatgggacgagagtgtgctctgcagtgctgcaatgttttatttcttgacctggatggtggctatttgtgcatttcctattactcataagttacacatgttaataccttttttatacatactgtgtctcaaaataaaagaaaaaaggaattttagtatcctgtaatacttttactattccacattatctggaactggtttattatgcttgaaggtctatgtgaagccagagtagagggaaggagcccttagggttcaagccacttgctggagaacctcgctgtggtcctgacagcgaaaactggggctggagagaggtttcaaagctctatctacaatagctcagaggcaatagtatacaagaagctgaagctagtatttatggagtcataagaatgacttgataggctaaaatcactcattggatcaatgttcatagtgacctattcaaagccacaacagcaagtgtataagatacaaataaccttaaaatgtacagttagaaggacagaattttaagaccttttttgtttttaagagacagtgtcttagccaggcacggtggctcatgctaatcccagcacttttagaggtgggtggatcacttgagcccaggagttcaagatcagcctgggaaacatgccaaaaccccaccttttcaaaaaaaaagagaaagagagacagtgtctcgctctgtcacccaggctagagcacagtgacacaggcatagctcactgcagcctcgaactcctgggttcaagtgaccctcctgccttgcagtgttccaaagtactgggattatacatatgagtcactgtgcctggccctttaagatatctcatatcactcaggagcttgatgaggtaagaggagaatgcactgtttggggtgggggcaaggatctgttttgttttgtttttaaattcaaaagggaatttttttaacattttccagattgggaaccaatatacaagacatcataattactttcccaagaaagtcagggtccttaatactactccttctaggcccaaatcagaggtctgttttttttcttctcttccaagcttacctttgtaagctgaaaagaatcggtaagacttgccgccaacaaacttcttaggagcagtatttttgtttgccactcccaaaccccttgtgggtgagggagatgttgggagacaaatgtgtgcttaaatatgaaaatcaaaaggctatttatcaaagtgttaacggtgattacctctggatagcaacttacctatttcccttgttctttttcttatttccaaattttctatattgaatttctaggtagtaaaacaacaatgaattattgtttaaagactgattaaccggttccttcttcagaaactgagcataaacacttgtcctcgtctccccatggctgagacagtggccctgcctggcaccatggacagcaatcagggaagggtgaaagggcaagagtgggacaggccaggactccaggtgtacactctaccccgagccgaccacttcaggaggaattcctggggaaatgcaaaatcatttccaaatcttttccttccccaccttccagtcaagccatgaatctccatttaaagcagccactcactccttagttcttttaaacatttatttatctactgtacaaaatatttacatcatcagctgcaactgcctggccctttcacctggcctgacgaatctgcagcagggcttggtctctgccaattttccagaaacatgctgacactctcctaggtattcactcatgtctggtctccttcaaagacgctaaaaggccagaagggtagctggccccccaagtacctgggtcacaaggacataaataaaagaactggccaaaataagaaacactaatagaaaattgcccaagaaataacactctctcatctctttgacatattgtaccttttccccacactggctagtatgaaagcaggattagaaaaaaaaaaaacaaaacagtaaaagaaaaggcccaagagagcaaagatacttttgaatagagttcagacagagaatagaaaaccacaatagtgccaaagggttttgtttaacaaagactggtgcctaaggaccaccacagggatgcagcttccctggttgggttgcaatggtgcctaagatgctctgaaaaagtgctatgactagagcttaaaatgacaggtctagccaagacaatcaactcaatctccaggatcagtctctggaaggctgccggaggggagaattcagaaaagcgactgccaaaaacagcagaaccagtccacgtgcccccagctggaaacccctttctgggcccaaggggcagcattatgtttcccagggtggtgataaaccttccggtacatatcccatgggaaaacatttgggcaagcagcagcaccttgtcctggtccctgaggagagcagtgaccatgtggcatggaggatcctggggtatagagaccctgatgctggatcccggaccccaaggatgagtgaggtcagcacccatgtgccaagaaaggacaaatgatgactgcgaaagactgaggtcaggcaggaactgtagcagctcaggagggcttgttcctcatgatccctgcgaacaggagggctcagacatgcttccaggaggccaaggcattgccaaagtcctgccttgtttcaggactctgtgtacttgctggttttggcaataaagatggcttgtaatattctcagagttgactgccccattgggaatggtagcttgcagcaaagccttcttaaaaacacaaatttgggaagtcaatgagattttgaatcttgaaattattttcaatcaaacagtaatgaaaaaggatgttgtcatcttccaagatacagcagcaggtactcttcaatcatcattcaacagtgaacctaataagcttcctccctccttagttctccttcctgataactgatggagcaaaggggagtacaggggttggcaggtgtttactgtgtaacatatcacctccatgttcatccctagtgtcctgacgccaaggacctgtgataagcacgtaaactcctagtccctgttcctttgtcttagtgctgccagagaacaccaagcagagagagaatcagggattgctggcatactattcttactgttctaatcttttgctacaaaattttcttcagtagaatgctaaaggatccccagcttttagcagactacataatggggaagtcagtggcccaagccggccatacttcagtgccaataacaaactcagggaaaagcatcagtagtctccaagccagccatatgcctaggcatgccccactctggaggctacagctcagctatccttcatattcttcagtctatctgcttttctcactggctacaattcaagaaaaagcttacagagttcttctttgtggattaataatcatttccagaaatgcccgaagggaaagtgctttttccagttctgacaccacaaaaaaatattctttttagcagtccttagaggcagtccagtgccatggcctatgcctaccattgtgcagcgggactgctcctatgggccacctcctatctgtccccctctctcctggctcctgatgagaagaggcaatcaccccacccatgagaaggactcaagtaccagtctggtcaagtagtgagggccaaagagggtgtctccaaggagtatcagcagagggagttttggagcacagtgtggatttaagggtctccacaccagtttcccaacagggctgagccccgtgtgccatctccctcagctactgagatcttcaaaggaccaaataaatgatagcagcatggtcctcttctcatgacagaatgaagagctcagcttacataccatgccaaagtggcctgtggtagatatgggcagggagcaggtgaggtaaagacaaggcttgtaggtgacaaaatcctccagacacaggggagcatgcggcatcttctggctgatggttatgtgtgttaggatcagtggttatgatgtctgtaacttgcgcccagaagctccagagagcatgggagccaactggatgacaggagagtggtcagagcatgccaaagccctcgcaaccctcgctgatggccagctgcagcatcctgtgcacctcttcataggagtcatatgtagggaggcacagctggttaaaactggaagggcaagggagaagtgattaactcataccaccaaaaacactgggcatgcatcaggcgggcagatacctaccatgtgtgtgcagtaggcagcgtgctatgggtcggagcggcaataatctgaaatgagggacagagggcggcaaagcctccaggtggtagctgagaggagcctgttgtgaactgaagtagccgagccaactcctcctgggtcagactggaaaccacagtccaaaaccacctcatgacctggcagggagagcacaaggctgggatcacacacagtaaacaagctaggattagatccctggggaaggaacaagatacactaaagtggggctgtgccccagttaccgttctatgaggacacagggtaggaacagtttgacaagcacttcaagaatttacactgtcacatgattaggagggtagtcactgactgttggttctctttcttcgccatctccaatttactactcctgtggcagtcagcatgacagcccttagggatcagggctcccttctgcctggacaaccacctatctttccccatgcatcatttttttttcccagaaaacatatcaactgctttgactcccctacttttttcttcttttcctttctttttttttttttttttttttttgagaaagagtctcgctctgtcacccaggctgcagtgcagtggcgtgatctcagctcactccacctcctgggttcaagcgattctcctgcctcagcctctcgagtagctgggactacaggcatgtgccaccacacccagctaatttttttttttttttttttgtattgttagtagagtcgggctttcaccatgtggccaggctggtctcaaaactcctgactttgtgatccgcctgcctcagcctcccaaagtgctgggattacaggcatgagccactgcgcccggcctcctctacttttttcttctgaaactttttccttataacatggcacaaatccaactgaaagaagtttggtccatttaccttttctctgaaatgccatgagccaccaacaactactgcatgggctttgaagtcagacacactgatgtctccagtcccacacatcagcagctggaaaaagatggtaaggtgttactatgacagtcagagagacaaagacccaatataaggtcaaaattacctaagttaacaggcaaaatgtagaagaaaacattaccaggaaaaagacagaaggtgaggtcataatgccagaatactgctttaggaaaatcaattacatacaacagggcaatagttgctaaccagtgggtaaaaaaaagattcacatggcttttaaaatatatatttatacaagtgttggtggccctacctgggacctctaaatctgaatctctcggaacaggttatgagcttatacaggaagaaaaaaaattgctcaggtatttctttcttttctttttttttttttttttgagacggagtctcactgtctcggctcactgcaacctccacctctccaccttgcatgctcaagtgattctcctgcctcggcctcctgagtagctgggattacaggcgaggtatttctgatgaacaccctaagaactgctactatggattatttttaaatgaaacaaaggacaaaacacacacacacaaactgtttcctgacagtctgctctaaacttagcctgggaatatcaaggagaaaaggcaagctgtttccccaaaatccccaggcccatttatgaatttgtcaatgacctttcctttttcttaggatgcattcttttgtggattgaacttttactaccttcccttcagcttctgcctctacttgatcagatacatttaaaagtatgccaaaaaatgagaacattaatgacatcagagccttaaacatcttgttaatgtcctaatttggttcaggatccagcatgttacttagcagactgcaagtactcatccaatagctataaagaataatacattctaaccagagacaagaagagcccaaactgagcctgagaagccttggctccttcaaaaagaacttgctaagctgaccaggaactaagagcaggatgtggaacaactgtaagagaccatgtccttcctttctacttacttctacaaattgttacaaatgctttgcttcaaaatgtaacaaaatttaccagtagttattcctcagcccaaaaaataacagtgctaggtaacaggtttatcagaaactttaggctgagctgtggagagttcattttgtttggatttcacatctgaagatataaaacatgaaaattacagaagattttgattcttgttctcaaatctacttcagttaatagaaataagaattgggcaagaccacctaaaattactttttcccccattttaaaagaaaaccttcctccctaaagaaacgtttgcagaaagacactcctcatagaaactacgggaatttataactagtaacttgcactgcaccattttgtactgatgtctcatctgtgagcaacaggccacaacaaattgatgttattctttgcccacacctgatacggacttcagttctgcatagaatggtatttaccatcttagagccattttttagttgttacaggatctgaaataagaatgaatttactatataaataaaaatatatactatatactgttttggtctaatgcttttgaaatatgatctcatcttttggtttgtttccttcacttcattagaatgtagcccatgagggctggaactttgtcttattcgttactctctctgcagtgcctcaggaggcactcaatatatacctgaaaaaataaattctattactcccttaaatgtcataggattttatagacggtacatgatattaacattctttactactcattgatttttttttttttttttttgagacagagtcttactctgttgcccaggctggaatgcagtggtgcgatctcggatcactgcaacttccgcctccggggttcaagtaattctcatgcctcagcttcccaagtagctgggattacaagcgtgcatcaccacacccagctaatttttgtattttcagtagagacggggtttcaccatgttggccaggctggtctcgaactcctgacctcaggtgatccacccacctcaacttcccaaagtgctgggattacagaagtgagccaccatgcccggcctcagtgatacttgatgaataaatgagtattaattattactcttcataaataatgagctacttgctactttcatttatttatcccttaagctaatatctctgcactctttgctactaattttcacattctaattttttaaaggctgaagggtcaatgaatggaggagcgacaaaagtgaaaccacctcttgcataaatggctttccagctgcatctcataagagaaggtacaccaagctggttcctgtaagctacaaaaatgccaagttaagaatgggagtctgaattgcaatcacttacctcaagctcattctcatcaaaaatagccaaaaggttctcagggaccaattcattcaggcctgaaacaaagtaggcaagttaaagtcatacccacaccatggatacaggtattttaacttcaaggccaagaacagacaggatcccaccttttaggaaatgttccacctcctctttcacttgactggccagccgatattgggccagcaaatttaaatagaagattttattcgcattggtgactggagtttgagctccacctgtcatgagttctacaacctgtaacaggcagcaaaagacagacaagggagaggctgtggatggaaatttatgagatgacatctgcctggatgttttatagacacagattactgacctccatcactgtcagtcacaagtttctgctgtgcattcagcttttcaacacacttggtttaatttagttcctaagcttcagggttcctaccactattgctgtatactagctattatttctgaaatgggtgcctgggtaaggtcttctctgactcagtcaagtagtagtgatgcaataggaagatactatggctcctcgctagcaatgttttaatctatgatccaaaatgaaaccactattgacctcttctctaagcaactaagagtaaaatcagataagcagtaaggaagtctttttatgtctcagaaattccaagatgggaacaattgttcccacacattcttttatctctaatgtgagtcaacagaacaagccacagtttgatacttgaagatcctggattctaatctcagccctgatgctagcttgctacagacctttggttaattgcccctccagaccttaggggaaattatttggcctgaactttcctctctgcaaagaaaaaggtgaacaaactgtatgactctcaaacagaattggtatcccccaataaactcctaagggaactttgaaggagccctgaagcacagcttaaaaccatcatccaggaatatttgtgtagagtgaccaaggttgtctccacaggtgaatgaagttacaagatcagattttaagacaacagcatggtagcaatagcatgctactccacagcagggattctcaatggatctaaaaatgtaaaacattttttctgttggtatgcacaatcctggattttttttttaatgtaagcatttctatctaggagactgagaaataaattattaagatttagtattcatattaaacacaattaaaatgagcactaccctgggtctgaggaccctaattcagtgtcctattgactctagctgccttaccatgccagctcaggaagttgggtctaatcccatgtgtacaaaggcagacagctgggaatcccataatttccagaaaggatatctgattatcagtatagtggtaccaatggtcacaatttttcaatcattcctattctgcttttaactttaaatttactgcaactttagcgtcatcattatcatttgatgctgtttaacaccacaatgtaaatagaagcacatgcatcggaaatatctctgggccatcattttctaataaaaagttttggttttattattttgagatagggttttgctgtgtcacccaggctggagtgcagtggtgcaatcacagcttactgcagccttaacctcctgggctcaagcgatgttccagcttcagcgcccacttcctcccacactaccccagtagctaggaccacaggcacacgccaccatacccagctagatttttaaaatctaaaagacagggtcttgccaaagttgcccaggctggtcttgaactcctggtctcaagccatcctcctgcctcagcctcccaaagtgttgcaattacaggccatgagccactgcgcccagccaaaaagtttaaaaatacccaggcattgtgttaaaataggaatcacctacatcactactgcaaatgttgacacagacactgccatctcttccaaatctgcttgtacagtgacacttcaccatcattcagttatttttcaactggaagcaggactcggtgggatagatggagatatgtgtcttttgcttcactcaaatgggctgagatcataaagcataggatgcaatgtcctaaagctgtgctgtccaatacagcagctgctagccaagtgtagttatgtaagtatacattaactaaaatgagaagttcacttattatgtcacccacattttgggtgtttaatagacaacacaaatatggaacatttccaccactgcagaaagttctcttagacagtcctgctctacaggaaactggagaacataggacccagaggctttgtcctctttctcaccttatccaattgacctgatttattatatttctcttctgcaaagaccagctccatctcactcatgtcattgttgaggataaaacaaactttagatttgtagaattctgggtcatctgtttcaaagtactgaggaggcagaaagacacagaacagaacatgaatactcttgccctgaaaggtgtaactgcttagaaccacttatcccttcaaccttaaaaattatttacaagcccaggaggagagatttcagggttaatggccaggggccttagtaggaaatgcacacccaagatgttaccttgtaatgcatacgcagtcctatgatttgggccaggaaagagcgggtgaagcgagctcggaccaactgcttgtaggctcctcctagagaggactcatagagacacttgcccacgagccgtcccgcaaactcatacattttcaggcgcagatgagcggggcgattagggttgggatgcacctgtccaagaaagagactgaaaggccctgggccatttttcttcaagcccagttctggaaggacccttccttccccaaccccatgccaaaggaacaagatgtcactgtgaggatcagagcccatccaaatgttagttttttggtagccaccactgagtaattcaaagtgactagaagataaagggcaaaggtggacataattaagaatcttatattaagtttgtggttaatcagcagatgatgtgatgccttttccctaaaccagaacttctttcagccaaagtgtacttctctactcctgacacctttgtctagacaaagatctagtacaggaatcatttgcttcaggtatgttttgagaaagaggcttaattattataataattagtagagtagacattatactataatgtttttagtcaaatattcagctgcctgcatttttgcttattttacagatgaaataataaaggcaaagaggagaaagacaatctgattagcttatattttaagcagtaaaattaagaataggacacaggttgtcaggttcccagatcagtttcataattttgaatccttgttagtctacccatgataacataatccacattttccacccacccgtcaccaactcactaatgcttggttgttgtcactgaaccgggtgaagagctgattggtggtatcaaatagtgctttgcagattagctcaaaccattcccggcgaggccctccccagtccagagctgaaaagcataatgaaaataaaaaatgactctgccctccctcctcttaccacttttgtttattgagtcatcattttatactctccacattccctctattgtactactctggtgtttctccgttgcgactcatctaaactgtggtcctttagaaatcccacccctttttgtaggattaatggtattctgatcactaaggaaaagccccctagtatggaaacaccagaggtcggagatcccaggaaatggacatttctctcaaggtaaccacggttcaaacacttagaactctctctccaagtccctgtatgtctgtgtaccacaagctcctcaatgccatcctggccagtaaatactaccctttttttcttgactcatggttcccttttccttggggaaaaaaaaacctaggtttttttttttagggagtgagtaggaggtaagagttgcttttttttttttttttttttttttgtggagaaggtgcgagtggggaggagagttcaaaaagatgaatataaaatttcaaaactgaccttcttcatcctggaaaacaacctcaaagttcttgctccaatctgagatggagaaattccgagtggctttcagagactgaaaagaagtgaaaggaagggaattgtcagaacactggctggtgtcctctggatgttaaagacaacacaagagcactgccattgtctgctggactaactacgactgcctgaaggagatatgttactcataaacaagctttaatgataccacctgacatttaaaatgcacataacttcaaatttaaagttttaaaaaataatctgatttgcctttacatcatcactttgttggaaagctgaagttgtttttttcttttccttttgttttaaacaatccttgttttagcaatgaaaacattcttgcataaagaagtaaaaaatgactcaagtcagtaagctgtaggcaaaagaaccaaggaatcctggttttcagcaaagtatgatctatccactagacatatttatccacaaggctaggttcagacagcgagccatgccacacggagaatatggctgagaaaacgggtttccagtcacacctaccagagccaaacatcacaaacactttctggacaggaaccaagccttctcattcctggggaatgtaagaactatgccagtgtctgtgcagtggagacagacacacatcaggtgttccttttccatcagaccaaagtgacaacaaaaatcatttccttttaattcaacaagcgctctattccagggattcaataacaagaagtttcttctgtaatcactatttacacctgccctacatgggagttccaagggacccattcagtagatttgaaggccagtaagtaaactgctcttccctcgataacatacctccaacaaaactgccccaaatttagtagaatcaaatagaagaacagacatatgtaaagagagaaatttaggtttcagaaatttagtatatctgtcttttataagtatatctgtcttttataagtatatctatatctttacttaaacagagaaatttaagtttcatgaaaaagataaccagatcaggcatggtagctcatgcctgtaatcccaacactttgggaggctgaggcgggtgtatcacttgagtccaggagttcgagaccagccggagcaatatggcaaaatcccatctttacaaaaaatacaaaaattagccaggcatggtgacacatacctatagtcccagctatttgggaggctgagttgggaggatcacagcccgggaagatcgaggctgcagtgagccatgatcgcacctctgcaccccagcctgggcaatagagtgagaccctatctcccaaacaaaaacaaaaacaaaaacagtaacctgcagaatatagacattcaattggaaaactttggtatctgctgacagagatgaaattttacctaccgattccaacaaggcatgtctgctgaccttcagggtgactttggaatgtggtcttttcatatgtacctgccgaagctctcgctggaaaaagttcaccttgtcctgaaaggtctcagagcctcctggggaacagcaagatccatcattacagcctcattacaagccatctgtgtagtcctgcctctccaccctcatggatgtggctgggctcactaccttccctatagaatccctgtgtaacctcacctatgttcttatgcagggagcggataaaagtggctgctagaatgttcctctccttacagctgagctccacaggaggttgaatgccatcatccaccaccagtgtgagcagcttatggacagggtcaggaccaaggtatgaaaactggtaaagaaaaacaaagaaattaatctataaaaccctcaaggccagtaaaagtcctccacagctctatcctgtgtaccaaccaacaacaataagttaggcttgttttctccaaatgaggacctaccagaaatacatttcattatttttcccttcagtgatttacatttcaacatttaaaattattttagtcacagagactgcctttagttaggaccaccagcaaaactacagaccttctaacataaaatataagaagggtgatatgttaaatagcaataaatggcaatacggtgatatattaaatagcaatagtaaggatatattaaacagcaataaatgactactccaaactgatcagaagaaaactatttttataaaatggcacattctagcctttgggcaaaagtttagattccagaagcccagaaaagttaacaacaaacaaacaatgtattttaatatatgagagtggtgcttctaaaaggagttagcttcagcacactgggagaccaagcttgggccagagttacaaacatcttctctattaacttagtcttgaaggcaaaggatcactgttgaagtattctgagttgctgctaattcctgtttctgtaggcatgcgtccttccagaatttatatattcttcatgccatttagtgaggagataatgatgctttatttggcaacgaatcctgtgtacactgtgagatcttgcagaaacactaaaagtgcttctgagaaaaaataaaaggctgagatagtccagagatgaagcatgcttgatgtgaaccagatgtaaggttcagcttacttttgttcctggacacactcggaaggtgtaaaggcgccaggggatgatcttcaggtagaactccttcactgagaattgctggaggaccaacagacaggaaatgaagtgaatgataaataaaaaggctctatttgggtattctaattcaaatatcatagtccctatttacatttctcataacctttcctctccatggacaaaagtaataatttagtgagtactaaagtcaaataaatacattaactctctatttaaaaaggcaaattaaaaatattaccctgatggccaagtgtggatggctcacatctataatctcagcactttgggaggccgaggcaggcagatcacttgaggccaggagttcaagaccagcctggccaacatggcaaaactcagtctctactaaaaatacaaaaaaattagctgggtgcggtagctcatgcctgtaatcccaagtactcgggaggctgaggcacaagaatcgcttgaacccgggaggcagagggtgcagtgagctgagattggaccatggcactccagcatgggtgacaaagtgagaccctgtctcaaaaaataaaataaataaaaaaaatatgactgacaatgcagtttcacacagagatatttcataattgtaatactcaagtctttctaaatatctgggatcaggttttcactttatgagaacagaatatttcacctagaaacaatcaaaatctccttctgctcagccccatgatgctcagaatgacttcctccaagttactggatagcaaacaccagcaacccatacacactgctttatacctatttgaatggtgccaaggatctgccagggaagggaggcaagatggggtgagctggagtggaatatgttggtggtataggggaaggtcctcacacaaaaaagttcatacaaaagaggaaaagacaatgcaaaaattttttaatcttaaaaaatcccttttatctgaatgtgcaggtcagttgttttcttgataaaaaaaagtttaaagaaaatttcaaacacatactaaagaagacaaagaagtataatgaaactatcagctgcttcaacaattatcaattcatagccaatcttgtttcatttattcacttacccatttccctcattaccatcacccctagtccaaattaaggctagatttttaaatgaagaatggtacacagcaaagtgttctgaagtagaacagaattagaactcagttttggttatgagattaaagagatgcaatgggatgtttcacagagtctcatttttatgaggactgaatgaataaggaaaaacaaatattaaaaagaaactaacacaaagtgcttcttagctcaggggcttgggaaattcaccttctttcctctgccaaaatttctttactccaatcctgtagcctaatagtgacatccatttactgtggtttcatgaatcacagaacaaaagatcaaattgttttgacacagcacaagaagccaacagtaatttttatgctagcaagaaatttttaacagttgaaagtggctttctatacaactagttaacaatcttgccctgattctcagactgttactttgtggtttctgctaccaaataccaattacacacaggttcaagcagggggattttatgtcgagaatggaaggtccaacctttggtgacacatagcagtacaccttcttcggtttcttcaccttctcaggggtgtggcactcagagggcgagtcttcatcttcctcgtcaacagcagtggatggccggcgctgggaagaggtcatgtgcatgggtggcaggtgccatggagtgctgctacagttggtagcattataaagataagcctcaaagtaaatgctcacgcctgaagtggacacattgcgttcgacgatattcttctcatcctctgaagtataataaggaataaggtttaaagtagaagtcagagaagaaaaaaattacctatcacaggcttttagtccacaggacaagccaaatgtggcccaaatatcaaatgtttgtgaggtcagacaaaagagtgcaaacaggcaaagaaacggctgaagaacagcactaaatcatacttttcttttaacttaccacttaggacaataatgtcaaattcaccattattgattggctgattttggtatgaaatgcaagcatggaagcagcctcgagaatgcagggtgagtcgcaagaacacctggaaagtctgcctgttggatgttactgatttctcaaatgagacaccagtactctcttcttcttgagggccgagctataggaaggcaacagagcatcacttaacatatagtattttcccatttacaagccactttactccttacaaagagctttcctatctatgatctaatctaaatcacaaaattactaatgagacaggtattgtcagatgaagatacagacagcacagaagtcaaggagaaggaaagagagatcgaagtgaattaggtgtgagaataacagagaaaggagccagctctctctagcacacagataaagaagggagactgcttacctcatgaatggacaaggtgtaattgtgctcatctctcaaggacatggaattgttggtgggattatcatactcatctcggggtactatttgaagggtgtgcggctgcccacaggtcaatacaagagtagaaaagtggcacacaattttggtcttagaaggaaccaccattcctggaacaaagacaatggaatctaacatttatttattttatttttttatttttattttttttgagatggagtctcgctctttcgcccaggctggagtgcagtggcgcaatctcggctcactgcaagctctgccttccgggctcatgccattctcctgcctcagcctcccgagtagctgggactataggtgcccgccaccatgcccagagaatttttttttgtatttttagtggagacggggtttcactgtgttagccaggatagtctcgatctcctgacctcctgatccgcccgccttggcctcccaaagtgctgggattacaggcgtgagccaccacgcccggctggaatctaacatttaaaggtgctcttcagggcacaaagatctgctcagtgggtcctagaaagctaggtttcctcccaattcctagggataaataacactatcaagaggaagagaggccaggtgcggtggctcacacgtgtaatcccagcactttgggaggccaaggccagagaatcccttaaggatcccttaagaagttcaagaccagcttgagcaacatagcaagaccatctctacaaaaaataaaaattagccaggcatggtggttcatgcctgtgtcccagctactcaggaagctaaggcaagaggatcacttttgcccaggaggtaaaggctacagtgagctatgaccacaccattgcattctagcctgtgtgacaaagggagaccctgtctctctccttttttttttttttttttttttttgagacagagtcacgctctgtcacccaagctggaatgcagtggcacgatctcggctcactgcaacctctgcctgtcgggttcaagcgattctcctgcctcagctgagtagctgggactacaggcacccgccactacacccagctaatttttgtatttttagtagagacagcgtttcaccatattggccaggctggtctcaaactccccaccttgtaatttgcccgcctcggcctcccaaagtgctggaattacaggcgtaagccacggtgcccagctaaccctgtctctttattaaaaaaaaaaaaaagaggaaaaaacagaaatagagaaatttaaatgaatttggggaattatttttgttacaaattcttaaccactgcaaaccctaagtaaaatgaaaaaaacttggaagaaataaaacaaaaaaaccaacaaacaactaaacaaatggagacatgtttatggaagatccaacatagtacagatgtcaattttccccaaattgatatataggtttaacacaattcttatcaaagttccagcaagattatttatagatttagttaagattattctaaaatttaaatggaaaggcaaaggaactagaatactaaaacaattttgaaaaagaagaataaagtggagtcagcttaccaatttcaagacttattataagagctacagtaatcaggctgtgtgacttggctcacgcctgtaatcccaacactttggaaggccaaagcaggaagattacttgagtccaggagttcgagaccaccctgggcaacatagtgagaccctattcctacaaaaaagataaaaaattagctaagcacggtggtgcacgcctgtagtcccagctactcgggaggttgaggcaggaggatcacttgaacccaggaggccaaggctgcagtgaatcatgatcgcaccactgcactcagcctgggtgacagagtgagaccctgcctcaaaaaaaaaaaagaaaagaagagggagctacagaaatcaagattctgtggtactggaggagggataggtacacagattaatgaaataagcccccacaaatatgtccaactgctttttgataaaggtacaaaagcaatgtaatagaaaatgaaagatcacctttccaacaaatgatgctggagtaaagacatgtataagcaaaaaaaaaaaaaaaaaaaagaggaccttgacccaaatctattaaaattaactaaaaatggatcatgaccctaaatacacattttcaaactgtaaaaacttttgggaaaaaaagagaacatcttcaggatctgagaccaaagatttcttagacaccaacagtttgaccataaaagaaaaaaatggatgcactggatttctttctttcttttttgagacagggtctcactttgtcacccaggctggagtgtagtggcaagatcacagctcactgcagcctcaacctcctgggcttgttatcctaccacctcacttctccaccctactccccagtagctgggactaaaggtgcacgccaccacacccagctaatttataaattttttgtagagatgaggtctcactatgttgcccaggccggtcttgaactcctgggctcaagtgattctcccacctcagaaagtggatttcatcaaaattgaaaacatgtgctctgtgaataactctgttaagggaataagaagaaaagctcagcctgagcaacatggcaaagccccatctctacaaaaaatataaaaattagccaggtgtggtggcacatgccacagtcccagcaacttgggaggctgagatgggagatcacctaagccgggagaggtcaaggctgcagtgagccatgactatgctactgcacgccatcatgggtgacagagtgataccctgtctccaaaaagaaataaagaaaagctacagatggggagaaaatatttgcagaccatatgtttaacaaaggactagcatatagaatatatacagaactctcaaaagtcaacagtaaaaagccaaaatgggccgggcacggtggttcatgcctgtaatcctagcactttgggaggccaaggtggatggatcacccgaggtcaggagtttgagaccagcctgtctaacagggcaaaaccccatctctactaaaaacacaaaaaactagccaggcatgatagcagatgcctgtaatcccagctacttgggaggctgaggcaggagaattgcttgaacatgggaggcggaggtcgcagtgagctgagattgtgccattgcactctagcttgggcgtcagaacgagactccatctcaaaaaaaagaaaataataataaataaataaataaataataataatcccattagataatgggcaaaagggccaggtgtggtggctcacgcctgtaatcccagcactttttggggccaagggggtggatcacttgagctcaggatttcgagacctgcctggccaacatggcaaaactctgtctctacaaaatatacaaaaattagccaggcgtggtggtgcctgcctgtaatcccagctactcaggaggctgacacaggagaattgccagaacctgggaagaggaggttggttgcagtgagtcaaggtagcaccactgtacaccagcctgggcaagagcaaggatgtctaaaaaaaaaagaaaaaaagaaagaaagaaaagaaaagaaaagagaaaagaaaagaaaagaaaatggacaaaagacacgaagagacatttcaccaaaggatacatagatgacagacaggcacatgaaaagatgttcaatagcattaactatttaagaaatgcaaattaaaagcacaatgagataccactacacacttatcacaatggctaaaataaaaaataatgacagcattaaatgttagcaaggatgtgaagaaactggattattcatacattgctggtgggaatgtaaaatgctacagccactctggaaaagaatttggcaatttaaaagaaactaagcatacaactccaatacatctcagcaactgcatactagagaaatgaaaatttatgttcacataaaaacctgtaagtgaatatttatagcagctttattcatcatagcccccaaatggaaacaacccagatgacctttaacagatgaatagttaaacaaactggtacattcagaccacagaatatacgtagagaatccctaatccaaaaaccagaaatccaaaatgctccaaaatccaaaacattttgggtacctacatgatactcaaaggaaatgctcactgaagcatttagggtttcagatttttggcctagggtgctgaagtggtaagtaagtatattgccaatattccaaaacccccaaaaatccaaaatccaagacacttctaggcagacatagtggctcatgcctgtaatcccagcaccttgggaggccaaggcaggaggattgcttgaggccaggagttagaaaccagcttggttaacataatgagactgtctctacaaaacaaaaaatcaaaaaattaaccgagcgtggtggtgcacacttgtagtcccagctacttgggaggctgaggtggaaggattgcttgggcccaacaggtcaaggctacagtgagccatgatcctgccactgcattccagcctaggtgacagagcaaggccctgtctcaaaaacaacaaaacattcctataccacgtttggagagaaaaaaaccacaaaaccacacatctggtcccaagcattttggatgaagaatactcaacctgtactactcagcagtaaaaaggaaccaactactgatacactcagtaacctggatgaatctccagaaaattatgctgagtgaggaaaagtcaaccccaacaggttatatactatatgattctagttatataatattcttcaaatgacaaaattatagaaatggggaatagattcgtgggttgccaggggttaagaacaggttggggatggggggcaggtacggtggctcatgcctgtaatcccagcactttgggaggctgaggcgagcggatcatgaggtcaggagatcgagaccatcctggccaacatggtgaaatcttgtctctactaaaaatacaaaaattagctgggcgtggtggcacgtgcctgtaatcccagctactcagcgtgaggcaggagaatccactgaaccagggagttggaggttgcagtgagccaagatggcaccactacactccagcctggcgacagggcgagacgccatcaaaaaaaaaaagaaaaaaaaaaaaagaaagaaacaggttgggggggataggtgtggctgtaaaagggcaacataagggatccttgtgatgatggaaatgttctgtaccttgactgtatcaatgtcaataacctggctgttatactgtactagtagttttggaaaatgttaccattgcaggaaactgggaaaagggtacaccagatctctgcattatttcttacaaatgcatatgaatatacaattatcaaaaaataaaaagtttaatttttttaaaaaggctggtacatgtaagggtatgagctgttctccactggtggcaaagaggtgggtgatgataattcatatgaaaaggagtatctgagtgaggcacttaagcaaaggagaggatacatggaaagagagacggcttgagagccactttgtccagagccttactctgctatcagagaaagaaaattaaggactagtcaagcaaagatacacaaatcttaaggccccactcagtacggtttcacttcaaaagttacccagggaccccaggtcctattatttctgtggataccacagcccttagcccttaagaactaaccaaactaatgactcagcaattttactcccagagtaataaaaacatgtcaacacaaaaacttgtacacaaatgttcacagtagtgttgcttacagtacccaaaagtagaaacaattcgaccaccaactgatgaaaggataaataaaatacggcatgtacataaaatagaatattatttgtcaataaaaagaaatgaagtacagattcacgctacagcatgactgaatctggtttagatatttgtaccctccaaatcgcatgttgaaatgtgattcccagtgttggaggtggggcctggtgggaggtgatggggtcataggggaggatccctcatgaatggcttggtcccctcctcatggtaatgaataagctcttgttctgagttcatgcaagatctgtttgtttagaaaagcccagcacctcctccctctctctctctcttgctccctctctcaccattaggcactcctgctcccgcttcgccttccaccatgagtggaagcttcgcgaggcctcaccagaagcagatgctggtgctatgctttttgtacaacttgcagaaccatgagccaaataaacctcttttctttataaattacccagtctcaggtatttctttacagcaagacaaaagcagccaaacacagcaggcaaatccacagaggcagcagatgagtggctgcctaggtctgggggatttgggggaaaagtgactactaacatgtatggggtttctttttgaggtgatgaaaatgctctaaaatcgactgtgatgatggctgcatttaaagaaccattaaactgtatactttaaaaggatgaattttatggcatgggaattaaatctcaataaaggtattatttttaaaaaggaaagacaggatggaaagagagagagggaaggagacaaagggaaaaagaaaggaaaaaagaacctaccaggttgaaaaattttgtagtagggactatatgccacatttaatccaccaagcttcactgtgatttcataacgcccagccttgcgcacagtgaaggccacttttactacgttggaattgggctcctgaaggacttcctgggtcactggaatttccactgctagctcgacatgagagatgtgaactcttagtcccacaggccgatgtgcagggaaaggctgcccgttcttatagaataactgccatggggagaagaaggacacctgttagcaagcagaggaaaaaaacatttcctgtgtagagtgagtggggagagaggaagtagctggcagagaccacaccagtaaatcccagtacctaccctgttcctcacagtcctgctcacaaaaacacagagagaaacaaatcccctcaatactctaaagaaaaccattaagtcatgagcaaattcttaacttgttcagaggacaagggtagaatttaccactaaatcaagaaaatgtccattttaacttgccacttctgaaccaccaatgctgcctccttggtcttaccagccctttatattatcaatgctaacccaaatttaaaggtaagttagccggcagcactggcaatgagtgaactaaagcgttaccagacaaaggtaggaggggttcagactctcaagccaagcttaatgctacagtggagaagtcaatgcaggagttgggaaattttttctgtaaagtgccagagagtaaatattttggctttgtggaccgtacacaactactcaactgtcataactactcaggtgtgaaaacagccatagtcaatacatgatgaatgggtgtggctgtgttccaagacaaatgtatttaaagaaacagaaggtgggcctgatttgctaacccctatctataatacttactcttttctgtaatatttttcttattttgaaaaggtaacattaagctttatacttcttcaaagctaaggacctattaaatcaaaatgacagagaaatttgtgactcttcagatagtagcaattcactagttcctggagggagttgaaaaacaagagaaaatgttaacattccaggccagcacctgggctctggaaagcaagttactcagaaaccccaatgggtatggagacagaaacattcccttacatgcactcggaaggccatgctgtggcccacctcataggggtccttccaatcccaggagactttgcaagaccggggatccaggtaatttccccgcacgtagtcataaatagtccggtcccctcggcgctcgcggtcctcattctggaggaagctgactacacgtgcggcaagctcaaagaggaacttaattgtgaagaagaatgcaaccacagacactgtgattccacctatgcaaaagagagaacacacaaaccgcctgccagttacacattacagcttttcattatgcaacaggccagccatttctcaaaaattaaaggaggtcaggatgagactgtaagactgccaaagaaacactgcactgggcactacctctgtagataagaaaggaacttctacaccaggggtcagtaactacagtcctcaggccaaagcccacccactgcctattttggtaaataaagttccattgggatacagccacacccatcatttataaattgtctatggctacttttgcactacactggcagagttgagtcattgaaatgagccttcggaaccaaaaatatttactctctggccttttatagaaaaagtttgcaaactcttgctctatatgagctgcatataatgtccgccctgctccctaccttcctgcacttgctgggcaccccacagaagcagtcaaaaggatgtgcctttggttcccaccatttccttcttaaagaatgcattatttgggagccctcccctcccttgtgtacttggcaaaagtcttctccaatccccaccagagttagcagttcccttttctgggctccttcaaactcctacacattcatctggtataacttttctcctccttgaccgttcccctttatgttatgaatgcctactccttgaaggcagatttttgtcttattcaactttagactccacagtaaacagtgtctggcattgactataattgctcaataaacccaaatgaatgaattccaatgccaactctgtgaaggtacattctggcacgactagaaatattttcagctccattttcaaagggaaaagaataggcagaaaggcaaaaaggacccaagcaacctttacaaaaatataatagagagagctctttccataacgtaccaataacgtaaaacatcaggtcccgtcaatgccaacagacagccgaggatcacagctgcagctgttaaaagaaaacttgtttagtttttgtctccaactctgcctcatagctatctcagagtaagacaaagaagagtgtatggcgtgagccaaacaactctctctagtccagagccttactattcctatcctctttctagcttgacaggtgccgtataatatatttcagagaaacaaagagactgcatcattccccttaaagacttccaatctactgaccactctaggaataccacaaacagccacttgctttattgctaatttcaaaatgcagtaacatggctttcatcttcttagatccatagttcccaagacagtttccctccctcatgcaaagtggtgctaattaacacatgcaaagagggtaatggagtcactttccccttatgtttgccttttgggagtaattcagctaagtagaaatagctatataaaatgtagattttttttttttaaagcaagtatcattatcatcatgttggcattatgtaattaaaatgaactctgggtcatcccaataataagcagtgggtctgaaagtgaagtcatttatgctgttaccaatcagacaaactaatgggccctctggaagatgagctcagcagaaagaccaaggagaggaacaaaaggagactgtacttctcatcctcagtcatgcctgtcaaggtaggagtctgagggaagactttcactgttgttaaacttgtttccagaataagacttcaatcttaattactcatttgatcatgtgaaccaataaaagtactgccaaggaaaaatgcaatgtatgctaacgttcatatcttatcactgagtctgaccttagcacaggctgtatatgctattttacaatgcatgaatgcactctttcttttcaagtcagcgtacactaaggctgtcaatgttatcttgacccaacaccttttatcagcactagaatattacgtagagacaagacagctaaaaatttctaggctcagatctgggagggaccaaaacaactttttttcagggtgtgtttttacatctgattgtgcttgcttagttcctctgataacaatatacccagtggaacccacagagagtaggtaatttgaggaatgaccgtcaaaagtttcatacaaatcctacttagagtgattatctaaagtcctactagaaaagaaatccacactgggaacattagaattgtcacgtggatgaaggtgctcccaaaagggtctattacagacaatataaagagccaaaatttgggatcacaactactgaacctccttcccaaacaagtatctcatctcttgggaccctatgctgaattagctggggacccaacagctatcatctcaaaaatctgctacgatctctcaaaaagcatctgtctgcatcttacaggatgcactagatgacttggtgggaccaaaactggcagtttaactgccttaggtacttcctcagcgggatgccattcgatctgaccctagatgtgaaatttctggtcctcagggaagttacagcactcagcaaagaaatgaagtatatgtggctggtgttacagatttgtggtcttcttagaggaataaaagcagtgccaaatgtatggcttgagtcatgagggctagaaaaattcccacctactatctctgacaactacaacaacccttctgtgagagacagctgacatgcagtaattgaaaagcctggagaacaatcccaggactgcaaactgtgtgacctatctaggcttcagaatctcattgctgtaaaaagagttgcaatttaataatttctatggtatcatctcctttagtatgatatgacttcaatgcaactccccatggccatcaaagctctagccaaacagcataacaaatagcataagatagaggataagggggcagactctagagttagattacctggcttcaaatccatgccccatcattcataatgtgaccctggacaagtcatttaatctttgtaaaggagtgccagtttccttatatgtacctcacggggtgctgtgaggattaaatgagttaacacatgtaagcagcctacagtagtgcctggcacacagtgagttctcaaagttttaatgattattacaattattatcaatagtagcgccagtatcactactcctttacttcaaagctgataggaaactcctctctactggcccacactttcttcaaagagaaatgcatctgaatttcaaaaggcatggcttctattactgtccctgaacagtctgcatgggagttctttatactattctaattttatgcctaaaaaattttacaataaagggttaaaaactcatcctaaaataattcgtccaacaaatactgagtacttacttttttttttttttttttttttttttgacggagtctcacactgtcacccaggctggagtgcagtggtgtgatctcggctcactgaaagctctgcctcccgggttcgcgccattctcctgcctcagcctcccgagtagctggcattacaggtgcctgccaccatgcccagctaattttttgtatttttggtagagacgaggtttcactgtgttagccaggatggtctcgatctcatgacctcgtgatccacccgcctcagcctcccaaagtgctgggattacaggcgtgagccaccacgcccggccctgagtacttactcaatgtgccaggtacagggaggacaaattagaacatgagagccacagtccagttatcatgaagctggcagtaatgagctttaccttgtggagtcctcggccatttttcccctgtcacttatttctcaatcaaatcatcactactgattttcaagatcagctaaaccttctccaatgagtcagttctacatttctgccccacctctattcatcatttaaaactcaacagaccaattactactttttccccaaacaactgtcttcttgaaacctcctcatgaccagagagttagttctatcaattcatcattcgctgacatcaactttacaaaatgtcccactgctctacaacagctctcaaaccactccccacccccatagtatttactgacctcccagtttcacccatggtcacattctgaatttgccttcgttctacaaattccccctttctggttcctcctgaattctctcaaaagcccttctattttatttttatttttatttttattttttttgagacagagtcttgctctgttgcctaggatggagtgcagtggcataatcttggctctctgcaacctccacctcccaggttcaagcaattctcctgcctcagcctcccgagtagctgggattacaggtgcccaccaccacgccaggctaattttttgtatttttttttttttttagtagagacagggtttcaccatgtcagccaggctgctcttgaactcctgacctcaagtgaaccacctgccttggcttcccaaagtgctgggattacaagcgtgagccaccacgcccagccaggcctccctatttttgtcactcaaatcgcttttattccagatcttacctctgttctgtaagcattttctgtaagcatgttccgaccctgttgggggctctctctgtcctgtatctactgctacccctaccccacgctattctccttggccccagttgctataataccttgttattcatcctatgatctatccaaattagatcctttacacttttacatacagctctgaaatgtcccctctccattccttttgaaaactcatctcctctgcctagaatatcctccttccttttattctctatgcatggaaaatctcctgatcctgaggtctaggaaaaatcctatccactctctccaaaatcttccctaatattaaatttagaaattccttccctcatgtgaatctccatagaacattgtttttatttatcttatagcacttttcttttttttttttttttttttttgggacggagtttcactcttgttgcccaggctggagtgcaatggcgtgatctcagctcaccgcaacctctacctctgggttcaagcgattctcctgcctcagcctcccgagtagctgggattacaggcatgcaccaccacgcctggctaattttgtatttttagtagagacggggtttctccatgttggtcaggctgatctcaaactcccaacctgaggtgatccgcctgcctcagcctcccaaagtgctgggattacaggtgtgagccaccatgcccggcctagcacttttattcttttagtctcgttttttcattttagagtggtaatgagtagtcttaaaaatcctccaggctgggcatggtggctcatgtctgtaaccccaacactttgggaggctgaggtgggaagatcacttgagctcaggagtttgagaccagtctgggcaatatagtgggacctcacctctactaaaacttgaaaacaaattagctgggcgtgctggcacacacctatatccaagctactggaggcaaggagggcatctgaggcagaaggatcccttgagcccaggaggttaaggctgcagtgagccctgatggcaccactgcactgcactccaactgcacaacagagcaagaccctgtctccaaaaaaaaaaaaaaaaaaaaagctccaaagaaaccaacataattgcatatagtaacttcaataaatatgaataagatcaaatgtctgtccttttctttgtccagaatgcctaaggatcaggaattttccagatgggatcttccttgtagatagagtttgaaaggatttctctaacagtatattcacttgagccaggcgttgtaagttcctcaacctaaaagttgccaatttaattcagttcaacaagcaggtatcaaatgcccaccactggggttgcagattcccatgcatggtatttttctacagcagtttctacagcatgctctactttttgctattcataattttcctgtatgaaattattttggaactttcccaagtctaattgcagtacaaacaagtatgtgaggctctactgtactatttcatcaaattgttatgagtactttgtgtgttttcaagttcatctctttagtgtccttgacctttataaatatggcatattgtgatactttaagctagaagaaaaatatgacagtagtaaattaacagctttctacccacttattgagtcacttatcacaggccaaacactgccttcagtgctttacatatgttaacctaagtaactgtcaccacgacaacttggtaagatgaatactattattctcgttttatggattttttttttttaagctgggcttaaggttgctgaacatctcacattggggtaagtgacagagttgagattcaagccgggctgggaaagcctagcagggcatggcggctcatacctgtaatcccagcactttggaagccaaggcaggaggatcacttgagctcaagagcttgggaccagcctgagcaacatggcaaaaccctgtctctacaaaaaatacaaagaaaaaattaggatgtcatagtgcacgcctgcagtcccagttacttgggaggctgaggcgggaagactgcttgagcctaggaggtcaaggctgcagtgagccatgattgtgctactgcactccagcctggttgacagagaaagaccctgtctccatttaaaaaaaaaaaaaaaaaaaaaaaagcctacgtctaactccgaagctcaatgctcttaacctctacagtgaatcatgaaaaagaataaagtcataaggatagtgaagtatttggggaaaaaaagatttatgaaaacaggtaaaacaaagtatgagaaaacactatccaatcttactgtgaggaatctcatagcaaggctaaaattagaaagataaactcttatggctcttttttaatcttttgatatataaataaagcatgtcaaagaaaagtggaatgcaatgccaattctctagtgcagaaatatcacttgcttacgaaggttcctggtctggttgcttaatactacagcattttggctcacattacctaccaaaggggaaaaatacttcaaaatatctgtctcaagggactgttagaaagttgattaacatacatattctaaaatcctctgctttttcggagtataaagatttttaattacagtagcaactaaattttagccccaacattgaaaaccagttgtgaaaaagtcatttcccaaaaatggagaactggtttcttcatatttaaaattgctctgctggggacaaagtcaattctcactgcaactgtatactttaacagctatcccttgctgaaaaggcttaggaattggtcactggatccatgttgtacatcccaataactaaagcttaactcagtctgttaccttacctttaaacgagggcccatgttctgagaaccaagtagagcactcctattcaccaaagcaggtaacttttggcccctttcaccttgtcttccaacttccacatgaaagaaaaacgccacaaggtcaacagaaagggtctatccatcagactttgtcacagtaatcaggtcagtgtttctgggatgaactggatgaactccagggtagagaaatacagcccaagaatatatcattcctggacttctctctagtgcagggtgcaatcgactgccaaaggacgccccaggatcctgtccaaaaaagaaaacagggttagttggaataggtttttatttctgaaaaggattccccagaaaaaaatcaaagagaaggtagaacaggcagtggaaaccctgggacactaaaaataaccaaaaattggtaaactctgaccaagcattctcaattaaaactccacacagtttccttgaggcctctctccaactccataagaaaagtcaactggcagcctcactgtctataactatgtctccggctgagaagtgccagagcttccttcagttcactgtccccaaatacttccctatccttatgacattattctttttcatgattcagcatagaggttaagagcattgagcttcagaattagacacagtttttttgtttttgtttttgtttttgagacagggtctttctccatcacccaggttggagtgcagtggcatgattacagctcactgcagccttgacctcctgggctcaagcgatcctcccgcctcagcctcccaagtagctgggactacaggcgtgcactaccacacctggctaattttttatttgtgttttttgtagagacggggttttgccatgttgctcaggctagtcttgaactcctaagctcaagaaatcctcctgccttggcctcccaaagtgctgggattacaggtgtgagtccattcttcagtagaagcaaactaggccacagacttaaagagtaaccttcagcacaaccacatacccagtttgaatataatggggttgcagcacagggtctggagcaaccacaaagacaagtgagatgaacgcacagccagaaccaggttacggacagccttatatgccatggtaaggaattgagacaatattcagctggaaaggagaaacttccaaagagctttaaagcccaatctatcagcctatgcagtctgctcccttcgtgcccacatatgcatttccaagacatgcttaaataaagttgattttatatttaaaacagtaaaatctgctactacgagtcaggggaaaatctgtgaactttcaaaataaagtcactaaataaagtccagtaaagtcagtttataactctcgaagatattcatgaaccaaaaatgtagcagaaagggggtttatggcaatgcatacacaaacagccaccataagacaaatgagaagagactactaattagtaaatgaagagacagtcttaccatatggcaggaactgttctcagtgcttcatacacataaactcacagatacaattatccctattttaacacagatacaattatccctattttacagatgaggaaactgggacacagaaaggttaaagtacttttccaagaaaacacacagtgagtaatagagctgagtcaaactcagacaacctggacccagaatccctgcttttaatgactactctactgcctctccactatgggaaaccaaggaagaaagcacaaaatgctaaaagaacagaatgagtgaagaccagtaaatgaaattaagttggcaaacttttatcattaaaaataaataagtatatgtatttagtttaaaatacagcaacatgaccgggcacagtagttcacgcctgtaatcccagcactttgggaggccaaggcaggcggatcacttgagcccaggagttcaagaccagcctgggcgacataacaaaaccccgtctctacaaaaaatacaaaaattacccagacatggcggcaggcgcctgtggtcccagttacttggaggctgaggtgggggttggcttgagcccaggaggcagacgttgacgtgagccgagatcatgccactgcactccaccctgggcaacagagccagacccagtctcaaaataaataaataaataaataaataaataatgccaacagacttgccaagtacaagagccaaaacctgggtcaactggctactggaaccagcttaaaggatccacaaacaacagactatatacgtaagctataagagagcactatgtagaatactatataaggaatttttaaatgacacttttaaggaataaacaacatagggaaatgcttacaaataaaatgttaaataaaaaagtaggaacaaaactgtttatgtagcacaagtccaaatttagaaacataacattacataaagaagactgaaaggaaaatataaaaatattaatagtgatcatctcttggtatacggaattataaataatttttattttctacctgtaccttttagtgtttttcaaattcttaatgttgcaaggacatgtaaaaagtttctatttctggagaacacatttttggtggggactgattttccttaaataagggagagaatgggcaagttatccttttttcaaataagaaaatggtataaagaggctgggcacggtggctcacgcctgtaatcccagcactttgggaggctgaagcgggcggatcatgaggtcaggagatcaagaccatcctggctaacacggtgaaatcccgtctctactaaaaatacaaaaaattagccaggcacggtggcgggtgcctgtagtcctagctacttgggacgctgaggcaggagaatggtgtgaacccgggaggcggagtttgccgtgagccaagattgcgccactgcactccagcctgggcgatagagtgagactctgtctcggaaaaaaaaaaaaaaaaaaagaaagaaagaaaatggtataaagaaattaagataacagattatactgaacttttctttccttctttttttttttttttttgagatagagtcttgttctgttgcccaggctggagtgcactggcatgatcttggctcactgcctcactacaacctccacctcctgggttcaagcgattctcttgcctcagcctccctagtggctgggactacaggtgcgtactactatgcccagctagtttttgtatttttggtagaggcagggtttcaccacgttggccaggctggtcttgaactcctgaccacaggtgattcgcccgcctcagcttcccaaagtgccaggattacaggaatgagccaccacacccagcctgaacttttatttctattcactatgatgttagcaggtttccaaccctgtgatcagctatttgattattaaatcaaataactcctagttgtaatataagctttactatccctaccgtgagctaccatgctcaccgcaatgcttcagtacctctactgagcttcaaaactcaactcaagcactcccccttctctggtcctgctccaaggcctctctgaggactcttcccacaccagatagaatcagccacttcctcctttgtggtgctcctctgctgaagatacctccgttatagcatttactagtctgtattgaaattatttgtttatatagcagtctctcctaatagattgcggactccccaaggaacactgaccaggtcataacattgcctccccaaggctagtatggtgttcagccctgctatctcagagtctgtactttcacaagatccccaggtgagtcctatgtatgctgaagtttgagaaacatggtttagactctagagcaatcagtatgagaaggggctcaacattctgtatctctaacaggttcacaggtaatgctgatgctgctggtctcctagaccatgctttcagaagtgagaatccaagttaagagtcagcaagccaaatcctaacagccgcctgtttttgtgaaaacagccaagttcattcatttacatattatctgtggctgcttttgcacaatggcagagctgagtagttgcagcagagacatatggcccacaaaactttactatctgatgctttattgaaaaagtataccaattccaggtgtagaggtcttagtcttaaagctacacaactaccttatataaacaaatacatttttctaaatcaaagaaagcatacaaatcattttcttccagttctaccatctcttcttaggaaaagaattacaaaacttgcaatgttatgcaaacacatctagtttcaactatgacttgatggctttattcttcccataccccaattaggaattttacagtcattttccaaagtatgtatttcatacaatcatgcttgcatttgatcaaggctaatatttcctaaaactagtatctcggggaccaaatactgtatccgggttgctaaaattactataacacatactactaactcagtctctacttctaaagtgctattctaaaaagctgtgaaaggccaggtgcagtagtgcacacctgtattcccaacactttaggaggctgaactgggaagatcacttgagcctaggagttgaaaccagactgggccctctctaaaaaaataaaaataaattggtcaggtatggtggctcacgcctgtaatcccagcactttgggaggccaaagtgggcagatcacctgaggtcaggggtttgagaaaagcctggccaacatggcaaaaccccatcactactaaaatacgaaaattagccacgcatggtggcacacacctgtaatcccagctactcaggagactgaggcaggagaatcacttgaacttgggaggcttaagttgtagtgagccaagattgcgccactgcactccatcctgggtgacaaagcaagacttcgtctcaaaaaataaaataaaataataaaataaaataaattagctgggcgtggtagcatgcccctgttgtcctagctactcagaagctaaggcaggaggatctcctaagcccagaagtttgaggctacagtgagctgtgatcacaccacaccactgtactctagcctgggtaacagagagagagatcctgtcacacatacacacacacacacacacacagccatgaaaaacatgatgtaaaagtccatttcaaaattttggtgcatacagagctagtggcagcaaacagaagttctgatatcacctactgatgtccaccaaatgacaagacaaaagaaagacgtttgttttgtaagatgcaatctccagcattctccacagagaagcaccagccatgagtccagggacatgaacttaaaaaaacaaactattcaattttcaaaaagtgcacaggttagggtggtctaactaaggaggttccaagaatatatcagacactttggattatcagtttacatttactatggcttaattccactcttagtttatactccccaacccaaaatcccaccataaaagattgccctcctccatcaagtttatactcttgagatatttatacagttgtctatttctgctattgtggtttagccaagttacatggttttcatttatactttcttcatcagtcagcctctccagtctcttaatcattcctgtgggtcttctgtgaactctctccagctgatccccaacgatctggtaatgaggtgcctccaaatgactgcagccttccagggacagcctcattagtcagcaggatgaactcactctcctcagttccatgacatactactcttgagcaggcaatcccccaaatcacagaaatctactgtgctgccgtattagactgtacctcattctataactcccagatttggacactggggcatgctagaatgtgctagaagccagaggataaatgacccatgttcctacagcatctgtttcactagaggatgagtgactggggagaaaaaaaaatttcatgttaaatcaaactcatagataataaaacagaatgtaatatttgcatgaatttctaaagataaaacatggatatgttgaatatattcatagatattctgaacttgaagcagaaaggctgcttgggcctctgctcccggcaccaaggagttaacatatcctttaccactagaggtacttgagccaaaaccctcactcaacttctgatctactgtgcattaccttactcataccatatactcacattttaaatgatattatttttctgctatgtttccccatcctagatatctatatttattttctctttgcctaaaatcttttgctgcaggaacacgtgtcatttatcttctggcttctagaacattcttgcctgccctgatgcccaaatctgggaggcatgaaatggggttacagtctaattcactcgataattcacagactaccaacatctataggttcctcttcatcgttcattcttcattcatttcacatttcttgagcatttgctatatactgggctacgtgataaaagctaaagtcacaaggataaataagacagggtgctttcttaacctcaatgaacttggtccgccatgggagaaggacaatgcaatgttgcaagtgccataaaagaggaataagcaaagtatggagggcagaggaaggagaagtaactgtatgtgcaagtggaaaagcagagacaacagagctgattacttaagaatgagtaagcaggctgagcatggtggttcatacctgtaatcccagcactttgggaggctgaggtgggaggatggcttgcgcccaggagttcaagaccaatctgggtaacatagtgagatcccatctctaaaaaaaaaaaaaaaaaaagctgggtgtggtggtatgcacctatggtcccagctactcaggaggctgaggtgggaggatcatttgagcccaggagggtgaggctgcagggagccctgactgctccactacacttcagaccgtgtgaagagcaagactctgtctccaaaaaaaaccaaggtgtttagaaagaccacctggggctaaactaggatgactaccatgtagtggttaagagcatgaatcttactactgaatgatcttaaacaagttacagcaggtcctcaaacgacatcagtttcattcaacactgttttcttatgattttgaggagtaaaaaaatggactcctggcaggcaccaatgtgtggagttcacacattctctgtgtgggttttctctggatacttggatttcctcccacatcccaaagatgtgcacttcaaagttaactggcatgtctaaagtgtcccagtctaagtgacagtgaggggtgtgtgtgtgtgtgtgtgtgtgtgtgtgagagagagagagagagagcaagagcaagagagagagagagagacagcacacaagcgagagagccctgcaatagaatggcgtcccatccagcgctggttcccaacttgcaccctaagccctggccaccctcaaccgtggactggaataattgggtaaatgttataattatctaacttgtttttatcaatctttcttatacatactgctctcatttattttaatatgtatattatgttctggtctttatttaaaatagtttggtgatatttttgtgaccagaaatatgccataggaacttaattcttgtttatatcaattagcctatggtaaaactggttatcaatatacatcattttgtttgaaggagaagtttccaagaacctatcaacatcaagtgaggacttgctgtaaatttctcttcagttgcctcatatgtaaaatggagatgcactgagaaaagaaacgaatccgctgctcttggggagcaagacttggagaataaggacaaggagaattgcttgagactgaaactttacacccaggtgatatggagtgccttgggggacaaggctgtatgcacagaccaggctgctgggttgccaggttatgagggtggtttgtgccaggccacaatagcccaacccacagcaagtgaggaagatggcttcaatctacctgaaggactcactggttttccagagagattccatgtggaaaaaactacagcaacaatccaaaataatggattttccagtgttctctgaaggatgatgataacaagaatcaacctttattgagaacttactatgtgccaggcattgtataaagtgctacatctatattatctcatttaactctcacatcaaccatatgaggaaagcatactttatccatattttatagattaggaaacagaagcacagaaagctaaaatgacttgcctatagccatctagtttataagtgaaggagtcaagcaatgtgattccagagtttatattctttctctactcttaactggcaatactgatgtatcaaaaagaacttccagaaggggggaaaaagatattattcttgggataggaagaattaagctcagaaatatttaatttgaaattttagccgggcgcagtggctcacacctgtaattccagcattttgggaggccaaggcaggtggatcacgagttcaggagatcgagaccattctggctaacatggtgaaaccctgtctctactaaatatacaaaaaaaattagccgggcatggtggcacacgcctgtattcccagctactggggaagctgaggcaggagaattgcttgaacccaggaggcagaggttgcagtaagctgagatcatgctactgcactccagtctgggcgacagagcgagagtccctctcaaaacaaaacaaaacaaaacaaaaaggaatgttaaaggaatatgacttcattttagactttaagcaacaacaacaacaaaaagatgttttttaaccgagagagaaaaaggatcacacattttaaatgaagtaactctggggacaatgtgaaagactctgaagggggacagacccattaatgagcacaagataaggggctactggtccaatggagtagctatacactggccacaatatagacagggtccaacatagaccctcattagtcacattggttgagggtggccagggcttagggtgcaagttgggagccaaccctggatgggttgctctcctgctttatgctctcagaagcaacaggatcaatgatctgtgaggtcaaatgaataaacaagaggaagaagccaaggaaaaaggcaaattttctatggttgggagcctggataaatgaaggagaattaaggaggcaaagcaaacatgaaaaaaaagatatattagtccaatttcatgctgctgttaaagacgtatcagagactggttaatttacaaagaaaaagaggtttaatggactcacagtaccatgtggctggggaggcctcacaaatcacggtggaaggtgaaaggcatgtcttacatggcagcaggcaagagagaatgagagccaagcgaaaagagaaatcccttataaaatcatcagatcttgtgagacttattcactaccacaagaacagtatgtgggaaactgcctccgtgattcaattatctcccactggatccctcccataacacatgagaattatgggaactataattcaagatgagatttggatggggacacagccaaaccatatcattccaccccggcccctcccaaatctcatgtccttacatttcaaaaccaatcatgccttcccaacagtcctccaaagtcttaactcaaagttcacaatccaaagtatcatctgagacaaggcaagtcccttctgcctatgaccctgtaaaatcaaaatcaagttagttactttctagatacaatgggagtacaggcaatgggtaaatatacctgttccaaatgggagaaattggccaaaacaaaggggctgcagggcccatgcaagtccaaaatccagcagggcagtcaaatctcaaagctccaaaatgatctcctttgactccatgtctcacatccaggtcacgctgacacaagaggtgggttcccatggtctggggcagctccatccctgtggctttgcagggtacagcctcctccccagctgctttcgtgggctagcactgagtgcctgaggcttttccaggcacatggtacaaactgtcagtgaatctaccactctggggtctggaggacggtggccctcttctcacagctccactagacagtgccccagtggggactctgtgtgggagcttcaaccccacatttccccccaacattgccctagcagaggttctccatgagggccccaccccatagcagacttctgcctgaacattcaggagtttccatacatcctctgaaatccaggcagaggttctcaaacctcagttcttgacttctgtgcacccacaggctcaacatcacgtgtaagctgccaaggcttggggcttgcaccttctgaagcgatggcccaagctgtaccttggctcctttcagccacagctggagcaactggggcacagggcaccaagtccctacactgcacacagcaggggggacctgggccctgccttcaaaaccattttttcctcctaggcctccaggtctgtgatgggagtggctgctatgaaaacctctgacatgccctggagacattttccccattgtcttggtgatttggctcctctttatttatgcaaatttctgtagccagtttgaatttctcctcaaaaaatgggtttttcttttctatcgccactgtcaggctgcaaattttccaaacttttatgctctgcttcccttttaaatgtaagttccaatttcagatcatctctctcaaattcaaagttccacagatttctagggcaggagcaaaatgattccagtctccttgctaaagcataacaagagtgacctttgctccagttcccaacaaattcctcatctccatctgagaccacctcagcctggatttcaatgtccatatcatcaccattttgttcaaagtcattcaacaagtctccaggaagtttcaaactttcccacattttcctgtcttcctctgagccctccaaactgttctaacctctgcctgttacccagttccaaagttacttccatattttcaggtatctttacagcaccgcctcactcccagtaccaatttactctattagtccattttcacactgctgataaagacatactagagactgggtaacttctaaagaaaaaaggttgaatggactcacagttccacatggctgggaggcctcacaaccatgtcagaaggcaaaaggcatgtcttacgtggcagcaggcaagagacaatgagagccaagcgaaaggggaaatcccttataaaatcaacagatattgtgagacttattcactaccatgagaacagtatgagggaaaccaccccatgattcaattatctcccactggatccctcccacaacaatgggaattatgggagctaaaattcaaggtgagatttgggtggggacacagccaaaccatatcaaaagataatgagtagagaattaaacatgttaagtttggagtgtctacaggatatccaggtgaatacattcaaaaggtacatagaaatacatttgtatcacacgcaaaatgtagtccttcgtgtgtagcattttttcacttagcataatggttcttagattcatacatgttgttacacatttcggtagttcactcctttttcctgcagagtagtactccattaaatggacatactgcaatctgtttatccattcaccagatgaaggacatttgggttacatccagtttggtggtatcatagataaagctgctatgaacattaagctacaagtctgtgtaggcacatgatttcatttctcttgggtaaatatctaagaatgggattgctgggtcatatggtaagtatctacttaacttacaagaaactgccaaaccgtttaccaaagcggctggaccactttgcatttccaccagcaatgcacaagaggcaggttgctctatatccaccaacacttggtactgtcttaatgttacccattctaataggtgtgaagtggtatctcactgtgattttaatttgcatttccctaaggactaacaatattgagtatttttttcatgtgtttattggttatttgtattagtttctttgaagtatctattcaaatcttttcttttttaaaaatcgagctgtttgtcttcttactattgagttgtaagagttctttatacattctaaatgtgaaccccgaatatctgagacaggtctcagttaatttagaaagtttattttgccaaggttgaagacatacgcccaggacacggcctcatgaggtcctgacgacatgtgcccaaggtggttggggcacagcttgcttttatacattttagggagacttgagacatcaatcaagatgtatactggctcagtccagaaaggcgggacaacttggagtagggaggggggcttccaggtgagaaaaatggttgcattattttgagtttctgattagcccttccaaagaaggcaatcagatatgcatctatctcggtaggcaggggatgactctgaacagaatgagacacagatttgccctaagcagttcccagctttacttttccctttagcttagtgatttgggggccccaagacttattttcctttcacataaatataagtcctttattagataaacattttgcaaatattttctgtggcttgcctcttcattttcttaacagaaaatacactttttaaagagtacaagtttctaactttgatgaaagccaacataaattttttcttcatagtttgtggtttttgtgttctattttttaaaactctgcctagctcaaggtcacaaagattttctcctggtttttttctagagggttatctaaacgtttcacaagagaaaatcctctcgtcaaattttttaacaagaattttttaaaactcctgcattccatttatctcatagtcattaagttttattccccttgtttctttcaaattcaatgctgcacattaccatgcactatttaagttacagtcttctgttgtttttttttttttgagacggagtttcgctcttgttgcccaggctggagtgcaatggcaccatctcggctcaccgcaacctccaccttccaggttcaagcgattctcctgcctcggcctcccaagtagctgggattataggcatgcgtcaccacgcccagctaattttgtatttttagtagagacggggtttctccatgttggtcaggctggtctcgaactcccgacctcaggtgattcgcccacctcagcctccctaagtgctgggattacaggcgtgagccaccatgcctggccccagttatagtctatttctgaatttggaaagattttaatattttaacagatttttcctctcttcaatctagtaaatggaatgcttaagtttagccaaggttttagtccctcacttctctccaaatccacataagacctctgcacccctgatactggttcttaaaacaacaactaaattccacaacccagaacatgcaccttgaagttaagccagggacaataaactagttacccttctggctttaacgagagtcttttataagatcatgcccaccttactgagtcactctaacctgtgatgagactggaaaatgttgtcctataatcactcactggttaaattaaaatttaggcttataaaggttaagctaaccaagacaaaagtaattctgcatttcttaattcagtttggattctctctattgcaccattctctctaaaacaagccagagttcttcagacccgtatttctttttgtatagtatacacaaaggcatagcttagattcagctgtccctggagttgtttgccattcattctcagcacagtttagagaaagcaggaaaaagggattcaaagctaatgttgagtataacagggaaaacaagaagtgagaatttaccattgctcattttgtaacctcatggggagaaaaacaaaagagaaaactggctcatccatgtcactgtcccattcttaaccctaaatctagaaaatactagcttcagtttcctcttccctcctatcttgatgtgttttctatatacaaaactgactctgctatgcctgagccacagaggacaggcccccatgttcccatctcatggcagcttttatgcttaggtgactttggaccactgaatcttggctataacaggaagattttaaaagtaattctttgaacctgacaagccgtctccctcaataagtctaggaagctattattccattaactgcgcctgaagtggcaggcacacagccagatctgcagcccagtcgggtggaactggaatggtcacacgtatacttaaaagctaactctgcctctactaccatccattactttcaattctgtgcttatttttaaggaaaataaattatttatataattgaaaggaaaaacaatgttaattaaatgagcattttgtagttaagattccaagaagaaaaactcaactagccacagaaatggcaccctaagatagctggatttgaaggagaaactcaacacttacctattcaaaacaaaatttctgttgacctaataatcagttttaccaaagaaaggtctattaatttcttcaaatgcatattaagaagcgaccacatgccaagcaatatgttggaccctaaagattccagaatgagtaaaatattctcaacactttagaaacataaaagcttagtaaagaagacagacaaataaataattacgtagttatacttccgtgtagtaaaatctatgaggtgagcatagagggtatggatggataccttaatcaagatcagctcttagcttctcaggaaagttcacatcaccctcctggaagcaaagtcaactcttccatagagttaacaatgctttgggggtcaaggaatacaaaacactacctatgaagtattacttattctcagggtcaatgactctcttcaacactcgtcagaggggattcttggaccacatacatagcacagaaaaagcactcactggaaataccaacttatttatcaaaattatacacgatctggtcgggcacagtgactcatgcctataatcccagcactttgggaggccgaggcgggcagatcacctgaggtcagaatttcgagaccagcctggccaacatggtgaaatcccatctctactaaaaatacaaaaattagccaggcgtggtggcaggcgcctgtaatcccagctactcgggaggctgaggccggagaatagtttgaacccaggaggcagaagtggcagtgagccaaaatggtgccattgcactccagcctgggtgacaagagcgaaactccattttaaaaaaaaaagaggccgggcacagtggatcacaccggtaatcccagcactttgggaggccaaggtgggcggattacgaggtcaggagatcgagaccaccctggctaaaatggtgaaatcccatctctactaaaaatacaaaaaatggccgggcacagtggctcacacctgtaatcccagcactttgggaggcccaggcaggtgggtcacaaggtcaggagatcgagaccttcctggctaacatgtgaaaccccgtctctactaaaaatacaaaaaattagctgggtgtggtggtgggcgcctgtagtcccagctacttgggaggctgaggcaggagaaaggtgtgaacccaggaggcggagcttgcagtgagccgagatcgcgccactgcactccagcctgggcgacagagtgagattcgtctcaaaaaaaaaaaaaaattagacgggtatggtggcgggcgcctatagtcccagctacttgggaggctgaggcgggagaatggcgtgaacccgggaggcggagcttgcagtgagccgagatggcgccactgcactccagcctgggcgacagagtgagaccttcgcctcagaaaaaaaaaaaaaaaaagaaattacacatgatctaactggaatgtggtattctagattcagtttgggtatagaaaaaggaaattagtggagaaacttgtgaaatccaaataaagtctatagtttagtaatagtattgtaccaatgttaatttcttagatgtgacagtatgtgccatggttatgtaagaagttaacattaggagacaccggtgaaaggtatacaggaatactctgtactatctttgcaacttttttataaatttaaaattattccacaatttaaaacaatttaattacagatggtgctcccctttacattctcactcccccttagaattctaatcatgtctccctaatcattgccccaattcaggtaatgccagcctaaaactttttaaatatcttttttaacccctttctatgaactgtttgcacagcccacctgggatttcttctttaccaagacatgaaaaactagatcacacttgggaagttttaactgttttctgttcctaataggtttaccatatataccgggggtaccttgaatttgaacttcccaaagcggacaagagaggggttaaaataacatgctctgggtctctggataaaagcaaggggacattacagaaaatatgttgtatattaataaattatctaatctctggccaaaaagtacaatatatagaaaatcaattaacagatgttaactattggcatctcaacagtaacaagctgcactgaaataaatgccttcgctctgaaaaacatgatgcaaattgctcaactattcaagataacaaaaactcataaaatcatatggaaccgttcaattagactaaatgacaaaacatgtatctaccatgactatttagtttctaatagctaagtgaatacccatctttctctataaaccctatcttgtagaacagtcttcaaaagagccaccaggaaaacatcactatggtgctgtaacaccatatcaacagctcaggcatgcgtgtgtgtacacacacatacatacacacaaactgcaataaggttaaacaacctcaaaagtttgaaaactactatatgaaagaacattagtgaaggctaagcattcagaacccttcaaagaaaaagaaaccaaagaaaaataactgaaatttaaacccaagttagttaatagctaaagtcatttaaaaggtaaaacggtcaggcacagtggctcatgcctcttctcccagctactcaggaagctgaggtgggaggatggcttgaggccaggagttcaagatcagcctgggcaacatagcaagatctaataaataataaataaaaggtaaaatgatacactagagtccattaaggtcataaaatctgatctattacatggtactaatatgttgatagtattaaataaatattacacaacagtactctgacctggaccacttacagaaagatgaacaagaagagtaattcctctaaaatatttcaactcccacatctctattcagccaccaaccatactttacctatttacaagtctttctgtaatacaggactgtggtgagattgcccaggacagaatgggccctcaataaatgctttctgaatgaatgaccaagcggcagtaatctatctctgaggtattcttacaaaccaattcaatatcaagacctcagaagcagaacatgctgtatgccatgctaccacatttaggggcaggcaagttaattgaaaaataattaacagcgactaatgtttgttgggagaaaaaaagtcctatcatgtaagtcagaaaaataaatgtaaaaactataacttgaaaatggacaaaaaagtgaatctacttataactttctaacattgaaatacaagatgttctttaaggagtctttcattatccagaataattttacaaagaaatttgataccaacttaaattagtaagttagaccaattagtgaatggaatgaagtccaagcccaattatgtgttcaaactgtgtgtccaatgccttgggtgattttttctcttcaagactgcagaaaaatgcaaaacaaccctcttgactgctgagaaggactaaaatcatttcttttcctcacaagtatgtgcccaaaagcaattactttctgctcccatccatcacaaatcaacactacctcccagcttcgcatcccccactttccatccccatcaaagaatgctgtagagtatctgaccactttcatttcacgctataagaacctcagattgcaataaaattacaatgcaacaaaaacaaatttttctaagtatgttcttatcccccatggtgttcctacactaatttagctccctattaggtattaacaatcaaggaaatcagaacactctcaatagaggttacaatagaaattacaaatggcctttttttaagttgttgttgttcatggattccaaaattcaaagtacacattaccagaagagcgtttttctgtcagtgcctaaatttaaatgcaaattactatttaatgatatgcaattttccctctgaacctatatataatactaatgagtcaaatgtttaagaagaataactgaccatgttattttagcttttagacaataaaaagcttattgtctaatcaccaagagatacatcaaaaaactggttgctattagctctacacatgaatggcagcttgacagagacaagctgctccagaaagattaggaacttctagtgaccacaaatggggtaaagcagaaggcacatacagtatctgtagctaccatttctacatcaaaaattcagtgcccacagatatgtaaactattaagccatctaaatgaatgtgtgcctgaaagagaaaggagaagcagaaaaagtttacacccaaatcaacagaagaaatcaccctgcgattgagcatcccaggacctgaaaacttaatgttttgaggtttatgaacacgttcaagttccagtgcaactatgttaaaataaaattgggctggtgccaggcacggtggctcacgcctgtaatcccagcactttgggaggccaaggtgggcggatcacctgaggtcgggagttcaagaccagtctgaccaacatggagaaaccccgtctctactaaaaatataaaatcagccaggcgtgttggcgcacgcctgtaatcccagctactcaggaggctgaggcaggagaatcgcttaaacctgggaggtggaggttgcagtgagccgagattgcgccattgcactccagcctgggtaacaagagcgaaactaactccgtctcaaaaaaaaaaaaaaaaaattggggcttggcacagtggctcacgtctgtaatcccagaactttgggaggccgaggtgggcagatcacctgaggtcaggagtttgagaccagccttgccaacatggtgaaacccatctctattaaaaatacaaaaattagcaaggtatggtggcacacacatgcctgcagtcccagctactcgggaggctgaggcaggagaattgcttgaacctgggagggggaggttgctgtgagccgagattgcgccactgcactccaacctgggcagcagagggaggctctgtctcaaaaataaaataaaataaaataaaataaaattggcataaaattccaaccctgccacacatcctcaagttggaagacacacaatggtaacaacagaaaacactctgagtagtctggtttacactcttctagggacctcgcatgttaactatgaataaacataagtcctgataacatcccaataaaagagtgctactatgattatctccattttacagataaagaaactgagatgcagatagattaactcacccaatgtcatggcgagttataaggcagagcaaggattttaaccccatcagtcagactccaaagttcgtgttaaacaataaacgtgttttcatcataagggttatacaatggtcaccttcttttttaaacctgataacatattttacttccaactctaggatagcatcatgcaataagaaaagtatgacagaggtacccattccgttcccagcttgatcagtagctggagaatggaagacaaagtgcaaaaaaaaaaaaaaaaaaaaaaaaaaaaagaaaaaaaaagaaagaaagaaagaaagaaaaagaaaaaaagaaatacaagtacagactttggaatcacgagactcaaacagacccctgaacaaagtctggggctcaatttccccatatgtaaaataaaagaatttatgttattgagaaggtcaaagaaggtaatatgaataaagtgacaagtacagtatacaggatgggggttttcatttaaagtttacagacacccagagggtccacggatgggcttcagagtccaccaatctcattaagtgtattacaaactgtatgtgtgcccattttttaaagaattgttcctggctttccacaaactttcaagaaataagttatctccaaaaagttaagaaccactggaatacatagcaggtactcaaagaaaaaagctacctttcgctccttgttctcacaaattctccctttttacttaaagatgacacaccaaggcttcacaataaatgtgcattgtatctcaccattttcttggcttgggtaagtagtaacatatgcaagcttatgccccaattctctagcgatagtctaggccctcaaacactgcttcatttctctcttcaccgagaggagtacacggtatatactcgagaacaatcatccacctagctgcacaaagcaccatatcggctaggaaaaccaaataggaaccacagcctcagggctggaccatagacaccggataccccaacgctacagggtgaggagaatgtgttcccccaaactactgggcaaaccaggagtctgaacccccctacccttttcctccctctctctctggaactctggtaaaggcaggtcttctgggctctgcctaaggctggagagaaacgttacccgagccgggggttgcagcgcgacgaagttccacctccgctgtcctgggaaggggcggcagcactcagcagaagacgggctccccactctcccaccaacagaccccagagttggtctccacccggcctgggaaccggctcgggggattgccctttccccaaggagtttccgcttccgggctatcctttgccggaagcagtatgtgaatgacgtagaagtattgcgccgttggtgattacggaagaaccaggagtttggcgtgaccatggtgagagaagacggtccaagaagggacgttatcaggccactttttgggtggagaaggaggtagtcagaccgtggccaaatttccttcacattatcctagcatattttcattctggtcttagctcttaaacttctccaagcggtgactgttatgctttacagagtggggaagagggtctgggttatttgaggcaagaagggaaggcaatagacaagagaaaagaagagactttaaaagatgccgtgtgtttccaacttttttaattctaaaatttctgtttcaaggggaagcaaaagaaaacaaggaagtatgcgaccatgaagcgaatgcttagtctcagagatcagaggctgtgagtgtctggaatcaactgcccagggatattctaataagagtctagagaggataagtagtaaaaatgtttgttgttattattttgttttttgcttattatcgtgtcttagatttatatagcatgagatagccagtgtttaacagtaatttagctgctgagcgatcacactgggaaaggcgatgggaattaaacatttcttaagtgttcactttttctaccgttatatgctttgtctgccatatcgcatttaaacctcatgtcagttcggtgaagtccgtatagttctctttatgtttttaccattacactactacattcccctggggtggggcgaggggagtgtttcttgttgaaagatggcaaggttagagaccttgtttgtctggcgtttccagtgcctggtactcaaatatttttgtcagagaaaatgggaaaactccaagatatctccattttataagtcttactaatataagaatccaaatcactgtggaagaagaaagtgaagtgaaattccctagtatgaagaggatcaaagcggtgtccctgcttaagtgtagaataagcatagctattaaataaagactgatcttcactgagtttaagagtctcagaaagccgggcgcagtggctcacgcctgtaatcccagcactttgggaggctgaggcgggtggatcacctgaggtgaggagttcaaaaccagcctggccaacacggtgaaaccctgtctccactaaaaatacaaaaaagagtctcagaataagagaatagtcgttaaaaccttcagaattattattctcagcctttagtgtggatgtattgtgtaatttttaggaatgacactccattaataataatttctttctagttaagggttaagttctgtatatgcgtttttacattttagccctttataagaagcatatggggtaatacttttcccccaaaagttaaagcatctgaatcttcagaagataactgtcacccttttacccattgcttggaagtggattgtgatccttgatgtgagagattctgactaaaaaataaatatagtataatcagcttttatttactcattaacaattcttatgcattattggcattactggttaattctgatacttccaggtactgtgctttgcactagagttatttgctcagaaagagtatgctgatattaacatgaggatatcacaaagtaggatttcttcagtagaccaaaaaaaaaaaaaaatggaactttagatttttgagattttaattgctgtggtttttcttctcccttggatttaatttacctttttcttcctagtaaagaaaaggatagattaaaacctaaaaagaaagaaaagaaggatcccagcgcattaaaggaaagagaagtgtgagtaatcaaacgtttgaagttttcctttaaaaccatagacctcttagaaatccaggctttccctgagctggtttgctaacttatttgttagtaagtctagcacaactatgtagatgaaagtcatatcgatgagcatatatcaattctagtggtttgaaggttttgggattttatggagcagtaaaatttcccctaaaatcctggagatattatctaggattattaactttttctttgccagggatcttttaagagacataagtgccattgtttaacacaccagcagttcataaaagagagactgtatcaccaaaaaatatttaaaatatattttcagaataaagatatttatataaagatatgacctttatataaagatataaaggtatttcattccttttaagtaagtacatttaactttatgaaaactttaccacattttccttatttttctaatttttccctggattggtaatggacatattatcacaggtagatactgatccatggcctagcatttggaatcactgtcatattcaacccagacaacttgggctagatgtgatacaggtcctgctgtagtatataatcctaacactagacaaactgttctctatcacattccataacagcagttttagaatcctttaagaatgacaaacgtgttgttgtatcattctaatcacgataactgtattctacctccctgtgcccatggtgattctacttttgctagaggaagagctagattggataattgctttttttgtttgtttgtttttgataattgcttttttaaagttggtgacaaaggttgccaggggagctgagattaagataatgatattactttcttccttgccttcctttttaggatttatttccaatgaacatggacaaaagagtttacagcaaacagtcccaagcagacttcttttttgtttttgttaatactagggtatcaatgtaaatttttctttgttcttgttttctttttccttcagtccccaacacccttcctgcttatttttccaatataatacacagctgggcccaccttaccacatcctcgttgataccaactttatcaacttttccataaaagccaaactggacttagtgcagtcaatgatggactgtctgtatgccaagtgtgagtatcatacttttatgtttccgtgacatttgttcagaataattatatttatacaaatacatgaaaggagggagatggggttcttgttaactgaattgctggccatttaatttacagtggtcaccatagcagtgaccatgtttaatgaattgaagtataatgcaaacttgactggaaaaaattaaactttcacaattcagaaaacacttagaatgcttcgagtatcattatggacatcaattttgaacataggggaattttctgttttagaattctagattttaaaattctagataaatgaaaaatctatttttcagtatctatattcttttatgttaacaaggatatgttctcccttttgccccagtgttgaaacactaaataagacattctgccatttatgatcacagccctagaagttagatagatgatggtcaattcctaagtttattcagtttggtatttattcgtagtacagaggatctgaggtagtttatttacacctaggtatgcaatttaccattaatagatttcccttgtgtatttgtatatcccctcctttaaatgatcttccttcactaccatgaacaggaaaaagaaaagtaaggccatctatgaagcctatcatagtaagatctgtcccatttgtagcgggtttatatttatatatttttcagtcacccggttagaggtacgaatgaaaattagacttaaactttgccatagaggataaattactggaatcaaagggaaaaatttgtacctccctttttaagttttaaaggctactatataatgaacaacagttgcagagtgatagaaatggtaaatgttgtttactgatttattaaaatgagcaagatgagaagatggggttaaggaatgtgtgaaggggtaagaaagcagattctttagatgcccaaaaattaattaagaatggctgcagccgggcgcagtggctcatacctgtaatcccagcactcgcggtggctcacgcctgtaatgccagcactttgggaggccaaagcaggcggatcatgaggtcgagatcgagaccattctggccaacaaggtgaaaccccatatctactaaaaatacaaaaattagctgggcgtggtggcacgtgactgtagtcccagctacttgggaggctgaggcaggagaatcgctggaacctgggaggtggagcttgcagtgagccgagattgtgccactgcactccagcctggcaagagaaactccatctaaaaaaaaaaaagaatggctgcatacatttattagctgcatacgtttattaagatgtgaaggtagccatcagatgagaaaaaaatggagctaatggaataaaatagtcttctctacagatcagaattgattgggtggcaatggtcaggggaccattgttttttcatataggcctttctgtattactttttaaagctatatacataaacttttgaaataaatcttttagaaataatctaaagttgaggtgctaccaggcctctaagaatgaggcttgggtgaccccatatgggggaagacactaaacttggtagtctctttgtatttcccatggtatttctaattgagctgcttctccaggaatgctgtgacctacttatcaatgaaacggatagagggtcaaagcatggccctttgcttccttgatgaattgcttccttgactctatacctccaccagtaatatctagatagtgactgttagagctttaggcaggatagctttagtcttatggctttctttaaatatgtatacttttttttttgagacagggtcttgctttgtcacccaggctggagtgcgttggcgtgatctcagctcactgcgacctccgcctcccaggttcaagcagttcttctgcctcagccaccccagtagctaggacatgccaccacgcctatctaatttttgtatttttcgtagaggcgggtttcaccatattggtcaggctggtctcaaactcctgacctcaggtgatccacccacctcggcctcccgaagtgctgggattgcaggcgtgagccaccgtgcctggccttgcttgcctttatacttaaaggaaggcctttctcttcctcttaccttgaaaaggcctgtttgatctttacatggttcctggtctcttctatttccactttatagtccaacaaggaaggatagtttgcttcccattggctttctcttctgcctatgaatcctgaggctgttactttccctttccttgtagtggttttcctgagcctgcttccctacttcagttgcaagcctttgctcacttcactgctacatggctctgaaattggtcctcttaaagaacacattgccttgtttcatgatctcagtattaaaatatatatatatattgagacaaagtttcactctgtggcccgggctggagtacagtggggtgatctctgctcactgcaacctctgcctcccaggttcaagtgattctcctgcctcagcctcccgagtagctgggattataggtgcatgctgccactcccagctaatttttgtgtaaagtagagacggggtttctctatgttggccaggttggtatcgaactcctgacctcaagcattccgcccactttggcctcccaaagtgctgggattataggcatgagccaccacgcctggccagtattaatatacttctaaaaaattctagcataaaaaaatggaagttgaagcctgggcaacataacgagaccccatgtctacacataatttaaaaattagccagggggccaggtgcggtggttcacacctgtaatcctagtgcttttcaggagttcgagatcagcccggccaacatggtgaaaccccatctctactaaaaatacaaaaattagccaggcgcagcaccatgtgcctgtaatcccagttacctgtgaggctgagggaagagaatctctggaacctgggaggcagaggctacagtgagccgagatcgtgccactgcactccagcctgggtgagagagcgagactctgtctcaaaaaaaaaaaaaaaaaaaaaaagcatgcatcgtggcatgcacctgtggtcctagctacagatgctcaggtgggaggatcacttgagcctgggaggctgaggctacagtgaattgtgattatgccactacactccagcccaggcaacagagcaagaccctgtctttaaaaaaaaaaaaaagaagaagaagaagaaaagaaagttgggctgggcgagatcttcaccccgtagtcccagcagtttgggaggccgaggtgggaggagttctgggcttgagctcaggagttcaagaccagcctgggcaacatggtgtgaccgcatctctacaaaaaaaattttttttaaatcaagctgggcatggtggctcatgcctgtaatcccaacgctttgggaggccaaggtgggtggattgcttgagcccaggagtttgagaccagcctggccaacatggcaaaaccctatctctaccaaaagaaaccacaaaaattagctgagcatggtggagcatgtctatggtcccagctgcttgggaggctgaggtgggaggatcacttaagcctgggaggtcgaggctgcactgagctatgtccatgtcactgccctccagcctgggtgacggaacaagaacctgtctcaaaagggggaaaaaaaggaagttgcttataatgcatttcctcaaaggagcaattataaaaattcataaatctgtgtgagatggagggttacttttatttattaatgaaaatggcctgtaatcccagcactttgggaggccgaagcacgcggactacctgaggtctggagttcaagaccagcatggccaacatggcaaaactctgtctctactaaaaatccaaaaaaaattagccgggcgtggtggcaggtccctataattccagctactcgggaggctgatgcaggaaaatcgcttgaaccccagaggcagaaattgcagtgagccaagatcgtgccattgcaagagcgaaactccgtctcaaaaaaataaaaaaagaaaatggatcctgtattattttttgctttataaaacagatttactgaaatataattgactccctttacaactatacaattcatccctttaaagtgtacagttcagtgacttctagtggattcacagagttgtgcatcatccatcaccatagtcaattttagaacttccattatcccaggaagaaacctggagacccttagccatcaccctgcaaccctcaccattctctctatttctaggcaaccactaatctactttctgtttctataaatttccctattctggacatttcataaaaatagaatcttataatatttggtcctttttcatttaacgtactgttttcaaggatcatttatattacagtttgtatcagtacttcatttctttttattactaaataatattccactgtatggatagatcacattttaatcatttctacttgctttttacattgaactatatattttgaacatttttccatggcatgtatatataaatgggcctcattcttttattttgagtcaaggtcttgctatgtcatccaagctggaatgcagtggtctgagccaatagcttacagcagcctcaacctccaggtctcaagtgatcctgcagccacagcctcccaagtagctgagactactggaaagagccaccatgcctggctattttatttatttatgttttgtagaaacaaggtatcaatcatgttgcccaagtttttggggtttgtttttttttttttttttgagacaggctgtcactctgtcacccaggctggagtgcagtggtgtaatctcagctcactacagcctctgcctcccgggttcaagcaattctcatgcctcagcctcccagtagccgggattgcaggtgtgttccaccacacccacctaattttttttttttttttttgagacagagcctcactctgttacccgggttggagtgcagtggtgcaatatcggctcactgcaacctctgcctccaggcttcaagtgattctcctgcctcagcctcctgagtatctgggactacaggcatgtgccaccacgcccagctaatttttttgtatttttagtagagatgaggtttcaccatgttgaccagactggtcttgaactcctgacctcaggtgacctgcctgccttggcctcccaaagtgctgagattacgggcatgagccaccacacccagccctaatttttatatttttagtagagatggggttttgccatgttggccaggaattcttttttaaagttatgtatggccgggcacggtggctcacgcctataatcccatcattttgggagttcgaggcaggtggattgcttcaggtcaggagttcgaaaccagcctgaccaacatggtgaaaccttgtctttactaaaactacaaaaattagctgggcgtggtggagggcgcctgtaatcccagctacttgggaggctgaggcaggagaatcgcttgaacctgggaggcagagattacgccactgcactccagcctgggcaacaaagtgagacttcaaaaaaaaataaagaatgaataaagttacatactataattgcttctcagccttttggctaagatcaggtgtaaagttacatactattctattgtttaaatacataattttttaaacccagtatcttattaggtattttggttatttccaggttctacccaattaacaagtctgtagtaaatatccttatgaatatgtctccctaagagtgtatttctttaggatacattgtctggaagctgtattatgtatcaagggatttgtgtatttttaataggtattgcaaatttgccctcaaatagttgtaccaatgtatatacctacaaacttagtatgagaatacttgtttcctcaatattgggtattttcttttttttttttttttttgagatggagtttcactcttgtcactcaggctagagtgcaatggcacgatcttggctcattgcaacctccatctgctgggttgaactgatcctcctgcctcagcctcccaagtaactgggattacaggtgcccaacaccatgcccagctattttttttatttttagtagagacgggtttcaccatgttggccaggctggtctcgaactcctgacctcaggtgatccgcctgcctcagcctcccaaagtgctgggattataggcgtgagccactacgcccggccaatattggatattttcatctgtttaatctttgccactcttctaggtgccactcttcccagtctttggcccaatagactccgttcaaatgttggctttaccatttgctatctatttagttaacttctttgtgtctcaggttcctcacctataaaatagggatgatgatttttttttaaactattatatggctttctgtttgatagttgtcaaacagaagtttttaaaatttttatgtgatcagatttacattatctggctaatttcatggtttcttgtggttcacatttaaattttatttcatctgagccaggcacagtggctcacacctgtaatcccagcactttgggagcccaagacaggaggaatgattgatcccaggagttcaagacagcctgggcaacatggcaaagccccatctctacaaaaaaaaaatgtttttttttaattagctgggcatagtggtgcgtacctgtggtcctcgctactcgggaggctgaggtgggagaatcattagaacccaggaggataactagaacccaggagtttgaggctgcagtgagttgagatcgtgccactgcgctccagcctgggcaacagagcaagactctgtctcaaaaaaataataaaaataaataatttttttcccatcaggaacttacattaatataaaaataatgacagagttcagcttagttttttttccccagatatgtttataacagggaatctgcagtttggggttgggacaatcttagtttcttagggttttcttctactctagttcttcttgtatatttcagtgtgctaattctgctgtcattgcaaaagtgtcctgggtctttttaaaactctgagcagggatataattcagagataatttcgttacaagttctgttcttaatgtgaatttttttccctggcaggtatcccatgtataaccgattgtgtaatggctgaaattgagaaattggggcagaagtatcgagtggctctaaggtaggaaggaggtaaactagatctgttctagattggtatactgaagattcatctgtttgttgtttaaagatttcttggccagttagttgtgaaaatcatacaaaactatttatcatttttgggggggttgttttggtctttctctcacacaaaaatcagttccagttagagtgtctaaacttttaatagaaaatacagagaatatcttgtccgggctcggtggcctgtaatcccagcactttgggaggccgaggcaggcagatcacctgaggtcaggagtccgagaccagcctgaccaacatggagaaaccctatctcttctaaaaatacaaaattagccggctgtggtggcaggtgcctgtaatcccagctacttgggaggcttaagcaggagaatcgcttgaacctaggaggcggaggttgcagtgagcctacatcacgccattgcactccagcctgggcaacaagagcaaaactctgtctcaaaaaaaaaaaaaaagagaaaatacagagaatatcttaatgaaattgaatatttgtgtatagcaaaagatatcattaacaaagtaaacagacatacataatcaacaaagggcttattttcaaaatgcataaagaacttcacatctgtaagaaaaacataattcttaaattcacagtgagttgtcatttagtgcccattagattggcaaaaattttttaatgagcttgacaatgccaagaatagttaagaccatgaagcaatgggaattctcatactgaactactaagggtataaattggtcatcactttggagggcaacttgacaatatctggtaaaatccaggttgttcatactcttacaacacagtcttttaacctggagatcacattctacaggtaattaaattggtttaaaggatcacaatgcctggtgggtttggggggttttttgtgttttgttttgttctgtttttgaagcaaggtgttgctctgtcacccaggctggagtgcagtggcacaatcagggctcactgcagcctcgacctcctgggcttaagcagtcctcctgcctcagcaccctcaagtagctgggactacaggcatgcaacacctcacatggccagttttttaaaatttcagtagagatgaggtctcaccatgttgcccaggctagtcttgaactcctgggctcaagtgatcctcccaccttggcctctcaaagtgctgggattataggcatgagccaccacacccaacccccgagtatattttttagtgtaacagaagaaactataggctgggcacggtggctcatgcctgtaatcccaacaccttgggaggctgaggcaagtggattgtttcagcctaggatttccagtccagcctgggcatcatggtgaaaccctgtctccacaaaaagtaaaaaaattaaccaggtgtggtggcatacacctgtagtctcagctattcgggaggctgaggtgggaagattgcttgagcccaggaggcagaggtagcagtgagctgagatggtgccactgcactttagcctgggtgatagagtgagactctgtctcaaaaaaaaaagaaagaaattataaaatattagcatgaatatgtagaaaaaattgggtactgcttcacaaaacttttttcgctgttatatgtgtgtatatgtatatgtggtatatgtgtgcatactgtacgctagataaaatctatctcgtgctatgggttctggtaaaaaaaaaaagaaagaaaaagattgctatagagaagttcagctactattggagtcaagtattggcatcttcttatgtacgtaatagcaaaaaattgcagacagccagaagaaatggcttttcttaagccataaaggatggccaggcatggtggctcatgcctgtaatcccagaactttgggaggccgaggcaggcagatcatttgaggtcaggagtgatcctcaacatggtgaaaccctgtctctactaaaatatgaaaattagccaggcatggtggcgggtgcccatattcccagctactctggaggctgaggcaggagaatcatttgagcccaggaggcggaggtttcagtgagctgaggtcatgccactgtactccagcctgggctacaaagcaagaccctgtctccaaaaaaaaaaaaaaaaaaaaaaaaaaaaactgggtacagaagctcacgtataattcccaacacttcgtgaggccaagtggggaggatcgctggagcccaggagtttgagaccagcctggccaacataatgagaccctggctctacaaaactttaaaaatttgccgggcggccagccaggcgcagtggctcacgcctgtaatcccagcactttgggaggccgaggcgggtggatcacgaggtcaggagatcgagaccatcctggctaacacggtgaaaccctgtctctactaaaaatacaaaaaaattagccaagcgtggtagtgggcgcctggtagtcccagctgctggggaggctgaggcaggagaatagcatgaacccgggaggcggagcttgcagtgagccgagatcgcgccactgcactccagcctgggtgacagagcgagactccatctcaaaaaaaaaaaaaagaaaattagccaggcatggtggcttgtgcctctacggagttcaaggttgcagtgagctatgatcacaccactccactccagccccaaaaacaaagtgagaccttgtctctttaaaaaagaaagaaaagaatagataagctgtggaatgctcatgaataaaatactatacaagagtgaagatgagtgaactagagttatgcgccaatgtggataaatctcaaaaacaatataaactataaaaaaaaaacaacagcagtcaggcactgtggctcactcctgtaatcccagcagtattgggagcccgaagcaggaggattccttgagcccaggagtttgagaccagcctgggcaacatagtgagacccaatgtctatgaaacattttaaaattagccaggcatggtggcatgtacttgtattcccagctacttgggaggctgaggtaggaggattgcttgagccagggaggttcgagatcataccactgcattctagcctgggagacagcgagaccctgtctcaaaaaaaaagaaaaagaacaatgctgagcactgttaacgcacatctgtagttccagttacttgggaggctgaggcagaaggatcacctgagcctaggagtttcaagccagcctggacaacaagacccccatctctttttttttttttttattatactttaagttttagggtacatgtgcacaatgtgcaggttagttacatatgtatacatgtgccatgctggtgcgctgcacccactaactcgtcatctagcattaggtatatctcgcaatgctatccctccctcctccccccaccccacaacaggccccagagtgtgatgttccccttcctgtgtccatgtgttctcattgttcagttcccacctatgagtgagaatatgcggtgtttggttttttgttcttgtgatagtttactgagaatgatgatttccaatttcatccatgtccctacaaaggacgtgaactcatcattttttatggctgcatagtattccatggtgtatatgtgccacattttcttaatccagtctatcattgttggacatttgggttggttccaagtctttactattgtgaataatgccacaataaacatacatgtgcatgtgcctttatagcagcatgatttatagtcctttgggtatatatccagtaatgggatggctgggtcaaatggtatttctagttctagatccctgaggaatcaccacactgacttccacaatggttgaactagtttacagtcctgccaacagtgtaaaagtgttcctatttctccacatcctctccagcacctgttgtttcctgactttttaatgattgccattctaactggtgtgagatggtatctcattgtggttttgatttgcatttctctgatggccagtgatggtgagcattttttcatgtgttttttggctgcataaatgtcttcttttgagtagtgtctgttcatgtccttcgcccactttttgatggggttgtttgtttttttcttgtaaatttgtttgagttcattgtagattctgaatattagccctttgtcagatgagtaggttgcgaaaattttctcccattttgtaggttgcctgttcactctgatggtagtttcttttgctgtgcagaagctcttgagtttaattagatcccatttgtcaattttggcttttgttgccattgcttttggtgttttagacatgaagtccttgcccatgcctatgtcctgaatggtaaagcctaggttttcttttagggtttttatggttttaggtctaacgtttaagtctttaatccatcttgaattgatttttgtataaagtgtaagaaagggatccagtttcagctttctacatatggctagccagttttcccagcaccatttattaaatagggaatcctttccccattgcttttctcaggtttgtcaaagatcagatagttgtagatatgcggcgttatttctgagggctctgttccgtttcattgatctatatttctgttttggtaccagtaccatgctgttttggttactgtagccttgtagtatagtttgaagtcaggtagtgtgatgcctccagctttgttcttttggcttaggattgacttggcgatgtgggctcttttttggctccatatgaactttaaagtagttttttccaattatgtgaagaaagtcattggtagcttgatggggatggtattgaatctataaattaccttgggcagtatggccattttcacgatattgattcttcctatccatgagcatggaatgttcttccatttgtttgtgtcctcttttatttcattgagcagtggtttgtaattctccttgaagaggtccttcacatcccttgtaagttggattcctaggtattttattctctttgaagcaattgtgaatgggagttcactcatgatttggctctctgtttgtctgttgttggtgtataagaatgcttgtgattttttacattgattttgtatcctgagactttgctgaagttgcttatcagcttaaggagattttgggctgagacaatggggttttctagatatacaatcatgtcgtctgcaaacggacaatttgacttcctcttttcctaattgaataccctttatttccttctcctgcctaattgccctggccagaacttccaacactatgttgaataggagtggtgagagagggcatccctgtcttgtgccagttttcaaagggaatgctgccagtttttgcccattcagtatgatattggctatgggtttgtcatagatagctcttattattttgaaatacgtcccatcaatacctaatttattgagagtttttagcatgaagcgatgttgacttttgccaaaggccttttctgcatctattgagataatcatgtggtttttgtctttggttctgtttatatgctggattacatttattgatttgcatatattgaaccagccttgcatcccagggatgaagcccacttgatcatggtggataagctttttgatgtgctgctggatttgattttcccgtattttattgaggatttttgcatcagtgttcatcaaggatattggtctaaaattctcttttttggttgtgtctctgcccggctttggtatcaggatgatgctggcctcataaaatgagttagggagtattccctctttttctgttgattggaatagtttcagaaggaatggtaccagttcctccttgtacctgtggtagaattcggctgtgaatccatctggtcctggactctttttggttggtaagctattgattattgccacaatttcagctcctgttattggtctattcagagattcaacttcttcctggtttagtcttgggagagtgtatgtgtcgaggaatttatccatttcttctagattttctagtttatttgcgtagaggtgtttgtagtattctctgatggtagtttgtatttctgtgggatcggtgatgatatcccctttatcattttttattgcgtctatttgattcttctgtctttttttctttattagtcttggtagcggtttatcagttttgttgatcgtttcaaaaaaccagctcctggattcattaattttttgaagggttttttgtgtctctatttccttcagtcctgctctgattttagttatttcttgacttctgctagcttttgaatgcgtttgctcttgtttttctagttcttttaattgtgatgttagggtgtcaattttcgatctttcctgctttctcttgtgggcatttagtgctataaatttccctctacacactgctttgaatgcgtcccagagattctggtatgttgtgtctttgttctcgttggtttcaaagaacatatttatttctgccttcatttcgttatgtacccagtagtcattcaggagcaggttgttcagtttccatgtagttgtgcggttttgagtgagattcttaatcctgagttctagtttgattgcactgtggtctgagagacagtttgttataatttctgttcttttatatttgctgaggagagctttacttccaagtatgtggtcaattttggaataggtgtggtgtggtgctgaaaaaaatgtatattctgttgatttggggtggagagttctgtagatgtctatgaaaaagcaagaacatatgtggagtataccatttatctaaagtctaaaaacatgcaaaccaatactgcattgtttatagatatgtgtatatgctttttttttttttttttttttttaaagacagattctcactctgtcgcccaggctggagtgcagtgatgctatcacagctcactgcagccttgacctctccggctcaagtgatcctcctgctttggcctcccaagtagctgggactacaggtgcataccactatgcatgtctgattattttttttcttttgcatggctaattttaaaaaaaaatttttttggtagagactgggcatggtggttcacgtctgtaatcctggcacttaggaaggctgtggcgggcagatcacctgaggctaggagttcaagaccagtctgaccaatgtggtgaaacctcatctctgctaaaaatacaaaaattagctgggggtggtggcaggcacctataatcccagctactagggatgctgaggcaggagaattgcttgaggctgggaggcagaggctgcaatgagccaagatcatgccactgcatccagcctaggcaacagagcaagactccatctcaaaaaggctgggtgcagtggctaacgcctgtaatcctagcactttgggaggctgaggtaggcagatcatctgaggtcgggagttctagaccagcctggctaacatggtgaaaccccgtctctcctaaaaatacaaaattagctgggcatggtggcgcatgcctgtaatcccagctactcaggaggctgaagcaggagaatcgcttgaacccgggagcagaggttgcagtgagctgggattgtgccaatgcactccagtctgggtgacagaatgagaccccatctccaaaaaaaaaaaaaatttagtagagatagggtctcactatgttgcccagctggtctcaaactcctggcctcaagtgatcttcctgctttggcctcctaaagtgctgggattgtagtcatgatcctccacacccagcctggtaatttttaaaacaataaaaataaagaatgagaggggaaaaaatagaggcaccaagtggaaacactaagtttggctgtcaagagatgcagaaatggggtgttagctggaggggggtataggtaaaaagatttttttgtcttaaggcagagaatatatgacagcatgttagtatgtttctaggaaagagctagtagagaggagacaagtgatttcaggagtaaagagataactgaaagagcatagtcctagactgttgcccacctagtttgtcagcaaccagtccatcctccctctagtgtatcctccccagcacagcctgcttagtttttccaagacagagctttgttcttatcactttgtcccccagaaatctttaatgactcctcattacctgtgtcatcacactcgtcagcctggcattggagactctttctagccccatttcattcttctctccacaaacactctgcccccagccagaaagatgtgtttactcttccccaaataccaagaaaccattttacagttggctggtgtcctatttggtaccctcacattgcttggcacattctttaatcttatttcaccccatgtcatttttttctaaatattcccaacccacattgacctagcgctgaactactgcaatatggaggagtatttgtgttgcacttggtacatatgtgctgtcttgtatttttcttcatttcagtgactcatcatcactgttaatagaaagagcatggctctcagaatcacacagagttggggtttttctttttcaaatatgtatgaaaataatacatgtttgagtgttttatggcaaacaatacaagcatatacatatagtaaaaggtaaaagtctgcctctacattcatactttgtccattctcataccccaagagtgacaactgacaaaggttaatatattttttcagacctttttctgtgcaaatgcaaatctaaataaagagtattggaaagaaggatttgtattttattaattaaatcatattatatatatatatatgcatatgccctgctttgtttattcaacagtttagtgtaggtccttccacattggtacgtacagctctacctcactttttattaataggataagggcaccaaaatgggtttaacttttacctttctaaaggatatttttattttcttcacttactataaactgtgttgagtgatcatccttctgcctatattcttgttcattgtgtttaagacaacttcttaaaagtgaaatggttaggttaaaatgggttttgtttttgaatcctggcttttcccagctgtatagctttgaatgaagtaatttaatctctctaagcctacttcctcatctgtagaatagatatataataactcaaagttttgtaatgattaaatgacccaaagcacactagctgtcagccttcattccctgccccgtgaattgtctttccagttagaggataaagttcaggaggagaacagtgccttaaaatctctgcatagatcatgttacttttattgcattaattaagactcagaaagttatccagctgattgaatgttttctttaatccacctacaggattgccaaggatccaagatttgaacgattaccatgtacacacaaaggaacctatgcagatgactgcttagtacagagagtaactcaggtattatcagttcataactgtttactttgtgcttaaaaaaaaaaaatgtaaactattatctcctgaatgttcatggtcagtaaaacatctaggaatatacattatggttaaattaaaaaaaaattgcatagcattccttcataagaagcataggtgtcttcatttacttgagaaagtggattgaaaatgtacactctaaccataatggaaagagcacaggcttggggaggagacatgggtttcacgtctcagcacctgcatttactggctgtgtgatttgggacatttaactgattctttatctcacaaatctctgtaaaatgattttaagtgagttaatgtagaacccatttatttttgatgtaggaattttgttcctcttcacgatgcctaatccaaaagtgcttcttagttaaatctgagagtctcccaagatgctgtttcacacataccctagaataagtaggtttttaattccttcattaagcaccacaaggacttctgctactgagtgcttttataagggcctctctgctgatgataatcttcatctgctctgctgaccacagagccatccttttagccacttcaccccatggggcgggtgggtggggccagtatttcccacagcacagctgacaccactctgccactttttataaaactcagtaggagagtcagacgtgacagatgtgaagcttcctataaaatagctttcacctgacagctaaatattactgcttttataactgctaggctctagtttcaggccctgaatatcctacttaggcttcctgtttcggggatagcttacctctaacatcagtaggcccagagcacacccaagccccaagatctagggaaaggagggagctatggcctccaaattaaggcactttttatctccatggagttcctcggagcattttcccaaaactaaagaattgtctgccccaagtgtgaaagtccctttcatttatgagcagaaaacagtttgcagcttgtgaaaagttttctaccttctcctcctcaagattctaaatgctgcattcagcccaggcaacttgtttattttatataacaagattaggagctcctagatcatagtaggtactcaacaaattgttatagcctgcccttcgctacttactgtgaaaatgaacgattctcagactggtcagtcgttgtgccattatccagtattcactaagcgtgctcagtgacctcagtgtgaacatcactccatgtctcttacagcataagtgttacattgtggccacagttgaccgggacctgaaaagaagaatccgtaagattcctggagttcctatcatgtacatttctaaccataggtgagaaatttcccttggagaagggaatagaaatatataattgatatcaattgaaaatgaggataagtgataaggttataaaggatttgaaagaaattattgtatcaaatgtttacatagttatatttgaagaaatgagacaaagcaagagcaagagcaaaagagagagataggatttaaggaatgaggcaaacatttaaattgttagagtaagattactggaagaaatagacgtattgttttaaataaaagcagtaatttaaatcaagctaatctttttggccagaaatacctgttttgaaagatttttttttattaacacttcatctgagaaatggaaagcttatttaaaaaaaaaaaaagctgttatccttcttggctattttttgtcagtactcagacttattttccagcttttcagcttgaggagagcacaatgtggtgggaagtctgtggactaagaagttggacttactgatctcagctcctcagttcccctcttgctgactttgtgactttgaaaaaacaatcatattgtattatagtcagcattttgctgtaaatcattcattatgatgttcccctaaattgtttccactgacaaaaaggattcacagtgggggtgagagtattgcagtctataaaggatgggtttttagatgggttctcttcccatctttcttaccggtgttgattttttgtcctgatcagatacaacattgaacggatgccagatgattatggagcccctcgattctaattcttacaagacacagttcctctgcctttcttcgaccaactttctcttgttgccagttcattacacaaaatgtagcgggatttttaaggaatcagagagactgatggagttcagggagatatttattatttaggtgcaccagcccagtcagattaacatccaaaggactgaaccctgaacagagttaagttaccttttaagcattttgtggggccgcgggggttggggggaatctgtgcagggggaagcatattacagaagcaagaaagacagttattcaattaactgagacatgcattacatcatttcttacttttcaaggaaaatcatgttttacgacttgagtttatctgtctagttaccttgcagctgcacagctagagaaacagggtatttacaatgcctgggaaaggaggagagataaggctcactagccacagaaaaacaggcagttaatttttaaaggactccagctctttctctttctcacggggaattggattttcttacatgcaactgaatttctgcttacacatttttaaatttcttttaattgcttttccaatgcaatagcatgaattattattctgttgacctatttgccttactatgagctgagggtagttcaatatgctcactcttttttttttttttcttgagatgaagttttgctctgtcaccaggctggagtgcagtggcgtgatctgggctcactgcaacccctgcctcccatccttcaagtgattctcctgcctcagcctcccgagtagctgggattacaggtacacaccaccatgctcaactaatttttcttttttgggcggggggggtggatatttttagtagagacaaatacttttgtatttttaatacagaaaagtatgcctcggcctcccaaagtgctggaattacagacatgagccactgtgcctggcctgctcactttctgatgctgcttttttgttgtttgtttgtttatttgtttgttttgagacggagtctcgctctgtcaccaggctggagtgcagtggcgcaatctcggctcattgcaacctccgcctcccaggttcaagcgattctcctgcctcagcctgcggagtagctgggactataggtgcgtgccaccacgtccagccactgatgctgttttgccactgatgctgttttgaaattgatattttgtctcataaaaactaggccaggcatggtggctcattcctgtaatcccagcactttgggaggccaaggtgggtggatcacctgaggtcaggagttggagatgagcctggacaacatggcaaaaccccacctctactaaaaatacaaaaaaaattagctgggtatggtgtcacgtgcctgtaatcccagccactggggaggctgaggcaggagaacctcttgaacccaggaggtggaggttgcagtgagctgagattgcgccactgcattccagcctgggtgacagagtgagactgtctcaaaaaaaaaaaaaaattaatgatggtcaaagggtataaaatctcagacaggaagaatatgttttatgctttttttgagttctgttgtacagtgtggtgcctatacttaataatggggtattatacatttcaaaattgatgttctcatcacagaaatgtatttgaagtattgcatatgttaactagcttgatttaactattccatattgtatccacaatttatgatatcactttgtaacccatacatttatacaattataaattgtcaatttacaataaaaaatttttgttgcgtctttttagaaatcagatattctgatgattgctcacataatttggcggtcattgttttatactgacttactcaataaacatttattaaatgtatactaggtgcttaataagagatggtcctgccctcaagacactcattatggtgggaaagaaaaacatgtaaatgaataaatgccgtaaaatagcagtgctagggtaaaagtttcagaggcatgtcatgggcacataaaggtggaatgatttttttctactggttgggatggagagggaggaaaggccagtggtcatgtggtttgagctaatcttaaaaatgaataggtgcctccccagtaaattaggaatggaagatgaagcataggaaacagtacaccatagaaaatccattaacctatgtataatcccagcactttgggagactgaggtgggcagatcacttgaggtcaggagtttgaaaccagcctggccaacatggtgaaaccccacctctactaaaaattccaaaattaactgggcgtggtggtgcaagcctgtagtcccagctacttgggaggctgaggcaggagaatcgcttgaacccgggaggcagaggttgcaacgagccgagatcacgccactgcactccagcctgggcgacagagtgaaactctgtctcaaaaacaaacaaacaaaaaacctatgtatttgtggggatttggtatattattaaggtggtatttcgtttctgtgggaaaaggaaatttcattaacaggccaaatagtctggagtcattctgttagtgttagaatactaattccaccagttaatatctgtatgagttggacaaaccatataaccatctgttgccttccttgtttcctctttaaagtgtttaatccgcaaaacaaacctgataaagtgagattaaattgaatagtacctggcccaagtaagtgttcttcagtaaatgttagtgattattacacaatggcaaggtggctatccatttgaaaaaaaattaggccgggcgtggtggctcacacctgtaatcccaacactttgggaggccaaggtgggcggatcacctgaggtcaggagcccaagaccagcctgaccaacatggagaaaccccatctctactaaaaatacaaaaaaacaattaggcaggcatggtggcaaatgcctgtattcccagctactctggaggctgaggcaggagaacgcttgaacctgggagatggaggttgtgatgagccgagatcatgccattgcactcattccagcctgggcaacaagagtgaaactctgtctcaaaaaaaaaaaaaaaaaaagagagagagaaaaaaattagtttcctacttcacatgattcataaaaatatttcaagtggatcaaagacctaaattttttttttttttgagacagtttctcactctgtcacccaggctgcagtgcgttggcacaatcatgactcactgcagccttgaccttcccaggccctgatgatccaccccagcctctcaagtagctgggatttttgtatttcttacagagatgggattttgccttattgcccaccttggccttctaaagtattgggattatgggcatgagccactgcacccaccctaaacttatttctaagctatggaagcattaggaaaataaatgtaaagaaaaacgtgtttatcacctttggatagaattcttaagcagaatctaaaaagattgaagagtttgaatatattaaaattatagatttctgtgcaagacactcccctcccctaaaaaacaagtgactgatgagattttccaatacatgtaacaagggtttagagaaatgagtactgatgtcatgctgacagaagtgcaaatatttatggccattttttacagctgttgacaagatccactaaaataaaaattgcagatatcctgtgagcccaattctatttttttggtaactttatagtatcatacaggtgattcactttaaaatacctctgcatggacaacgtgatatgtatgcgaagaaacattcacatgtgtacaaggaagcaggtagaaggatgtttactgcactgctgcttataaaagagaaaaaacaaactaaatgtccatcaaaaggatcttaactgtggccgggcatggtgactcacacctgtaatcctagcactttggaaggctgaggtgggtggattgcctgacctcaggagttcaagaccaccctgggcaacatggcgaaaacctgtctctactaaaataaaaaaattagctgagtgtggtggtgcgcacctgtagtcccagctactcaggaggctgaggcacaagaattgcttgaacccaggagacagaggttgcggtgagctgagatcacgccactgcactccagcctggcgacagagcgcgactccgtctcaaaaaaaaaaaaaaaaaaaaagcggtggggggtcttaactatggaatgtcatgaacatctatctacaaaaaatgaggtaggtttaaaatgggcaaaggacttaaacatttctccaaagaagatatacacgtggccaagaaacatgcaaaaagatggtcaatatcactaatcattagggaaatgcaaattaaaaccacaatgatatactacctcacaccccttagccactattaaaagaaagaagcaatagttattaaaaagtatttgtgaggatatgtagaaattgtaacccttagctgtgcactgcacatgcccatagttccagctactctgaaggctgaggtgagaggcctgagcccaggaattcgaggctgcagtgagctatgattgcgccattggactccagcctgggcaacagagcaagacaccgtctctaaaagaagcaaatcagaacccttgtgcgctgttcctggaaatgtaaaatggtatagccacaaagaatatggcagttcctcaaaaagttaaaaatgaaattatcacatgattccagcaattccacttcttgacatgtattcaaaagaatcaaagatcttagagtatttgcccacccatattcatcacggcattatttacaatagccaagaggtggaagcaacccaagtgtccatcagcagacgaatagatcaacaaaatgtgctctctacatacaacagaatatgagtcacccttacaaaggaaagaaattctgacacatgctgtaacatcgatgaaccttgaagccattgtgctaagtgaaataagccagtcacaaaaagacaaatactgtgtgattccgcttatatgaggtatctagagtagtcaaattcacagagatggaaagtagtgtagtggttgccagtggctgtggggattggggaatagacagtttaatgggtatggagtttcagttttgcaagatgaagagttctggagattggttgtacgacagtatgaatgtactaaagccactgaactgtatgctttaaaatggttaagatggccgggcagggtggctcatgcctgcaatcccagcactttgggaggccggggcaggtggatcacctgaggtcaggagttcaagaccagcctggtcaacatggcaaaacccggtatctactaaaaatacaaaaaaaatagctgggtgtggcagcacgcacctataatcccagctactcaggaggctgaggcaggagaatcacttgaacttgggaggcggaggttgcagtgagccgagactgtgctccagcctgggtgacagagaagaactctgtctcaaaataaataaaataaaataaaatggttaagatggtaaattttctgttatgtgtcttttaccgtaattaatataaatgagattgagctatatcacttaaatggaaataactatgacctattattaagagaaactaaattatagaacaggtacagtgtgatattggttttaagttttaatatcacaaatatttaattgtttatttagaaatatacagtatatatataaatggatagaaaaagttctgaagataaagctttctcttccgtctcttcactggtacagaattccttaaataaattaatgtcaggctggacgcagtggctcatgcctgtaatcccagcactttgggaggccgaggcaggtgaatcgcctcagctcaagagttcgagaccaccctgggcaacatggtgaaaccccatctctactaaaatacaataaagtagccaggtgtggtagcactcacctgtagtcccagctactcaggaggctgaggcatgagagtcgcttgagcccaggaggaagaggttgcaatgagctgagatcacgccactgcactccagcttgggctacagagtgagactctgtctcaaaagaaaaaaaaaagttataggactggattgtggctcactcctcttgctgccataatatgagtggaatcatcctggataggccaattataatatccttattccattgccattgtgattatttcaaacctggatatcaaagacaagccaattagttgtaaccagagctttcactggagagttacgctctttttctatgggagaactgttaaaagctttaaatacaagctttaaaattgagagaccatatttactaacacattggaagtgcctacctgggttttactttacatagccaaacccaatcataattaatatcgaatgtatgtctcctaaaccaagagagaaaacagaaagaaattcaattaattaaaaaaaaagcagaatttgtcaaaatgtatggaactgcaccattggtgaactgtatgtttcattatgtgtaaattttttaaaaaactaaaaggaaaaataaatgtagaagaggagagggaagaagcagcaacggtaaatacaaaacaaagtaagataagggccgggcatggtggctcatgcctgtaatcccagcactttgggaggccgaggcaggccgatcacaaggtcaggagatcgagaccatcctggctaacatcctggctaaaaccccatctctaccaaaaaaatacaaaaaagtgagctgggcgtggtggcgggtgcctgtagtcccagctactcagaaggctgaggcaggagaatggcgtgaacccgggacggggagcttgcagtgagccgagatcgcaccactgcactccagtctgggtgacagagcgaaactccatctcaaaaaaaaaaaaaagtaagatggtgggaataagactagacatgcagtagtcatgatgaatgtgactgggttaaatagcctcattaaaagacagatgctcagatttgatttttttttttttaatcttgtggctgtgtgttatttacagacatagctagaacagaatggcacaggacagctggaaataaagggaaaaataaatttaccatacaactcaacaattccactcctaggtatctacccaagagaaggaaaatacatgtccatacaaagacttggatacaaatgctcatattttttttaaatttcttttttttgagacagagtctcgctctgtcaccaggctggagtgcagtggtgcgttctcggctcactgcagcctctgcctcccaggctcaagtgattctcctgcttcagcctcctgagagctgggattacaggcacgtgccaccacacccggctaattttttgtatttttagtagagatggggtttcaccatgttagccaggatggtctcgatctccggacctcgtgatccacctgcctcggcctcccaaagtgctgggattataggcatgagccaccgcacccagctgctcatattatttttcttcataataaaaagtggaaacaaaccaagcaaccataaacacagtggtccccaacgtttttggcaccagggactgtggaagacagtttttccacagatggcagtggggcatgatttctggatgattcaagcacatcacatttattgtgcactttattattattacattgtaatatataatgaaataattatacaactcaccataatgtagaatcagtgggagccctgagtttgttttcctgtaactagacagtcccatctggggttgatgggagacagggacagatcatcaggcattagcttctcataaggagcacacaacctagatcccttacatgtgcagttcacattaaggttcatactcctatgagactctaacaccgctgctgatctgacaggagctcaggcggtaatgtgagtgatgggtagtggccgtaaatacagatgaagcttcacttacctgcccgccattcatctcctgctgtgtggtccagttcctaacaggccatgggccactagtgattcatggcccatgggttgggcacccctgcataaccagataaatggataaacaaaatgtggttcattcacacagtggaatactgttcagcaatgaaaggtataaaccactgatagaacaacatacatgaatcacaaaatcaagtgaagcaaaagaagccagatacaaaatatacagatggtgcctgacttaggatggtttgacttaggatttttgactttacaatgggtttactaggatattacatgcattttcagcttacaatatttcaatttacacaagatttattggggctgggcatggtgggttcatgcctgtaatctggcactttgggaggccaaggcaggaggatcacttatgcccaggagtttgagactagcctgggcaacatagggagaccccatctctataaaaaataaaataaaaagaaggtttattgggatgtagctccaacataagtcaagaagcatctacacactgtatgattccatttacatgaaactctagaaaagacaaatctaatctataatgataaaaagtaaatcgttatggtattaggggtgtccatgaaaaaaaagaaaaagaaaagaagaaagtaaacattgttcacctgaggttggaggtagggtattggctggatacaggcacaatggaattagtggggaggggaattcattgtttctaaaaattatctattttgattgttgtgatgattgcttgatgtattgattcgtcaaatcaaaatgcacacaaaatgatggcattttattgtgtgtaaattatgcttcattaattaaaagatggaaaaggacacgcaaaagaaaaaataggccaggtacagtggctcattactataatcccaacactttgggaggctgagtgggcggatcacttgagcctcggagtttcagaccagcctgggcaacatggtgaaactctgtctctacaaaaaatttaaaaatttgctgggtgtggtggtgcaattgtgtagtcccagctactagggaggctgaggcagaaagatcgcttgagccaaggaggtcgaggctacagtgagctgtgatcgcgccactaaactccaacctgaacaacagagtgagaccctgtctcaaaaaaagaagaaaaaaaagaaaaaagaaaaaatggaaaaagaatatgctgtttgaatatgcaagatggaaaatattgaggttttctttgtgggctaacacatggaaaatgtcatgaaagtacaatgtacacttgaaaaggaggtgcactctctgttatgtaggtttaatatttatccataagatctacccaattatttcggtcttctgtatgcttatactttttttttttgagacggagtttcactttttttttttttttttttttttgagacggagtctcgctctgtggcccaggcgggagtgcagtggcgctatctcggctcgctgcaagctccgcctcctgggttcacgccattctcctgcctcagcctcccgagtagctgggactacaggcgcccgtcatcacgcccggctaatttttttgtgtttttagtagagacggggtttcaccgtgttagccaggatggtctcgatctcctgacctcgtgatctgcccgcctcagcctcccaaagtgctgggattacaggcgtgagccaccgcgcccggccttgagacggagtttcgctcttattgcccaggctgcagtgcaatcgcgtgattttggctcactgcaacctgcgccacccaggttcaagtgattcttctgcttcagcctcccaagtagctgggattacaggcatgcaccaccatgcccggctaattttgtgtttttagtagagatggtgttttgccatgttggcgaagctggttttgaacccctgacctcaggtgatccacccacctcagcctcccaaagtgctgggattacaggtgtgagccacccatgcccagcctatgcttatactttttatttttgactctttcagaagtcaaaagcagaaaaatacattagagtgtcctaaaactcgtgcttttttttttttttttttttttgaggcaaagtcttgccctgtcacccaggctggaatgcaatggcacaatctcagctcactgcaacctccgcctcctggattcaagcgattctcctgccttagcctctcaagtagctaggattacaggcgtgcgccaccatgcctggctaattttttgtatctttagtggagacggggtttcaccatgttgaccaggctggtctcgaactcctgatctcgtgatctgcccacagcctcccaaagtgctgggattacaggtgtgagccaccacacccagcttttttttttttttttaactacttagtgtttccacttcatgaaagtcgctactgtattgttttgtgcatggatactcataactgatatagttcttcctaattgtagcctttggcattgtgttagtccgttttcatgctggtgataaagacgtatcagagagtgggtaatttataaacaaaaggaggtttaatggactcactgttccatatggctggggaggcctcacaatcatatgatgcaaagtgaaaggcatgtcttacatggtggcagaggagagaataagagcgaagtgaaaaggaaaactccttataaaaccatcagatctaatcccagcactttgggaggctgaggcgggcagatcacaaggtcaggagatcaagaccatcctggctaacacagtgaaaccccgtctctactaaaaatacaaaaaattagctggacgtggtggcaggcgcctgtagtcccagcttcttgggaggctgaggcagaagaatggcatgaacctgggaggtggagcttgcagtgagcctagatcgtgccaccgcactccagcctgggtgacagagcgagactccatctcaaaaaaaaaaaaaaccaaaaaccaaaaaaccatcagatctcgtgagacttattcactaccatgagaacagtatgggggaaattgccctcatgatttaatgaactctcaccgggtctctcccacaacacatgggaattatgggagctaaactcaggatgagatttgggtggggacacagtcaaaccatatcaggcattataatatatccttttgccttatttaatgatttttggcctaaattctactttttctgatgttaagaacaggacttaaatgctttctttttctacttctttttgtattgcatttaccttatatattttgtccatcttttgatttttaccttttctaaattcattatccccaaagtagggtgctccagactagtcactgctgtgtgtcctttgttttctttttctattcttttttttttttttttttttgagacagagtctcgctttgtcaccaggctaaataaagtgcagtggcgcgatctcagctcactgcatcctttgcctcccaggttcaagggattctcctgcctcagcctcctgagtagctgggattacaggcacgcgtcaacacacccagctaatttttatatttttagtagagatgaggtttcaccatgttggccaggatggtcttgatatcctgacctcgtaatccacctgccttggcttcccaaagtattgggattacaggcgtgagccactgcccctgactgctttttttttttttttttttttaagagaaatctccctctgtcacccaggctggagtgcagtggggtgatcttggctcactgcagcctctgcctcttgggttcaagcgattctcctgcctcagcctctggagtagctgggactataggcatgcaccaccacacctggctaatttttgtatttttttagtagagtcagggttttgccatgctgcccaggctggtttcgaactcctgacctcaagtgatcctcccgcctcagccccccaaagtgctgggattacaggcatgagccaccagacccagctttttttcttttttaaaacgggagtgttcactgtggatgttctgttcctattccgccattgtatatgtggtgtttaaaggcagattatttgtccttttgtcgcataggtctctagatcaagtgaagccacacctcctgagatagaaactactacatataccccttgcttgcatcacctacatatacctctactctgcatcacctagatgtggtggtccttgagcatgatgacattactggacaggactttaagattgtctctgtgggtgagggaattgtgtatactttgcctgtgattgggaaagtgagttcaacatttggtaaacagaagggtagagtgtagcaacggcttgtgctggtcaccaagtattctggctctctgttttacggaccaaggtagcattgctcttccccaccacctttaaagtcagatgtggcaaagcgacttgctttggccaatgcaatgtgagtgaagatgacatgtatcatttcttgacagaagctttaagtcattgtgtgattagctgtgccccctttgccctgtgttggtaatcatgaaagcctggaaatggaaactgacttggcctgggtcccacagaacatctcagccagttcatggtggtgacattagggtgaacaataagtaagcatttcttgttttaagccattgatatttgggttgttgtttgtttgtttgcttttattactgcagcatgaccttggcctataccaactgataaagtatatgttaaaaagttggagttgaagcaattagaaaagaaaaagaaataaaagatatccaaattggaaaggaagtaaaatgatctctattcacagatgatatgatcttacatatcaaaatccctaaagaattcacaaaacactgttacaatgaataaatgatttcagcaaagtttcaggatacaaaatcaacacacaaaaatcagtagcattttatatagtaataatcacatgactgatctgaaaaagaaattaaggaaccaatcccatttgctatgcatcaaaaaggataaaatacttagcagtaaaactaaccaaagaggtgacagacttgtacactgaaaattatagaacattgctaaaagaaatttttttaaaaagatacaaaaatatagaaagacatcccacactcatggattagaagaccccatatcattaaaatgtctatactacccaaagcgatctacagattcaatgtaatccttatgaaaatcccaatggcaggtggggcgtggtggctcacgcctgtaatcccagcactttgggaggccaaggcgggcagatcactaggtcaggagttcaagaccagcctgaccaacatggtgacaccccatctctactaaaaaatacaaaaattacccaggcatggtggtgcactcctgtagtcccagctacttgggaggctgaggcaggagaattgcttgaacctgggagatggaggttgcagtgagccaagatcatgccactgcatcccagcctgggcaacagggcaagactccatctcagaaaaagaaaggaaaaagaaaaaaacaaaagaaaatcccaatggcactttttgcggaaatagaaaaagccatcctaaaattcatacaaaatctcaagggaccccatatagccaaaaaaaaaaaaatcttgaaaaagaagactgaagttggaggtctcacaatttctgattgcgtactacaaagcagcagtaatcaagaaagcatggaactggcataaagacagatatgtagaccaatagaatagaatagagagcccagaagtaaacccttggatatttggccaaatgatttttaacaagggtaatgctggagaaaggtcactctctttgacaaattctgttgagaaagttggatgtccacatgcaaaataatgaagttggaccttacaccatatacaaaaattaactcaaaatggattaaaaacctaaatataaggactaaaactataaaactcctagattaagctgggcatggtggctcacgcctgtaatcacagcacttttggaggccaaggcaagcagatcacctgaggtcgggagttcgagaccagcctgaccaacatgttgaaaccccatctctactaaaagtacaaaattagctgggtgtggtggctcgtgcctgtaatcccagctactcgggaggctgaggcaggagaattgcttgaacctgggaggtggaggttgcagtgagccgagattgcaccattgcactccagcctgggcaacaagagcaaaactgtgtctcaaaaaaaacccagaaatttattttttcacagttctggagtgtaaggaaagtccaagatgaaggcactggcatctggtgagggccttcttgctgtgtcctcacatggcaaacaaatgacaagctagtcaaaggctgcataaagcttcttttgtaagggccttaatcctgttaatgagggaggagccctactggcctaatcacctcttaaagatctcacctcttggccaggtgctgtggctcattcctgtaatcccagtattttgggaggccaaagcggatggatcatctgaggtcaggagttcaagaccagcctggccaacatgttgaaaccccatttctactaaaaatacaaaaaaattagctgggcatggtagcgcatgcctgtaatcccagctactcacgaggttaaggctggaggattgcttaaatccgggaggcagaggttgcagtgagccgagatgatgccactacactcaagcctgagcaacaacagtgaaactccctctcaaaaaaaaaaaaaaacaaatgccacctcttaatactattatagtgacatcatgtagattttggaggagacacattcaaatcatagcagatggtaaatttaatattatcttttttaaaaaaaacacaaagtaaatatggatatgtagatcaaagcaatgcacagtgggaaatgaaagtttaattatcaaaggaactgttgatcagaacatcatatccatttaaggttgttttattggtttttgttttgttttgttttgttttgtttttgttttttttaggcagggtctggctctgtcacccagactggagtgcagtggcatgatctcagctcactgcaacttctgcctccttggctcaagccatccttccatctcagcctcccaggtatctgggacaccacatccagctaatttttgtatttactgtagagatggggtttcgccatgttgcgtaggttggtctcaaacttctgagctcaagcgatcacccacctcagcccccgaaagtactgggattacaggcgtgagccaccgtggcttgcctaagctttattttaaaggctgttttcaatattatttgaagattgggcagtacatgatgcaatcaaacaaaacacaggtttcaggtatgtataaatacttatgctttatttcatatataatgctgtgtgttccttgacacacacagttctatgtattccaagtggtcactgtagtttatcacaggaaaatgttaatgccctagaaattttcatctgaggtatctaagcccataataggtcatcattaaatagtctctgaattattgttgtgtattatatattgtgtgtattttgtgtattatatattgtgtattataagttacaccacaaatactacaatatgttcgctcactctggaaattaaaaagtgggagatacactttaataagtataatggattgacccatagatgactttatattacataaactacttaagacatattctttgtgctgctttttctaaaatagaatatgttaatataaacatatttgaaattcaaaaagcttggcctgtgtctgttttgtttctcagtgcaatttctgttatcaatgtgcttataagtaataatttattaatactactaataaaaaattaacatgattgagaggaaaaaaatctggattaattagctaaagaaataaagcaacccaggagagggaaaaataagttataaaaaagaaagtgggccaggtgcggtggctcacactgtaatcccagcaatttgggaggctgaggcaggtggatcaactgaggtcaggagttcgagaccagcctggccaacatggtgaaaccccatctctactaaaaatacaaaaattagccggacatggtggtgtgcacctgtaatcctagctattcgggaggctgaggcaggagaatcatttgaacccagtaggtggaggttgcagtgggccaagatcgcactactgcactccagcctgggtgacagagcaagactccatctcagaaaaaaaaaaaagaaagaaagaaactggctgagacaggaggatcatttgagccccaggagtttgagatcagcctgggtaacaaaacgagaccctgtctctacaaaaaatacaaaaattagttgggagcagtagcatgcacctgtagtctcagctacttgggagactgaggcaggaggattccaattccttgatcccctgagttgaggatgcaatgagctataatcctgccactgcactcctgcctgggtgacagagtaagatcctgtctcaaataaatgagtaaataaataaatggccaggcatggtggctcatgcctgtaatcccagcactttgcgaggcctaggcggatcacccgaggtcaggagtttgagaccagcctggccaacatggtgaaaccccgtctctactaaaaatacaaaaaaattagccaggcgtggtggcaggcgcctgtaatcctagctactcaggaggctgaggcaggagaattgcttgaacccaggaggcggaggttgcagtgagccgagattgtgccactgcactccagcctgggcgactgagtgaaactccatctcagaaaaaaaataaaaaataaaaataaataaatgtatctgtctgttctcacactgctataaaaatctataatacctaagattgggtaatttatgaaggaaagaggtttaattgactcacagttctgcaggctgtacaggaagcatggtgaggggaggcctcaggaaacttacaatcatggcagaaggtgaaggggaggcaagcacgtcttaccatggcagagcaggagagagacagtgagctaataggggagtgccacccacttttaaaccagcagatctcatgagaactcactcactatcatgagaacatgggagaagtccgcctccatgatctaatcacctcccaccaggtccctcccccaatattgggaattacaattcaacatgagatttgggtggggacacagagccaaattacatcaatcaatcaataaataagaaactagcaatctaaaagagaggaagagaagagaaaaagaaggccaggcactgtggctcacgcctgtaatcccagcactttgggaggccgagatgggtggatcacgaggtcaggagatcgacaccatcctggctaacatggtgaaacccgtctctactaaaaaatacaaaaaaattagccaggcgtggtggcgggcgcctgtagtcccagctacttgggaggctgaggcaggagaatggcatgaacccaggaggcggagcttgcagtgagccaagatagcgccactgcactccagcctgggagacagagcaagactctgtctcaaaaaaaaaaaaaaaaaaaaagacaggtgcaacaactgaaaaagcacaaaataaaattgttagatcttctcacttaatctttatatatataaatatatatgtaatatatattttatttttgagttggagtcttgctctgtcacccaggctagagtgcagtggcgtgatcttggctcactgaaacctccacctcccaagttcaagcaattcttgtgcctccacctcctgagtaactgggattacaggtacataccaccatgcctagctaaatgtgtattttcagtagagacagggtttcaccatgttggccaggctggtctcaaactcctggcctcaagtgatctgcccacctcagcctctcaagtgctgagattacaggcatgagctaccacacctggcctcaatcttctaaatattttgacctcttttacatatttgccattttcttctcttgtgtgcattctggatctttcctgaattctatctttcagttttctgattctctcttcagccttgtctaatatgctgctaaattgttaaattcactcatttggttttttctttcagttagattttttactactagaagttctgttttgttctttttcggatctgtgttttcttagctcatcttttcaagccttttttttttttttttttttttttgagatggagtctcgctctattgcccagactggactgcagtggtgcgatctcagctcactgcaaccttcgcctcccgggttcaagtgattctcctgcctcaggctcccgagtagctgtgactacaggcatgcaccaccatgcccagctaatttttgtatttttaatagaggtggggtttcaccatgttggccaggctggtttccaactcctgaccttaggtgatgtgcctgtctcagccttccaaagtgctgggattacaggcatgagccactgcacccagttcaaattactctaagtatatatttatactcccatcaacagtacatgtgaatttcaatttttccacaacctcattagaacttggtattgtcagtgtggtagatactgccagttgtcccaggatctactttccccttcttcctttaataacagatttaatgagtttcacctggattgcagctgggcatgcccaaccaaatcatagacaagatgatgtggctgaaagtaatatgcatcacttctgggtcatgaccttaggaagcatgctccttagaaggtatgcttcccaaactcgagatctttttgatgatgttctttttgcatttggtctatacttccaaattcctttttatgtccctgtatttgaacacatttgcctgacaatgaaggccccttccccagggtagtgaatatttattgtttttgcttgcccacatccactccttcttcctaatagtacctaaattatttttcttgaaatgttacattttcctcaatatagtagtagaatttagatcagagtgcccagccctttccctatagaagctgaaggggagcactgaaggctccttctttcagaacccttctctcactatcatcccatatatctaagaaggcattcagtggcttagggagaaaaaaaaaagagttgaaccttgtttcttccagcatccagagccttgacggtggaagggaagaagcacagcatgaatattgccaaggttatatatgaccaggttactctgagtctggacacaacccatcgagaatcctggtgaaatgcctgcctaagggtagaccccatagcagttaatctgcatctagatcctgttgtttccaattgcataagctacaagagctagcagaggttttattccagagaatggtatgtaaaccaccagccagtcagaatatgtcctcaaaccactagctaataaaatgtcacgtcctcttagaggcctcattcaaatcactctagtaaccctaagaatgaaatgtaacaagtaagaaatgcagctaggttataaacctagtctgaaggagactaatggtagttgactttgacagaactgacaattggcagctgacttctctggggtctcccacacaaaaccttctgtgtatttgtgcttcaactcatcttttagaccattctgaatcagagcactttatatttttattgttctttacttttcatgttctggattggtgaaattaatctctgaaaaatgggctgggttggtctttataatgtgaagtcaatgttactaagctgtcatgaggagagcattataccaacaatgaggcttcctttaaagaattttttggactggatgtggtcattcacacctgtaatcccagcaatttgggaggccaaggcaggaggattccttggagccaagagtttgagaccagcctgcgcaaatagtgagaccctatgtccaccaaaaagtaaaaagttaaaaaattagccaagaatagtggcgcatgcctgtagttccagctactctggaggctaaggctgtgggatcacttgagcccaggaggtcaaggctgcagtggctgtcatggcgccactgtactccagcctgggcaacagagtgagctcctgtctctaaaaaaaatttaaaaaggaggttgggtgcagtgactcatgcttataatctcagcactttgggagactgatcacctgacctcaggagttcgtgaccagcctgggtaacatggtgaaaccccgtctctactataaatgcaaaaattggccggatgcagtggctcaagcctgtaatcccagcactttgggaggccgaggtgggtggatcacctgaggtcaggagttcgagaccagcccagccaacactgtgaaaccctgtctgtactaaaactacaaaaattagccaggcgtgatggtgcatgcctgtaatcccagctactcgggaggctgaggcaggagaatcgcttgaacccgcgaggtggaggttgcagtgagctgagattgtgccactgcactccaacttgggcaacagagtgggactcttaaaacaaaacaaaaagcaaaaattagccacgcaaggtggctcatgcttgtaatcccagctactcgggaggctgaggcaagagaattgcttgaacccgggaggcggaggttgcagtgagctgagattgtgccactggactccaccctgggcgacagagcaagacatctcaaaaaaaaataataataattaattaattttttaaaaattgcctggcacagtggctcacacctgtaatcccagcaccttgggaggccaaggccggtggatcacttgaggtcaggagtttgagaccagccttgccaacatggtgaaaccccatctctactaaaaatacaaaaattagctgggcctggtggtgcacacctgtaatcctagctactcaggaggctgaggcaggagaatcgcttgaacccaggaggcagaggctgcagtgagccgagattgcgccactgcactccagcctgggcaacagaacgagactccgtctcaaacaaaaaaaaaacttaaaaaaagaacaaattttttggagacggggattctgcataacaaaaatgactgctgggcgcggtggctcacgcctgtaatcccagcactttgggaggccgaggcgggtggatcacctgaggtagggagttcaagaccagcctgaccaacatggagaaaccccgtctctactaaaaatacaaaattagccggggtggtggcgcatgcctgtaatcctagcaactcgggaggctgaggcaggagaatcgcttgaactcgggaggtggaggttgcggtgagccgagatcgcgccattgcactccagcctgggcaaaaagggcaaaactccatctccaaaaaaaaaacaaaaaacaaaaatgactatgatctttgaaaaataattgtgcaggctagaaactttgagtggctgaagtatatgttagttccccgagagtaagattctaggggataggatccccatggcatctagaacaatgcctaactttatcttgaaacaatgaggggaatgtgaaagggcctgtttaaacagtggtgctgtctcccaactaggtgctgaaagaccctttgtgttgagggcagggatctggttagaggacctgagagccttaagctatcaggccaagtgggaaaggaaaaggccaagagaagagtttccacccacctccacctaatcttacctttctctgtcttccactaccatcacttttttttctttttcccaccttttttttttcaaaacttttttctttttttcttgatacagggtctcactctgttgcccaggttggagtgcagtggtgtaatctcagctcactgcaacctctgcctcctgggctcaagccatcctcccacctcagcctctggaatagctggaactataggcatgcaccactatgcctggctaatttttgtattttttgtagagatggggttttgccatgttgcccaggctggtcttgaacttgtgagctcaagcaattggcccatctcggccttccaaagtgctgggataacaggtgtgagccactgcacccagcttaaaatgttttttaaaattgtgacatacagcacacagacaggaaagcacaagggataaatgtacagctccatacgttttaacaaagaaaatatttgtgaaattaccacttagttcaagaaattggctgggcgcagtggctcatgcctgtaattccaacactttgggaggccaaggtgggtggatcatctgaggtcaggagttcaagaccagcctggccaacatggtgaaaccccatgtctgctaaaaataaaaaaattagctggacatggtagtgggcacctgtaatcccagctactcaggaggttgaggcaggagaatcacttgaacctgggaggtggaggttgcagtgagccgagaatgtgccactgtactccagcctgggtgacagtgctagactgcatctcaaaaaaaaaaaaaaaaaaagaaagaaatagaacattgtcagcaccctagaaacccactcatgtctctcgccaccaggcctactctttcccttcttcccaaaggcaactactaccctcacttctaacattttaatttgtttgcttatttttgaaatatatgtaaagttaattgtacaataaatattcttctgaactactattgttcaacattttcatgaaggtacatttattaaattatagcatatgggaaaatgcacaaatcataagtggtacagcttgatgaatttttcacaaactgaatgtatctatgtaactagcatgcagatcaagaaatggagcattatcagaagtcccctttgtgcctccttctagtcactatccctctctcccaagagtagctactatcctgagttctaacagtataaatcagttttattattttaccttatatacatgaaaatatacagtatatactcttttcttcgtagcttttcttgctcaatattgtttgtgaggttcatctgcattgttgcacatagttgtagatcactcattctcattgctgttttgtattccattgtataaatgtaccacaatttgacgattcattctagtgtaggtggatatttgggttgttttttccattttcagctattacaaatactgccagtatgggcagacatggtgccttacacctgtaacccagcacattgggaggcctaggcaggcagatcgtctgagctcagaagtttgagaccagcccgagcaacatgctgaaactctgcctccacaaaaaatacaaaaattagctgtgcatggtgccgtgcacagtaagtagtagtcccggctacttgggaggatgaggcgagagggtcacttgtgccagggaggttgaggccacagtgagctgtgatggtgctactatttgtttgtatataaatagtatatttgtggccggatgcagtggctcacgcctgtaatcccagcactgaggaaggctgaggtaggcagatcacgaggtcaagagatggagaccatcctgaccaacatggtgaaaccctgtctctgctaaaaatacaaaaattagccagccgtggtggcgtgttcccgtaatcccagctactcgggaggctgaggcagaattgcttgaactcaggaggtggaggttgtagtgagccgagatcatgccactgctctccagcctggtgacagagggagactctgtctcaaataaataaataaataaataaataaataaataaataaataaaaataaataaataaatagtatatttgtacactgttagaactcaggatagtagtgggagaagatagtgactagaaggggcacaaaggggacttctggcaatgcttcctttcttgatctgggtgctagttaaatagatgcattcagtttgtgaaaaattcatcaagctgtaccacttatgatttgtgcactttttttttcttgagacggagtttcactcacactatcgcccaggctggagagcagtggcacgatctcagcttacagctcactgcaacctctgccacttgggttcaagtgattcttttgcgtcagcctccccagtagctgggattacaagtgtgtgccaccacgcctggctaatttttctatttttagtagagacagggtttcaccattttgaccaggctggtttcaaactgctgacctcaagtgatccacccaccttggcttcccaaagtgctgggattacaggcataagccaccgtgcccagcctgtgcacttttttatatgctatgatttaataaatgtttcttcatgaaaatgttgaacaatgtgatcactccagcctgggtgacacggcgagattctgcctcaaaaacaaaaacaaacaaatactgccagtataaacattcttagttatgtctcccggtgaacatatctatgcatttcttttttttttttttttttgagacggagtcttgctctgtcgccaggctggagtgcagtggtgcggtcttggctcactgcaacctccacctcctgggttcaagcgattctcctgcctcagcctcccaagcagctgagattacaggcatgcaccaccatgctcggctaatttttgtatttttagtagagatggggtttcaccatgttggccaggctggtcttgaactcctgacctggtgatctgcccgcctcggcctcccaaagtgctgggattacaggcgtgagccactgcacccggaccacacctatgcatttctgttggttatatgccttagagtaagattcctgggtcatggtctgttcagatttggtagatactaccagacagtatttcagagtagtcatcccaatttacattcccaccagcagtgtatgagaatttcatttgtttcacagccttgccaaccttcaatattacatctcttattttagccatgttgatgagttgtacatatactggtatctcattttggctttagttcacataaccctggtttctattgaggttgaattcctttcacatgtattgataatttaacttttattttatgtgaaataccttcacatctcatttttctcctgtaagttgtcattttcaaattgatttgtgggatttctctacattgtctaaatgaatcctttgcaggttaaatgcgtcacaaatatttccttgtactctgtagtttctcagtttctttatgaaaggtatctatgtatagattatatatgtacatgtttatttgtatattggctttatgcccagcaatcttttgattcccataatttacctgtagattattttggattttgaatgtacacaatataagtaaacaatgacaattttgtttcttcctctccaatacttatttccttccttccttcctttcttccctccctccttcctctctcccttcctccctccctccttcccttttcctttctttttatacccattgcattagtagggcctgcattacaatgctgataagatattgtattagtttcctaaggctgctgtaacaaagcaccacaaactgggtgccttaaaacaacagaaatgtattcttcacagttctagggactagaagtctgaaatcatggtattggcagggtcatgctccctttgaaacctgtaggggaattctttccagcttcttcttagcttctggcggtttgcggccaatcttgggttttccttgtcttgtagcagcataatcccagaatcccagtctctgccttcatcatcacatagtgttctccctctgcctctgtgtcttcacatgaccatcttattttaaggacaccagatacattggatttggggcccactctaacatgacctgatcttaactaattacatctataactacctgatttccaaatgaggtcacattctgtagtactgggtgttagaacttcaacatattcaactcataacagatgtgatgatagtggacgtctgtacttgatcttagtggcaaaactttcaacttttcaccattatgtgtgatgtcagccgggtatggtggctcacacctgtaatcctagcactttgggaggccgaagcgggtggataacttgagcccaggagttcaagacaagcctggccaacatggtgaaaccccatgtgtatatatatatatatatttttttttctttgtttttgagacagagtcttgctctgttgaccaggctgcagtgcagtggcatgatctcagctcactgcaacctccgccccccgggttcaagcaattctcctgcctcagcctcctgagtagctgggattacaggcatgtgccaccacacccagctaatttttgtatttttagtggagatggggtttcatcatgtcggtcaggctgctcttgaactcctgacctcaagtgatccgcctgccttggcctcccaaggctggggttacaggtgtgagccaccatgcccggcctaaatttatacatttttcaaaagaaaatgtcagcccaaaatattaaaaacacaactaactagggtttctgggttgggttcctgatctgggtgccgatttcacaagtgtgattggcttgtgaaaatttactatgctgtctacttaagacatgtgttaaataaaatttatagcaagttgggcattaggcccaacagaacaaaccaaaatggagtttattgatgttgccatgccaaaattaaaatctttatctgaccattcaataaaccaggagagagagaaataatagccaagtctgcaaacagtccatttttagccagcatgataaagaagtcctctctgctttaaccttataagaaaagaaactttgaaacaaacaatccacttttagttttctgtttctctcttttttttcttttttgagatggagtctcgctctgtcacccaggctggagtgcagtggcacgatctcagctcactccaacctctgcctcctgggttcaagtgattctcctgcctcagcctcctgagtagctgagattacaggtgagcaccaccacgcctggatactttttgtatttttagtaggcatggggtttcaccatgttgaccaggctggtcttgatctcctgacctggtgatctgcctgcctcagcctcccaaaagtgttgggattacaggagtgagcccccgcgccctgcctctgcgtttcttttctgtctatgaaattatcccgattgttctgctcattggaacactgtttctgctttatagaatgagacgttgcccaattctagaatagcaggtaaaagttaattaagatctttaaactaaatttgttgtaattttgtcttttgacatgtaattttctgtatattcgttatacttcaataaaaagttaaaagaaacataactaaatttctatttgaaaacagaagctcttccttttgaaggatgccttgctgctccactttccattcacattcacctcctgagagaggtgaagatctgggttgctaagatggaagaaaggtcaattatttgcatgttactcaagtgatgcactgacacaatattctcacagttctccctccccccgcccccccccacacacccaaaagaattcagtgtattagctttgctttttagtgattcactcaagctaaagtaagagtttatgtctggtattacgttgagagcttttggaagattatcttccaggttgtctttagaccatctttgtatctggtttttgctctctttgcttttgctctgagattctgcaacaccgatttatatgtgttgagacagtctaaaaaattccatttctccccttctacaattcctgcagatgttactcactatatgtctgcaggaattggtgtaatcttacactctgccttgaaaacacctttccattcttcacagctttgttcccagttgaatttctggggagaattgagttaggtctattcatttaatttgggagaaactgacatctttacaatttttcctcttttcacccaggatcatggtaagcctctccattatttgaagtctaatttcatcctacttggatatgcttctttatgactctgtagctttctacatataagtcctacatctttcttgttagagtttttcctagttgctttatgtttttttgttgttgttgcgattgttgctattgtgaatggaaccttttttttttttcattcaaaaatgaacccgtggagcgataggatctctaccacctctttcggctgtgagactctatggtttttcagttctatgagaacattctactggagcctacattatctgaacccaaaggaagatggcaaccacgagtcgccaagtaaaggaccgctctatctcgcctttgttctcctctcggtggttactgcgcagacgtagtcgcccaagtcgcgtccccgccttcccggtcgcgggcccagctcgggagcgccggcgcactggcgcgctccgtttacacgctccggggcctgtaggcgccgcgagttccggctgtcgccgtcgccgccgcggctcctggaggtcggttgcgacgagtaacggcgccaggacgagccctgcgccttctttttcgatatgtacccgaattggggccggtatggcgggagcagccactatccgccgccaccggtcccaccgccgccgccagtggcgcttcctgaggcctcgccggggcccgggtactcgagctcgacgactcccgcggccccctcctcctcgggcttcatgagcttccgcgaacagcacttggcgcagctccagcagctgcagcagatgcaccagaagcaaatgcagtgcgtgcttcagccccaccaccttcctccgccccctctgccgcccccgccagtgatgccggggggcggctacggagactggcagccgccaccgccaccgatgcccccgccacccgggccggccctcagctatcagaagcagcagcagtacaaacaccagatgctccaccaccaacgagacgggcctcctggtttggttccaatggagctggaatccccccctgaatctccccctgtgccgcctgggtcctatatgcccccatctcagtcttacatgcccccacctcagccgccaccctcttactaccccccgacctcatctcagccctacctgcctcctgctcagccgtccccttcgcagtccccaccttcccaatcctacctggcgcccaccccttcttactcatcctcctcctcttcctcgcaatcctatttgagccattcccagtcctacttgccctcttctcaggcatctccttcccgcccctcccagggccattctaaatcccaactactagctccaccaccaccgtccgccccccctggaaataagacaactgtccagcaagagcctttggagagtggggccaaaaacaagagtactgaacagcagcaagccgcccctgagccagatccctctacgatgactccacaggtaagaaagcatctgcctgaacctcatctttcacctagagggccctgaatgagcaggcctcagggctttaaccagtggttagtctaattccaacacacaatgactagctaacactccaaaggattccgtaagagtcagagggctgacagctcagctttttaattagctagatgtgaattaccaaaaaaacagcgtttgtagatgtgtatggattacatacagtggtggggtggctcaaaagttacctctcagatacattccttggtttctttgaccatcctcttagattttgttgctgttgcaaatagattttgttgcagagggtcttgttttaaaattgtattttaaacgaaagtttccatttgagagaaagcatgaaaaagaggcctcgccaagggctgacacttgaatgtttgtaaactttatgattagttagcttcttttaaaaatattacttaggggccagggatagttgtcagcttcctgaattaagaggtttcagaaaaaggatggaaatcttgtcttaccaggagcatcctaattatgcttataggtacatatacaatacatagatgagtcccgagacccttttggggatcgattggtccattttaggaattgacccagacatccttttctcatattatttaaagattgttttaagataatgagcaattttctgcgtttcattgtcattaccattcactccaaagaaacagccttgcaatttggccaacgtaaaaaaagtttggtgatatcttttcatgagagagtcagccattcttatcccgcagaacagacaaattgacagggtaacagtaataaacgagttcccccttgagagagggaaggtcaaactaaagcagaataaatcaattgttatgatttcctaaagtagacactttttcagcgattactaatttaccttagattcactaaggaaaaaagagaatcttgtaatataaacgctcagatttacctataaaagatttccaaaagatagggatgcagtattataattttacggtggtttggcattagaaattaagaacagaagcaagttgttttaagaaatgatgcttggcacatcttctggagaaaacacttgggatgctgaaataaagtagtagaataatgattctgttggcttacatcaaatttgtaccatctcaccagtttattttccccagattgctctattatagagacagactttctgtcctctttcccaccccactctgaagtctttagtgcttttgttgtcaaacattctcagttagtctgagccaaaataggacatttatattctcactctactagactgtttttctgaccttacagagagacaaaataattgtatttttggctttttttgggaggagtgtgtgtgtcagatcaggccttaatatgtatagttaccatgaacagtgcttttacttttctgcctttgtacccttttctgtaatgaactcagtgtcttgaatattcagtgcctgcaattctttggtgagaggcagagtggtggaaaatgagacttgtggtgcacatagaccagatcaagaagagccttgaagcctgtggctttctttcttctttttagaattcatcctaacctcctcaaccctctgtttccccttagagttgtattgctttcaaggcatatctcaaatatcaaggtttccatgaagccctgcttgtgctcacccatctggtttggttctgttcttcagattgtaagtcccttgcagacaggaattatcttacttatcttcttattaccgtagcacctaggacagtgccttgcaaattgtaggctctccacagatttgttgaataaaatacgagagttgtcatgttctagacttaggatatgttggtttattagatgataaatatttcttcatgccagtaccagtctctggcaatccttctacatatttattattctttgattcatattttgtttttggaatgtgtcattcaaaatttcttatcgtgaaatatttttaaaatacacaaaatagagaaaaaagtatgattccccatacatacccatcattgagattcaacagctatcaagattttgccatgtttacttcacctaggccttttttattattgttgcatatatatatattgagacagggtcttgctctgtcagtcacccagggtggagtgtagtggcatagtctcagttcactgcaacctctgcctcccaggctcaagccatcccaagtagctgggactacaggtgcatgccaccatgcctggctatttttttttttttttttttttggtagagacggggttttgctatgttgcccaggctggtcttgaactcctgagctcaaacagtacactgccttgacctctcaaagtgctgggattatgggcatgaaccaccacacctggcctctgctgaaatattttaaagcaaatcttagatcttatgtcatttcatccctacattcttagtcaagtacctctataaaacaaaacaaaacaaaaccaagaccttttcttttttttttttttttttgagatggagtctcacactgttgcccaggctggagtgcagtggcgcgatcttggctcattgcaacctctgcctcccgggttcaagcgattctcctgcctcagcctcctgagtagctgggattacaagtgcatgccaccacgcctggctaatttttgtatttttagtagagacggggtttcaccatgttggtcaggctggtcttgaactcctgacctcatgatccagctgccttggcctcccaaagtgctgggattacaggcgtgagccaccgtgcccggccaagaccctttcttagataaacacattgttaacacctaacaaagttaacagtttcttggtatcatctaatacctgatccgttcagatttcctttattgtttcatcatactaatgaactaaaaataattctttgataccatccatgttaaaataccccaaattgactcaacagtgttgttgttttctgtcctcacagtctgttcccaaacaatgtttttttggtgtgttcaagtcagagtccaaacagaatactgaaaagattcttagtatagatcagggtttctcagcttcggcactatggacattttgggcaggatgattctttgttgtggaggggcttgtcctatgcattgtaggatgtttaacagcgtccctgacctctacccattagatgccagtggcagcccccagtccgacaaccaaaaatgtttccacacattgccaagtatcccctggagacaaaattaccctctgttgagaacccttgacctaggtcagtccctcctattttctttttctacctcatgtctttgaacttgatgaaaaatctgttgtcagttttcctgtagaatgtctgacattctgcattgtctgctttttcatggtgtcacatttgacttgttcctatgtcttccacattttttttttttttgaattagaagttaactctggaaccttcatttaagttcagctttcttttggcaagtgttgcattcctcatgggacacccgatgcctggttgtcccactgttagtaatgccattggtccctctactgtaaagctttctatcaatcttgcatctaatgtttcagtctactggttcatcaattgaagaaagaccttgcctaagtaaattatttcattagacagaggttgcaacctggtgattttttttttctgccatttcttccacagttactatatggagttatgtaaagaaaaacttttgccacagatatttgattggaaatacagttggtataggaaggacaagataaatacttgatatttttccaggtgttttctagtttttcgggtaaagtgttgatgatttaatggaatgtgtttttttgtttgtttgtttctgagagagagtctcactctgtcgctcaggctggagtgcagtggtgaaatctcggctcactgcaacttccacttcctgggttcaaacaattctgccctagcctcccaagtatatgggattacaggtgcatgctaccatgcctggctagtttttgtatttttaatagagatggggtttcaccatgttggtcaggctggtctcgaactcctgacctcaagtgatccacctgcttcggcctcccaaagtgctgggattatagacgtgagccactgcgcccggtcggaatgtgtctttttgaataattaatttttctatgtgtttaaaggactgatttatttagttaaagctgttggctttgattagtttttagaggtatcatttatttaatgtttaaatacttacggactagcaactatgtgccaggtactatgagtactgtgcttaatactggagatgaaatggttaacaagatagacatgggacctgccctcattgacttcttgtttcagttgtgggggaagggagaagacatttagtaagtaattaagaggagacgtacagagtgctatgggattataaaatatcactagattattccccaaggaactggcaaaggcaagttttttgttttttgttttttttttaagttaccactgtattcacagtaccttgcataggatctagcgcataggaggtggagaacaaatatattttaaataattgaatatagctgggagcgctaacctaattaaagaggattccctttgtaaagtgatattttttattttttatttgtttttattttattttatttatttttatttttttgagatggagtctcgctctgttgcccaggctggagtgcagtggcgcgatctcggctcactgcaacctccgccttccgggtttaagcaattttctgcctcagcctccctagtaactgggattacaggtgcctgccaccacgcccggctaatttttttgtatttttatctttttttttttttttttttttttttttttggagacgaagtctcactcttgttgcccaggctggggtgcaatggcacgatctcggctcactgcaacctctgcctcccgggttcaaacaattctcctgcctcagcctgcctcagctactcccaggagtagctgggattacaggcgcctgccaccacgcttggctaatttttgtatttttagtagagacgaggtttcaccatgttggctaggctggtctcgaactcctgaccccaggtgatctgcctgtctcagcctcccaaagtgctggggttacaggtgtgagtcagagtgcccggccatttttttttgtatttttagtacagaagaggtttcaccatcttggccaggctggtcttgaactcctgacctcgtgatccacctgctacggcctcccaaagtgctgggattacaggcgtaagctgccacgccgggcctgtaaagtgatatttaaatgaactctaaagaataagtaggaggactgggtgctcacacctgtaatcccagttctttgggctcattagaggccgggagttcaaggccagcctgggcaacaaagtgagacacccccccccccgccccccgcccacaaaaagtttaaaaaactagccaggtggccgggcgcagtggctcacgcctgtaatcccagcactttgggaggcctaggcgggcagatcacgaggtcagaagatcaagaccatcctggctaacatggtgaaaccccatctctactaaaaatacaaaaaattagccgggcgtggtggtgggcgcctgtagtcccaacttctcaggaagctgaggcaggagaatggtgtgaacccgggaggcggagcttgcagtgagccgagatcgcgccactgcactccagcctgggcgacagagtgagactccgactcaaaaaaaaaaaaaacctagccaggcatggtgttgcatgcctgtagtgccggctacttgcgggtggctgaggtgggaggattgtttaagcccaggagttctcgtgccactgcactctagcctgggcaacagagtgagacctaaaaaaaaaaaaaatgagtaggccaggtgcagtggctgatgcctgtaatctcagcactttgggaggccaaggcaggcggatcacttgaagtcaggagttcaagaccagcctggccaacatggtgaaattctgtctctactacaaatacaaaaaattagctgggtgtggtggtgcacgcttttaatctcagctacttgggaggctgaggtgggaggatcacttgaacccaggaggcagaggttgcagtgagccaagattgccccactgctctctagcctgggcgacagagtgggactccatctcagttaaaaaaaaagaaaaagagtagaaattaaccagaagttagaattcaaagaattaagttcaataaggctcactgaaagctcagggtgaggatggtaggtatgaactagatcagggaaggcctgtaaggacttcattctaagggcagttggaagccattgaaggattttacataggtgaatgtgacagattggcatttttgaaagctcactctgcttgcagtgtggagagcagaattaaaaggagcaagagtgatttagagagaatagttattgaagtaatccaggcaagagataatagtggtttagactttgatggtattagttgagatggagagaagtgggaagagtggagaaatatttagctgctagaattcactttgaggttgagtagttatggagagggaggcatcaagaatgattcttaggtttctgggctgggccgtagggtggatggtggtcaaatttactaaaacagaaaaacctaaaggaggaggaggaagaacatttctgggggtgaggagaaaatcatgagttaggtttcagacatactgagtttggggttcttgagacatagattccaaatggagatgtccacttggaagttagatatagctctggagtctagatgtaagatctgggagacatagatttataagtcatcagcataaaaatggtatttgaagacacagaaatagatgaagcctctcaaggaatgtgtgtagagtaagaactgaggttaaaggacattaagcctagctccacaaatagcagtatctaagggaaccaatgaaagaatggccaaataggtattcatattaggttggtgcaaaagtaattgcagtttttgctattacttttaatggcaaaaccacagttactttggcaccagtgtgataggtggaaaatcaagatagtggatagtgcgttgccatgaacgtcaaggaacagactctaggaggagggagtcgtcagctgtgtgaagtactgctgagacgtcaagcaagataaagactgcgagttatcttttgcacctactgacatgtagattattgttgaccttggcaggagcagtttcatagtgactgaagccatattgcattgatttgaggagtgatggaaggtgaggaaatggggatggtgagtacagacaactctttcaagaagtttgactgaaggagagagagaatgagggaaggagctggaggaatagatgaagtaaatgagcatttaaaataaaaataggtggggactaagcttatctggtgaccctgattcttacagtagaatgtgaatctcaaaaatatttaagcctattttaaataaatttctaaaatggaaacccaattcattattttaccaggtgtcctccctgccccctgctttagaatataagacatagaacattgtcttataggcatttatgataacctggatagggaaggtaatcttctaaaattaatctttaaaacattacacacaaacactcacctcctttatagttctccacttggaaaatcatttagtatctagttcattactagcagcagtggtcagtaagtgcttcctgagtaaattaaaatcaacatctttcttttttttttttttttctcagagagatgggatcttgccatgttgcccaggctggtctgaattcctgggctcaagcgatattcgtgcctcggcagcatctttcttaataacagtatttgtgacaaatagttctatattcttaattttttttttttttttgagatggagtctcgctctcacccaggctgaagtgcagtggcgcgaggatctgggctcactgcaacctccgcctcccaggttcaagcgattctcctgcctcagcctcccgagtagctgggattacaggcatgtgccaccacacccagctaagttttgtatttttagtagagacagggtttcaccatgttggtcaggctggtctcgaactcctcaccttgtgatccgcccgccttggcctcccaaagtgctgggattacagatgtgagccaccgcacccagccaatagttctacattctttatgtttgaaatcccttcattcaatctcgttttaaatgtgacctatattatgatttccctctacctataaaacaacatcccatatgaaatggagttatctgatatgatgggacattcagaagagctggcatcattagcaagttcaggcattttttttctttctaaaatagggatgatcacacttctcttagggtcagtaaggacatttgtgagtgatatcattattatttatttgcagagcttcaaaaatgtgctgaagcctaccataggattgaattagatctggttactacttatagggttcatattaaatagaaattgacctacaaggcggccgggcacggtggctcacgcctgtaatcccagcactttgggaggctgaggtgggcggatcacaaggtcaggagatcgagaccatcctggctaacatggtgaaaccccgtctctactaaaaaatataaaaaattagccgggcgtggtggcgggcgcctgtagtcccaactactcaggaggctgaggcaggagaatggcgtgaactcgggaggcggagcttgcagtgagccgagatcgcgccactgcgctccagcctgggcgacagagcgagactccatctcaagaaaaaaaaaagagaaattgacctacaaggcatactgtcagtgaatcaacaagtacttcagcccttaacaagttcttaaccctggtctggatctaagacaaagcatgagaataggtgatgaagaagctgataaagaatctggacctgtacagttttcattctgtacagtcttcatatctgtagcattggcttagtttgtgaaagatagtttgcatctttgtatcttttaataatgctttcaaagcaactttaaaaaaggaaacttttaacttctacttgaaagagaatgtactaatttttttaaaactgaaggataagtctgttgatgttttcagtattaaaataatggaaggaagtgttttaatgctacattattattattattggctttggctttcatggtcagtgtgctgttttctttctttttttttttttttttttttttttttgagacagagtctttctctgttgcccaggctggagtgcaatggcacgatctcggctcactgcaacctccgcctcccaggttcaggggattctcctgcctcaccctccggagtagctgagattataggtgtgtgccaccacaccctactaatttttgtatttttagtagaggcgaggtttcaccgtgttggccaggctggtctcgaactcctgacctcaggtgacctgcccgcctagacctcccaaagtactgggattacaggcatgagccactgtgcctggccaagtgtgctgttttcttacgttgaatagtaaaagtacagatactctttgacttacagtggggttacatctcaataaacccattgtaagttgaggataatgtaagttgaacatttaatacacctagcctactgaataccatagtttagcctagctattaaatgtgctcagaaagtttacattaggcaaagtcatctggccacacagtacacagtagagtattggtttttttcttgttttgttttgttttctttgagatggagtcagtgagtggtgcgatcttggctcactgcaacctccacctcctgggttcaagcgagtctcccgtctcagcctcccaagtagctgggattacaggcacctgcgaccatggcccagctaatttttttgtattttttttgttttgagacggagtctcgctctgtcgcccaggctggagtgcagtggcgtgatctcggctcactgcaacctccgcctcctgggttcatgccattctcctgcctcagcctcccaagtagctgggactacaggtgcctgccaccatgccaggttaatttttttatatttttaggagagatggggtttcaccgtgttagccaggatggtcttgatctcctgacctcatgatctacctgcctcggcctcccagagtgctgggattacaggcgtgagccactgcgctccgcctttttttttttgtatttttgtagagacggggtttcaccatgttggccaggctggtcttgaactcctgaccttaggtgatcagcccaccttggcctcccaaagtgctgggattacaggtgtgagccactgcacctggccgaggattgattgtttgccctcatgatgtgtggctgactaggagcctagggctcgctgctgctgtccagcatcacaagagagtatcatactgaatattttgagcctgggaaaagatcaaaattcatggtatggtttccagtgaatacatatcactttcacaccaccataaagtcgaaaaatcataagttgaaccattgttaagtcagggaccatctgtaattatatcctgggagctgatgattatatgtataatagttaaaaacaaaaaatccagtcatgggttaaacgtcaagatggagtttatgagatggaatttattcttcccaatagattggaacaagtttcaggtaatagtaatgagtgaccgagagggaagggcttcagttgatcaataaccatttattgacatcctactgtgtgctctagcactatgcttgactaccagataggatataaaaagaggggaaggcagctgtcccctaagaaaaattacattctttgagtgaaaagtaggtaacaaatcagtatgtttggtgagaaaaaggtatgtattatgtatatttaatgcatctgtttgcatatggaaaattaggggaggttatactataaaatattaacagtgtaggaaatcctagttatccagagataattggattagaaaataggcaagtaaagtgaattcatttaacacaggaaccaaaagtttattgtaaaacataaaacatttgattgggacccagtctggaaaaacaaagctcaaagtgataaggataagcagattttatatttgatggaattgttataaatgaaatcatagccaagttttagaatgaacaaagaataaactatagattgggtttctttgctgtaatttttgtgggaaaattatataacaacattatagatcatcttttatttcattttttgacatgttgaaaaaatattttagggatttatcgatttttatacggactgtttttcaacctttggtattcaggccattctcttttatagtttttactgtaaagtactgttcggttgttaactggtaggacttctagcagatcctcagctgccagtaataagttccaatgttctccaacatcactttcttgaaatactacatccatacaattgtagtagaatcatatgcttttgttagtcatataagtatacagggcagttcatcagtgaatattttagtgttatgataacttttggttttctttatgcaaccttgtaaccatgggaaattatataatactaggataatgacactcctgtagtttttttctgagtggtgagatttcttttattgattttaattaattagttattacttacctgtgtagtcagttttctttatttgagatttttaaactcaccacagacactgaattagtgaatactgaaccagtgctcctcggggaaatacagggttaggttcctgtgagtctcttgtcacatttttatcaactgatgaacacatagccttgtttatgtgtgtttctgtttaaagaaccttatttagtacatattgttgatttattaacattgtactcatggccaacagcactgtagcacttgtccgaacaaagctgacctaacacagatattttctctgtgagacataagaccgctttcttgctcttgggacactaaacagcatctcagctctatgcctgggggccattttaaatagtgaaatcaacaaaaaagcacaaaagtttgacaaatgtgtctctaaatagactgaaaatgacacttatttatagtatagagctggaacaagaaggcagagcatcaccttgcacttcatctcggctgggaatgcacacatgagtcaggggactcatgtttttcactgctgtccacatgtttgtgaatgactgggaaagctcagtgagtatggattttgggtttagaaataaattttaggtcgggtgtggtggctcatgcctgtaatcccagcactttgggaggccaaggtggatcacttgagtccaggagtttgaaaccagcctgggcaacatggtgaaacttgtctctacaaaaaatacaaaaattatccagatggtggcacatacctgtggtcccagttactcgggaggttgaagcgggaggatcatttgagcacaggaggcggaggtggcagtgagctgaaactgcaccactacactccagcctgggtgacagagggagatgaccctgtctcaaaaaaagaaaaaaaaattttagcaagtaggcaaatttgcaaatacagaatccaagaataatgaggattggctatattttctaatatttccatactaagcttattgttgtaatttttaaatgaaagcacaaaataagctttcagaaaattaaagtacagcataatttggaagataaagctaaggcttttaaaataaatagaaagcattttaaaacacagtatattggccaggtgcggtggctcacacctgtaatcccagcactttgggaggccgaggctcgtggatcacctgaggtcaggagttcgagaccagcctggccaacatggtgaaaccccatctctactaaaaataaaaaaatttagctgggcttggtggtgggtgcctgtaatcccagctactcgggaagctgaggcaggagaatcacttgaacctgggaggtggaggttgcagtgagccgagatcacaccactgcactccagcctgggtgacagagcaagactccatctcaaaaaaaaaaaaataaataaaacacagcatattctcttatatgtgtgtacagcatattctcttatatgtgtgtacatctgagtatgggtagactaatgctacaacaggtgtttcaaagtgggaggaggctgggtgcagtggttcacacctgtaatcccagcactttgggaggctgaggtaagagaattgcttgagcccaggagtttgagaccagcctgggcaacacagtaagaccttgtgtctataaaacataaaaaaattagctgggcgtgatggtgcatgcctacgaacccagctgctcaggaggctgaggtgggaggattgcttgagcctgggaggttgaggcttcagtgagccatgttcaggccattgtactccatcctgggtgagagagtgagatgcagtctcaaaaaaaaaagaaagaaaagagggaggagtgcttgaggagaaagagagaaggcagagaagagaggtaggactgttcagttatattcattaattacaagacccctgtcaataaatcggaacaaactgaagccaggttaaaaataagtagttgtgaatactgaagagatttaccctgatcatttatcaaaaagatggctcttacctccaaaagcatgtgttttattagagtacagaagcatgttgaattaatatgtatggtttaatttaaatgtataaatttgggggaggaactgaaatttttctgtagcctgtgtttaagatcttgttaacttatttgtcttcctcagtctagctttgcctttttttacatatagacacatgaacacagacataaagataggtccttgtcaacaccaagttgcagagatacatgattgtcaatcaaaattctcaaaaattgtttctgttgtaggaacagcagcagtattggtatcgacagcacttgcttagtttgcaacagaggacaaaagttcatttgccaggacacaaaaagggtcctgtggtagcaaaggatacaccagagccggtaaaagaagaagttacagtacctgccaccagtcaagttccagaatctccttcttctgaggagcccccattgccacctccaaatgaggaagtgccacctcctctcccacctgaggaaccccaggtaaccatataattaattgtttgtgtttattaaattatttagcttttttctgattcatttagtatacttttatcataaatggatatatatttttgtttttttaggtacctataaagttgcatttgtgaaatcagatgtctgttgtatcaggtttatttgtttgtttatttattttgagacagggtctctctctgtttaccaggctggagtgcaatggtgcgatcttggcttactgcaacttctgcctcccaggttcaggcaattcttctgcctcagcctcctgagtagctgggatgacaggcatgcaccaccatgaccggctaatttttgtattttttagtagagatggggtttcaccatgttggccaggctggtttcgaactcctgacctcaagtgatccacctgcttcggcctcccaaagtgcttggattacaggcatgagccaccatgcctggcctgttgtatcaggtttagaaaaggaaatttttcctagtttgagtgaagagttggatactcttctgaattgagtgcctctaagcactaaaggaagatgccagcatatgttcatagtgacagcacagggcaatagttgagtgcttgagcttttagagtcaagctacccaggctataatccaggtactgccacttgccagtagtgactgggcaaatttgttaaccattctgtgcttcaatttactcctctgcaaaatgggtatattcaatagtagctatcatatagaggtattcaagcattaaatgtgataattcttgtcactcagcttagtgactggcacatgggaggttctcatattggtccaaaggtcattgttctcccaagagccttatatgaagggtttaatcaaaccatgatggttatattgtagtccattggtgaaaagtgacaaaaaaagaaacggatttttcatagagtgaaaaggtctataacttaaggttcactttttttttttttttttccagacagggtctcactctgttgcccaggctggagtgcagtggtgtgatctcaactcactgcagcctcagcctcccaggctcaagtgatcctccttgcctcagccttccaagtagctgggacctctcttccctcccctcccctcccctcctttttttttttttgagatggagtcttgctctgtcgcccaggctggagtgcagtgacgcgatcttggctcactgcaacctctgcctccaaggttcaagtgattctccggcctcagcctcccaagtaggtgagattacaggtacctgccaccatgcctggctaatttttgtatttttagtagagacggggtttcaccatgttgaccaggctggtcttggactcctgacttcaagtgatccacccgccttggcctcccaaagttctgggattacaggtgtgagccatggtgcccggcctgggaccactttccactgggaaaattgttgtcatatttaggaataataagattattattccagtgaagactatggaatttataaactcctttgtattagtatccataatagtatagatagagctatgtgttttatctaaagatagaatagctgttctcaatccaaaaagaactgaagatactgtgtttgacagttggatatttctgagttgtagggattctggactttataatacatttataaaatatttttgcttgctgttttatgacttacataaagatgtgtcctcttttatctttagtctgaggacccagaagaagatgccaggttaaagcagttgcaggctgcagcagcacactggcagcagcaccagcagcatcgagtcggtttccagtatcagggaataatgcagaagcacactcagttacagcagattctacaacagtatcagcagattatacagcccccaccacatatacaggcaagtgcttccatagtccacaataggaagttgccccaagacattgaaaggatttgttattcttgaaagatttaagtgtaaaaaacaaaagataccaactgttgacaattagttgtttcccaaggggtgcccaagtagttatctgccacattacctgggggactggggaggggttggttatagtagagtttcctgatcatgtcaacccaggccagatgttagcttactattgctaagggtcttaagagctggggatttttaccatatagctacaggttaacctgtgttttgcctgtaaactacaacagtaacagataagcaaagaggccaaaaacagccatcacaaaaaacctaagcaaatataccgtaaaagataaagtgacttagatacttgtttgtgttgtatctttgaggggtaatgttgtgtctgtatatctataataacagatcatttttcaagttcttgaaattatccatattaaaaacttgaaaaatacttattgctaagataggtatttgctttattgtttggttggtttttccaactctgtagtaagttgtctaagccaaaggaaggaagaagaatgatcatcactcaaagaacttaacgaacttattcttagcctcccaaagtctttagtgttctaatttcctaaagcgtcaaatgcccttgattcattaatattttaacctatgattaattatcttatatgaatggttttaaatagtttttatccctttatttgtagaccatgtctgtagatatgcagctgcggcattatgagatgcagcagcaacagtttcaacatctttaccaagaatgggagcgagagtttcagctatgggaggaacaactccattcctatcctcataaagatcagcttcaggagtatgagaagcagtggaaaacatggcagggacatatgaaagccactcagagctatctccaggagaaagtcaattcatttcagaacatgaagaaccagtatatggggaacatgtcaatgccacctccttttgttccatattctcagatgcctccacctctacctacaatgccccctccagtgttgcctccttcattgccaccaccagtgatgccccctgccctccctgctacagtgccaccacctggcatgcccccacctgttatgccaccttctctaccaacctctgttcccccaccagggatgcctccttctctctcttctgcagggccaccaccagttctccccccaccttccctgtcttctgcagggccaccaccagttcttcccccaccatctctctcttcaacagcacctccacctgtcatgcccctcccaccattgtcttcagctacacctcctccaggaatacctccccctggagttccacaagggatacctcctcagttaacagcagccccagttccaccagcctccagttcacagagctcgcaagttccagagaaacctagaccagcactgcttcctactcctgtgtcttttggttctgccccaccgacaacttaccatcctccgttgcaatcagctggtccatcagaacaagtgaattcaaaagctcctttgagcaagtctgctctgccatacagttcattctcatctgatcaaggacttggggagtcttcagctgctccatctcagccaatcactgcagtgaaggacatgccagtgagatcaggtggcctgcttccagatcctcctagaagtagttacttggaaagtccaagaggcccaaggtaggtctgcttttttttctctttttttttggtttggctattttattgacttaggctatttggttctcgatggtataaaaagcttcatttatacaatgtttatactctctttgtacttatattgtctgcttgttaagacatcacgtatgtaatctagaaaaggtaacatgcccccatttctttgatgtctctgcttttgtcctatatgtagagattataatccagaatgaatgtagtattgtagagtaatgctaatcattttgtattgacttattagctttaaaaataatattaaactttatcttttgtttgctttttcattcatttgacaaataattgaattggcaattactatttgttagataatttgttagttgttagagataaagatgaataagccaatattctactggcttgaggcagtgaaatttagcataaggtaagtaggacttttattttatccattcagcaaatatttaagttcctgctcttgtacttagagcagtgaatatagcagaacacataaaattcctgcccccatggagcttacatcctttatattttccccagttaaggagatacttctgtttatcctgaacaacatatttagaaagaaaaaaaattgctggtgtgtaagttttttctctttaccttctaaaaactgttaaattcattttttccaagtttgtaaaaatagatttttctccccaagttgacctaaatgataacttttctatggaaattattattattttttgagacagggtctcggtttttcacccaggctagtgtgcagtgatagaattatggctcagtgcagcctcttcctcctgggttcaagcagtcctcccacctcagcctcccaggtggctgggaccagaggtgcgcaccaacacatctggccagtttttaaaaaatacttcgtagagatggggatcttcctatgttgaccaggctggtctcaaactcctgggctcaagcgatcctcctgccttggcctccctgcctgccgtggcctcccaaagtgctgggattacaggtgtgagccaccacgctcagccagaaaaatactttaatcagtttttttctcagttgggaattgtagtagaaatgggtactccttatacaaaattcaaacattacagaaaagtgtagaaaaaagtgaaagtcacctaattccaccatctggagagaatcattttaaaaatatatgttgcagaaatgggatcatactgagtagattatcttataacttatttttccaccaatctgcgtattgcttagattttcatctcagtatcagtggatctacatcatcatttttttcaacctcattttaacatttgaaaacaaaatatatcttttattccccaagcttataattctgaaagcagtgtggcacaaaactccatccacaatcaaagttaagagaaagggcaattaacatgaattcctctgtgtaccaagaagccttgctagagactttacacacattattatctcatggaagtcttctcaacaacctgtgaagtaggcagattattctccatttactcttaacaaaatggcactgagaggactgcgtaacttgctcagtcaggattatttagcagagtgagtagaaccccagaataggtacagttgagtctagagggtccccaaagcaaaagtactatttaagctctgtttactgccatgattcaagcctatactgtcagtgcttatttggcatgtgtatcatcttgatttgaattcgttcttaatctcctggaatgagcattgccttttagatctggtaactaatttgctatcagagaagtacattcttaacacctcatgaaacatacatttcctgctcccttgatttccgtcatgttaatattttctctctttgcctactaaatcttggctgtgtgaatttaggacctattttaagttttgtcttcagaagaaaataacttctcaagttaataatctctgtgctgggaggatattagcaattatctaatatatctgtctacggcaacgcacgtttgtattccatttcagtttgtcacaatgagtcttgcacatatcatcttatttattcctcttagtgatatcaggaggtaaataaatacataagaaaagctgagattcagagaggttgtaaataccttgcctcatataacacagctagtaaatggtcaagatgagattagaatccaaggacttctgacccactttaagtccattgtactttctgtgatgagcagttgtatgcttaacattggcattgtgattaggaacactgccatataaggcattgattctagaaagtttgttttttacattgaacctaaatgtgattctttaacttttatctgttgattctagatttgcctctggagcaacacagaatgaattatcctatgcctcttctacagcatgtcactacagttatttaaaaactattaccctcatgtctccctcaccctacctcacccagtttgctctgccaatcacaactcagattcttttcatcttaacattgtttctaacctcatcctgctgtactgctcactgtcctttgaagggcctttagtttgttagtctccttcagaatgaacacttacttcagatgcagaggagcatgggcctagtaccaacttcattataaataatgtgcttatattgtatagcttaacaaattgcttttttgtttgtttttttcagcactctcacagtgttgactcttgttgaacttaacatcaatctagcttcccaggtctttttcacattagcttttattaagccaagtctctcttatcctgaacttgtgtggttggttttttgtttttgtttttcttgttcctttttctaagactttacatttctctttagattgttttctagttaggtttgcaccatcatttcagtctgctgaaatcttggtcaatgatgattatattgttttaggtatgtgatatccctcttcagcattttcatctgcagctttgataaggatggctttttaatccttgaattggatcctactcacattatccaccttgttttgaaaacgtttcccctaactagcttatgtcattgccatttcagtcaccccctgctgcttttgctcactcagcccttatagagtatagtttgggactgttacccaggcatagttctttttctccagtgtaactaggtaaaaaatcagtgggaagctggttagtgagtgaacaagactgaggtaagaataatctatactattaaggaaacctgtgaacttcttgtatttctaattcagattttgctatcaaacatataactgatatgagaagccactttttttaaataatcaaagctgattagaaaaacaagagtttagaacacaactaaacaaatttactgataacatgctgttacaaataaagtactgtaaatggctttgagtttttgcaaaatccagatttaagctgctttataaaaacgagatttctaaaaagtcatgtgacaaaactgcatgacatgtaaataacatatcacattgttgagagtctaggggagctgttttgacactgtgtatatcattggattcactcagtcttccagaagactaccgttggtccagaaaactgtcatatcaatggatgttggttttccaggaccttttttttcacatataataaaacttattgaaacgtaacagagaagtgcacaattttaagtgttcagcttagtgaattttcacaaaataaagacacacattggccaggtgcggttgctcatgcctgtaatcccagcactttgggaggctgaggggggagcggatcatgaggttaagagttcgagaccagcctggtcaatatggtgaaaccccatctctactaaaaaatactaaaattagctggcatggtaacatgcgcctgtagtcccagctacttgggaggctgaggcaggagaattgcttgaacccgggaggcggaggttgcagtgagccaagatcgtgccactctactccatcctgggtgacagagtgagactccgtctcaaaaaaaaaaaaaaaaaaaaaggcacacatggtatcactactagatcaagaaataggaattactggtgcccaagaaatctccctcatccccctcagttattttctaataccccaaagataactgctatactgagccatagattagttttgcctatttttgaacttcatgtgagtgaaataatactgtatgtactcatgagtctggcatctttcacttgacattgtattattgtgagagtcatccatgttgtgtgtagtagtagtttattcccgttcctgtacaatagttcattgtatgaatataacacaatctgtttatccattttaatattaatggtcattgaagttttttggttattatgaaaagtgctgctgtgtgtcttttgatgctgtatgtgtccctttagatgtatgtgtttgtttgtgtgtgtttaattttgtttggatatctattaaggattggaattgcctgattatagagtatatacatgttctgcgttaatgggtattgttaaacatttttccaaagtggttgtttcagtttatattctcaccagcagtgtttcagtgtttcagtttttttgcatccttatcaacacttggtattgttaaacttttaaggtttagcaatcctagtggatgtttagtggtatcatgataatggatttaatttacatttccctgatgactaatgaggtttcactttttttatttgattattgttaatttgtatttcctcttttatgaaatgctgattcaagtctttttcccattttttgactaggttttatgtcttactgattttgtaggagttctttgtgaattctacacatcagttttttatccattatatgtattacaaatttctcactgcaggactttttattttcttaatgagcacttgaatgtaaacgctgcatgctgggtacagtggctcatgcctgtaatcccagcactttgggaggctgacgcgggcagatcacttgaggtcaggagtttgagaccagcgtggccaacatggtgaagccccagctctaccaaaaatacaaaaattagctaggcatggtggtgcacgcttgtaattccagctactcgggaggccgaggcacaagaatcacttgaatgcagaggtggaggatgcagtgagccgagatcgagtcactacactccagcctgggcgacagagtgacagagcgagaacgagattccgtctcaaaaaaaaaaaagaaactaaacgctgcagtaagacagtttgatctcagtatagtagaaaagtagtctttaccgtttaccttttaggtccaatggaccctttgtattttaaagtttaaagtaattttacaaataatttacagaatttaagaataaaggggccgggcatggtggctcacatctgtaatctcagtactttgggaggcctaggcgagcggatcacttgaggtcaggagtttgagaccagccaggccaacatgggaaaaccctgtctttactaaaaatacaaaaattagctgagcatggttgtgcacacctgcaatctcagctactcaggaggctgaggcatgagaattgcttgaagctgggtggcagaggttgcagaactgcaccactgtactccagcctgggtgacggagtgagagtctgtctcaaaaataaaaataaagggatagtgaaaaaaatgttaaagacaaactcttttcatccattaaatttgggcacacaaacatcttaaaagatgaaataattctgtcacataccctttttttttttctttttttttgagatggagtctcgctctgtcgcccaggctggagtgcagtggcgcaatctcagctcactacaagctccacctcccaggttcacgccattctcctgcttcagcctcccaagtagctggaactacaggtgcccaccgccacgcctggctaattttttgcatttttagtagagacggggtttcaccgtgttagccaggatggtctcgatctcctggcctcgtgatccacccgcctcggcctctcaaagtgctgggattacaggcgtgagccaccgcgcctggccttctgtcacatatccttttagcaaattgagatggtccaggttcttgccacaaaatatgtgataagataaggtccttcctgtttaataactaagtgaattaccacaccacatttcctttctgttcttagaaatatattgtcagctgggcatggtggctcacacacctataattccagccctttgcggggctgaggcaggaggattgcttgaggttaggaatttgagaccagcttgggcaacatagtgagaccctgtctctacaaaaagtaaaaaattagccaggcttggtggcatgtgcctgtggtcccagttatgtgggaggctgaggtgggaggatcgcttgagcctgggaggccaaggcagcagtgagctgtgcactgcactccaacgtaggcaacatagtgagatcctgactcaaaaaaaaagaaagaaaagaaaccgtaaggctacaagtattattatttactttttcttcttttatttctttaaccttttatttttaaatcaatactccatataaaactgattttatatagcgtgaggtaggggtcaatgtttattttttccgaataactatccagttcaccccaacaccatttactgaagaagtcatccctactactttgcagtgacttcatcataaattcaatgtttaaatgagtttgtttctggactctccattcctgtggtctatttgtctgtctttgcattagtgtcatattttaattactgtagctttacaataaatttatctgttagtgtaggtcctccaattctgtgcttctagataagggattggcaagctttcttttttattttttcttgagacggagtctcagtctgtcacccaggctggagtgcagtggcgctcactgcaaccactgcctcctgggttcaagcgattctcctgtctcagcttcccaagtagctgggattataggtgtgcaccaccatgcccggctaatttttgtgtttttagtacagatggggtttcactgttttggccaggctggtctcgaactcctgacctcaggtgatccatctgccttggcctccctgggtgctgggattaccggtgtgagccatcatccctggcctggcaagctttttataaagggccaggtggtaaatatttgtaggccttgtgggtcacatttggtctctgttaaatatttttctttcttttcttttttttttttttttcacatttaaaaaaaattttattgaggcagggtctttactctgttgcccaggctagaatgcagtggcaggatcacaactcattacaactttgacctcctgggctcaagcagtcctcccacatcagcctcccatgtagctggaactgtagatgtgtcccaccatgcttggctacgttattttttgtagagatgggatctgcctgtgttgtccaggctggtctcaaactcctgggctcaggccatctgcccaccttggccttccaaagtgttggtattacagacatgagccaccatgtgcagcctttttttttttttaaaccttcaagaatgtaaaaaagatcacttttaactgtatttggaacataggccatagtttgctgacccctgttctagattgtcttgattattcttattagaatcagcttgtcagttttcaaaaacctgctagaattttgatgagcattgcatagaatccattgaccatttggaggaagaattgaaatctttataatatcaaggcttctgatcagtcacaactatgttttgactggctttaggattggaattgtggactttttccattctatagctatcttactaggattagtaagggactgtgagtgctataggttttctttatatttccatttgttatggttgttcttgtttatagtgataacttatctttgggaattttaattttaggaccttggttatacatatttagaaaacaggtgctatttcacgtgaaaagaaaacaggaaggaatttaattccaaaatttggtatcttgtaattcccatggtttgttaattttaatatgtttctgcaaatagtataatacataaaataccttctttaaaagtatttgtataactgcatcatacctcttaggtttttacattttggagttttatatcaaattttgaaatttttataattctaaggtatttatacctagttttaggggttttttaagagatttataacacacttaactatacaaataaacactttctaaatacttaaaaccagatatttgcttatttttctttttatcttaccaaggtacaatgcatgcgtttttatgtgattgtatttagtgaatttatgtaatgtttctactatattttaaatacatgtttttatatgtcaaaagggtcatagtatttcattatatttaaaggtggcttattttcatacagatttttaatatgagtatctcttgatatatttgttacaaagccttaaaaggtctctagttttataaatgaaaacggttttgagtctgtcattttgtaacatctttgaactttgaaaatttgaaagtccagtaatagacaggtgcagtggctcatgcctgtaatcctagcgctgtgggaggctgaggcaggtggattacttgagctcaggaatttgagaccagcctgggcaacttggtgaatccgcatctctaccaaaaatacaaaaattatccgagcctggtgacataaaaaattagccaggcatggtggcaggcacctgtggtcccagctactcgggggactgaggtgggaggatcactggaacccaggaagtctaggctgcagtgagctaggatcatgccacttcattccagcctgggtgacagagtgagaccctgtctcagaaaaggacaaaaaaaaatcaaatagtgataaatatttgccatttatatgtagtgttgaaagtgtatttcaaatggtttcaacaatttctggcccccagaatgaaaataaaatgatgggccttggctgttgatcagcaatttggtctgaaaacaaagcaccctaccctttcaacccttctgccatgtcctcttatctgcacaccttttaatgcctcctacttcctttgtcctttcttctggcttttacacatgctcttttctttgtctggaattcccttcttgccattctttgctttatttattcctatttttcctgccctggggcagcacttcagtaattacagattgggattatttaatgaaatcagacattgggaatactttggttagcaagacaaacatgttccatatttatcaaattctgttctaattgttgagttaattgtctcactcttcctgtggacagtgaactccttgaggttaggcatgactctctttttagcaccagctcattacctgacaatcagtatgtgttcagtgaaagttgcttcttccaaaatgtcagtcatggataaaattctcaaggcattcacaattttgttaggaagggactttgctcatatttagaatttgattagaatactagataacatgttaataaggtctctcatggactcttgtacattgtggaagatagtcttcttttatcacttatgtgaacaaataattgctacatttaatacatagcaaatgattttatacaactttaatgatctgatatattattgaggcactttaaattaataagtgtaattccgagaaaggaaccacaccttcacaagccctaaagcggcatacttttttttccttctgtaaatatatactctccatccttagcattgtgatgtatatactttgacaagtttctggtcaccttctttcgcctttgcccattatagctctgccaagccttcactacttcgcatagaccatctactctagtgctgctttctcaatcttagcaaacatttttattttgcattatatttataatttagcttcctgccttacaggaaatcaagtttacctatcaagcccagtaaaacatctcacttctaacccttagctttacttagcatgctcataatcttgtagtctcaggagaagcggcccttctgatgagagctaatcctctctctgtgccctttaaagagatacagtttacatttttatcaaagtgattcatatgcatggtttaaaaaaattgggccaaatggccacccactgctccatgccctccaaatgtttttgccaatggcatcctctttcaattatttagctgtttcttttggtcgccatcttcatagcactaaataattatgttgcccttttcactacttaaacacttacacattttagatattacatatttatttaactgtcctgaaaaataaagttttcgttcttcctcaacactctgccatatgggtgttaactacagcattccccttgctgaccctccggaatgtgatttgctgtttatcgaatctcatggcttcctgttaccattcagtacctccatttcctggagtgcatgctcaagtaacttgctaaggaagtgtgggtgaggggtaaattttctgagtcgtcctgtatctgacaatgtctttattctaatctcacacttacttgctaatttggatataaaatatgatgttgaagataattattcctcaaggttttaggatcattgttctattttgttctatcacattgtgtaggtgttatactgttctgattcttttcctgttttggtgacctcctctctcccaaacttaaaaaatctctggtattctgaaatttcagtgttttttgtttgcttatttagttttattattaattgtactgagtagtcagtatgctggcccctttctgtctagagattggaatctcttaactttgggacatttctttgtgctatttcttcattcattttttttctctcgttttctgtttctggaactcttcattagtaggattttggatctgttggattgattatctttgtgccttttatcttacattttgttgtacttcctgagatactttaacttctagtcctttattgcatcttttattttgagaattggaaatttttttttctgtggttcttctggcgttgatcttttttataaatagcacattgttcttgatttatagatgcagtctctttaagaatctctctgaggataacaatttgagttgaaagttcttttctgctttttgcattctgttttctccaaattcagatcctatttatttatctttagtttttctttcattttggacgtgttcctcaaatatctagcaatccttggctgtgcatttatgtttaagcatggaagacactgacaaactgattgggagctctgtgtatatgagaggggcttgttacctgtcaggtttctgctttatgtgaatagggtaaggaactgttactactgctaggggactctcaaattcaaggatttaagagacattcagcctaaggaaaggctggttgatggttccgaatatagatttacgtatttttagccccaagttttactcctttccttccctagcaccccctagtgtctgagaatcctgaccttctctgaggttctctgggcaagccagccttcttttgattttatccctttctgccatcagtactctaaactggtttcttcctgctctgtaagttaccactcatatttgttctttgtctttcagaatgtacaaacaagattttcatcttctgattacctcctctctctgtttattatgggtttgtgtatttttgagttccttgcaatgggtttgtaaaaggtcaacttggctgagctaaactccatttcccaaaattccctttctctctcttttttttttgagacaaagtctcactttgtcacccaggctggagtgcagtggcaccacctcaggctcactgcattctccacctcttgggttcaagtgattctcctacctctgccttccgagtagctgggattataggcacacgccaccatgcccagcttaagttttctattagtagagacagggtttcaccatgttggccaggctggtctctaactcctgacctcaagtgatccactcgcctccgcgtcccaaagtgctgggattacaggcgtgagccaccgtgcctggcagtctttcccatatgtttctgattaggttgggtcacagggagattttcacacctaacatgagacatttattgctggacaaccaaaaacattctctttccccagaaaagcacacaaagtcttttttttttgtctttaagataatattagttcatccttctccacctgattcacactccctctttcatgttctgtaacttaaatactgaaatataaggttaactcttattaacacatgttagataataaggaagaaaactaatgaaccaaaaaatatttggttaatacacacacacacacacacacacatatttaaacacaaatatatcaaattaaggaagaaatatttgtaactattgtagtccatatttctgcaatggtcatgtggtcatagctggtatatatgttcttccactactcattccatattccctttgctctaagtaagtacttcagccagttcggattccttgcctcatggggtgacccaggctttcattcttgaaagatatgggctattagcagttctttctgaattacttctgctgtttgcagttctacaaaaccctttgcaattttccgtggacttgaatctcaggacatgggaaatactaagagatgtcctagaggatctcttgcatttcagacacacttcacttcacctgtattgtgcaatagtcactcaaattcctcttgaaagttagggtcagttatccccagtgaatacagtaaccctctccattgcctcttgatttggaacttcagagtaaagttggggtctcaacttcaggttagtggaatcatttgttgtgtcccctagtggatgtgttcgtctctttgaaactagacttttagaacaacaaagcctaaagtcacagggataggaaataaatattttgccaacactgaatttattagtcttcattgatttcccaaagaaatgaaagaaaaagcctcctagcactcattaaaagtcatgaaaggcatcactgtctactactcagtcacctaagccagaaaccttggaatcatcttaaattcttcccttacaactatcattttatttctactggtgacaaaatcctatcaattctaccttattttacatctctcacttttatcccctcctctacattctcatatcagtcactgccttagactaggcatcaccttcacttacccaaattgtaaagatgatctttaaactttttgtctctgtccactatttttctgctaaagcaatcttttaaaaatcagactatatttagtggctctaagtgcttataaggtaacaccaaactccttaaccagctgaattaatttatctgttataatcgagatccaagtcagatggctttaacaagttagaagtttattctctcttaggacttaggtgatggttcaggaatccagttccttctgatttacctggtcttggatatttcaccaccatgtcagaaccagcatgaaaaaggaaatggagaagaggaggatgtgccctttcctttaaggggacaacccagaagatgtgcaaatcattttcactctcagctccttggccagaacttggctgccagttctagctgcaagagatattgagaaagagagtcttgtctggggggccttgtgtctagctacaggaggcctgttattgtagataagtggggaatgggtattggaagaccaccagtagtctctgccacatgaggcatacacaatcttctggagagtgatcctcgcttacttctttaccttattttttagtgtgctgcttttccacatttccctctttatcagctctcttgactctgtttcccctttgcattagccatgctaaactatttgcacttccaaacatgctctgctgatacacgtttctccgcctttcctcttgcttccttagcttgaggtgcccttgccacatactttcctcatctccaactcattctgtcagcttgatttcagagaagttgtcttttaaaactcaacataagcctctccaattctgttttccttattgtgtacacatagacttgagacattacatctcttggtacttatttacacttagattatctttatattttgttgtaaactctttgagggcacatatgacattttattcttgtatctcttggatgtaatgtaatgcctgacagataaaggatgtgtactttctttttactggatgagcaagtgggtttatagcaaaaataactgtgcagactttttaaaatgtcagaacctactcttaagatagggctactgtttcttttttttttttttttaacttttgtcaatcaaaatgttagtgctagctctaacaatatttataatcatcctatattttcttgttagtcttttcatatttagtttttagttacaatttaattccagaagtgctcagagttagttatggaatttgttaatttttttctctttaaaatgagcagccttttctgtctcctaaggcacagtatttataattgcttttttttttttttttttttgagacggagtctcactcttgtcacccagtctagagtgcaatagcgtgatctcagctcactgcaacctctgcctcccaggttcaagtgattctcctgcctcagcctcccaagcagctgggatttgcaggcacctgccaccacacctggctaaatttttgtattttttttttttttttttttttagtagagatagggtttcaccatgttggccaggctggtcttgaactcttgatctcaggtgatctgcccatctctgcctcccaaagtgctgtgattacaagtgtgagccactgcgccaggcctgtaattgctttttaaccgttcagtatatcagtgacttgcggcaggagatgtgttgaagtaagttagataatactgacatgatttccaaagcctgtcctaagaccttctgagcactgccaccttaacatactggttctaagatattggtgactcaggattaatttaatgactgaaaagagtcattgttgtaaacaaattctaaggcaagagtgccttaaatattcttacatggagaattttttttttctgctttactgtcttgagtaatatcttttgttttacttgtagatttgatggtcctcgaagatttgaggatttagggtcaaggtgtgaaggaccgagacccaaagggcctcgttttgaaggaaatcgccccgatgggccaagacccagatatgaaggtcacccagcagagggcactaaaagcaagtggggaatgattccccgggggccagcatctcaattttatattacccccagtacatccctaagtcctcgacagagtggaccacagtggaaaggccccaaaccagcttttggacagcagcatcagcagcaacctaagtcacaagcagaacctctttcaggaaacaaagaaccattagcagacaccagtagtaaccagcagaagaattttaaaatgcaatcagctgcattttccattgctgcagatgtaaaggatgtcaaggcggctcagtcaaatgagaatctaagcgactctcaacaagagccacctaaaagtgaagtctcggaagggcccgtagagccctctaattgggaccagaatgttcaaagtatggagactcaaatcgacaaagcccaagctgttactcagcctgtaccccttgcgaataagcctgtacctgctcaatctacttttccttcaaaaacaggggggatggagggaggaacagcagtagcaacatcatcattaacagcagataatgattttaaacctgtgggtattggtctaccccattcagaaaacaaccaagataaaggcctgcctcggccagataatagagataatagattagaaggcaatagaggcaacagctcatcttacagaggtcctgggcaaagcagaatggaagacacacgggataaaggtctagtaaacagaggtcgcggccaggcaatcagtcgaggcccaggattggtcaagcaagaagactttcgggataagatgatgggtagaagagaagatagtcgagagaagatgaacagaggagaaggtagccgggacagagggttggtgaggcctggaagcagtcgggagaaagtgccaggtggtcttcaagggagccaggacaggggtgcagctggcagccgagaaaggggaccacctcggagggctggcagtcaggagaggggacctcttcgaagggctgggagtagagagagaataccaccccgaagagctgggagcagggagagaggaccacctcgagggcctggcagtcgagaaaggggactgggaagatcagattttggtcgtgatagaggtccattcagaccagaaccaggagatggtggggaaaaaatgtatccatatcaccgggatgagcctcctagggctccatggaaccatggagaagagcgagggcatgaagagtttccattagatggtagaaatgctccaatggaacgagaaagactcgatgactgggatagagagagatactggagagaatgtgaacgtgactatcaagatgatacactagagctctataacagagaggacaggttctcagcaccaccatctcggtctcatgatggagataggcgaggcccttggtgggatgattgggagagagaccaggatatggatgaggactacaatagggaaatggaaagggacatggacagggatgtggatcggatttcaagacctatggatatgtatgatagaagtttggataatgagtgggacagagattatgggagaccactggatgaacaagaatcacagtttcgtgaacgggatattccatctcttccacctttaccgcccctcccacctcttccacctttggatagatatcgggatgatagatggagagaagaaagaaatcgagagcatgggtatgatcgagatttccgtgataggggtgagttgaggattcgagagtatccagaaagaggagatacatggcgggaaaagcgagattatgttcctgacagaatggactgggaaagagaacggttgtcagacagatggtacccatctgatgtggatagacattcccccatggcggaacatatgccctcctcacatcattcctcagaaatgatggggtccgatgcaagcttagactctgaccaaggccttggaggggtaatggttctcagtcagaggcagcatgaaatcattttgaaagctgcacaagaactgaaaatgcttcggtaagttgactccttcagatcctttcttttaataaaaaccacattcagactgctctttttaaagtgatatgatatatttgaatggaatcattttacttcaagttcttatcacatacttttaatttatatttctggtcattcagtgctgttttagggttagaatgggtatttaggaactgtgttaatgataaacttatgccctaagatgtgaaaattgattgctgtcttggcctttgtagaagtgttgctggcatgccatgcctgtgcatgtttcaagtgtcaaacttcaacttttcagtgctctggatttcacagggttcatgtgtaaccttcattttttccagtaatcagtttgttctttggtattagatctgatagactttatattcactaatcattgataaaactttggaaagtgctgtatttttctttgttgaagctaagaatggtttgcttaggagcatcctcagatttgtcttaactattgatactttcttttggggatgttttatctttcattataactaaaagcagatatttctccttgaggatgttatttgtttctacataaccaaatgttttctttgtgaaatggaaaataggatttcttgacttacaatcaactgtgtataggtatctacataattttcctcttttcttgtggtaacaacaataacaaaagctaacatttattgcatgcttactccgggccaggaactgtactaagtgtgttgtgtataataaactcatttaatccttaaaccagctgtatcttgggataggaatttagaagtcagtgacagattgaaaacttttttaaagcaatttttttgagaaagtcaattaatgattaggttttgataaattccaatgtatttcttccatttttcaattctggtttacatttgtggatcttaacaataaattataacttaaactttagaactaggaaagaaaaatacggtgaagaaaaggtaatgatgaaagaccagatacggcaggtttgtatggtctatagctaagaggtttattttttccagattactcatgaagaaaatgtggaaagcatgctatagaatatttagctactacactattcacttttaagttatagacacctttaattttaacacctaccgtgtaactgggcacttgctaataattgagtgtatattatgtcagtctgtctatctcaaaggcctgcaaagataaggtagtattatccccacttcacaaatgacactaaagttcaaagaggttaagttcccttggctagtaagtggcaaacccggcctttgaactcaatctgtctaaaactctaaaatctgtgttatttatggagaataccaagctgattggtgttgttaagctgccaaggtttctttttttttcctttttaaatttctttttaattcgttattgctttgcatggtaatgctggataaaaggtgctgctgctgcttcatccttttttaaagctttctaggcaacatgaacataattaaacaatatatagggagtgatggataatgtcatagccgaatacaagtcgtttatgttgtgtcagtgtaaagtcgtaaggagtatcataagggatgtgatgatgggatttacctgagcagtaaataatcttacacacttgacccttactttgtggtccctcatttgtggaccctcatttgggtcactttaatgtaaggagaaaattgtaaaaggtcttaagaaattgtagtggattttacctatgtttaaggtaggcattgtgaaaaaaagtaaaaggaatttcgtcagtttaaagaaaaaaccgaaggattacataattatcttcaggaatatgaaatgttgtttttaaaggtatagactgacagttgttctcaccatctacagcaggggccataaattaaaatgtccccaagaatcagataacaaaaatgagtgaaagtgggccaagtataactctgtagagtacggtgaagattgtgacaggttgtttcatctaacatgggcagcctctactgcactcagctgattgttggcatgtgggaatgtaggcctggtgttaccatatctctttaagatttgaatttatatatgaaatattttgctttgtaaatatgacagctaatttcaaattttaaaaactgatgtgaaagccacattttgaaaacctttttaggccatatttggcccatgggccaccattttgcaacctctggtctaaagagttgaaaaaaataggccgggcgtggtggcttacgcctgtaatcctagcactttgggaagctgaggcaggcggatcatgaggtcaggagttcgagaccagcctggccaatatagtgaaaccccgtctctactaaaaaaatacaaataattagccgggcgcggtggtgcatgcctgtagacccagctactcgggaggctgaggcaggagaatcacttgaacccgggaggcagaggttgtagtgagctgagatcgcgccattgcactccagcccaggcgacagagtgagactctgtctcaaaaaaaaaaaaaaaaaaatagcaagagagcttttggttggattaaagaaaaacataacaagtagatgagatagtagaaaacaactgaggcaggttgtagaatctattcttgaatatcttcaataatttataattatttatatgtcttaaatgactgatgagttagctacataaaagcaaaagagggtaatcctggagctgctcagtgtatggccactgcagagaattttaggacaaggattttttaggtctcctttttttaattaaatattaattgtagtcacttaggaatggaataagcatgctttatgtactatgtcaattttatttgtttgcagggaacagaaagaacagcttcaaaagatgaaagacttcgggtctgagccacagatggctgaccatctaccacctcaggaatcaagattgcagaatacatcttcaagacctggaatgtatccggtatgggagaatgtgtgctcagaaaatgaaatggtttctactttgtatgtttctatgttgtttgattttttttagaagttgaataaataacaaatttcctctataaaatgtaaattttggaaacttaaaagtttatggtaattgaactttgaacaccttaaaagcatgttcaaaagtgtggtagagatgctccttttccccagattttgataagtacaccaagtacacctgaactacatagcttctgttcacaaaatggtagaatttttctaataatttttatgttaaaatagtcctgttggctgggcatagtggctcacacctgtaattctagcactttgggaggctaaggcgagaggattgcttgagcccaggagtttgacaccagccttcgcaaaatggtgagacccctatctctaccaaaaaaaaaaaaaagtcctgttttccatctaggcagggctagatgtgggcctcgtgatgcttcctacctcttcaggctactagtccttcagatggggaaatgtcataccccagtacatacttcagaactgttcaggcagtatgaaaaggggtgtttatgttaaagacttgagtaattaagttctcctttttttcccaagagcatgccaggacttcttttatttttgttattttacctttaagccagtaatgggcttttcaaatgtttaaaatgttatcttgcaggtagttttatgacagcataatgaagaaaacagctctactgaacctctactgaaccatttcatcaaattaacacttttcatttctcagtgttcccttccatcctggtctaatacttaacagtaagacatagttgttgacatcagtgaccaccatggtgttgttgactccccagatcggatctcctgacctttgtacgcatctacctgtctgcagggtttctgtctgtggatgtgactcctgtcaaatgcagcatattcaaaatggggctcgttatcataccccattaaattgtcttttttcctcaccatcacctagtcaccctaacttgaaacctgaaaatcaaccctccatcttgctccatcttgctgatttgtcctaccctgctgctgattgattttacctcctttgaatcaaattctcaagtataattacacccattttaagcctatagttcgagttttgacagatgtataccaaaagataaaaaaattctcggccaggcgcggtggctcacacctgtaatcccagcactttgggaggccaaggcgggtggatcacttgaggtcgggagtttgagatgagcctgaccaacttggagaaaccccgtctctactaaaagtacaaaattagccgggcgtggtggcgcatgcctgtaatcccagctactaaggaggccgaggcaggagaatcacttgaacccgggaggtagaggttgcggtgagccgacatcgcgccattgcactccagcctgggcaacgggcgaaactccatctcaaaatcaaaacaaaacaaaacaaaattctcatcaccctaaaaagttctctcatgcccttttgagattgggactacccctatactccacttcaggcagcgtcgatgtgatttgtggccagatggacattttaaaacaaatctcaccatgtggctacctggctttaaaacttcaatgttctcccatgccttcaggatgaaatttagaatctcttgcatgactttcttgttcttcctgagctggcctgacctctgctgaccattgcttgctactccactctctgatgcttcattttccctccacatagagctacttaacaattttgtgaatgtgctagattcttttacttcttcattcctttgcgtatgcatgttgttctctaagcctagagtcttttctttgccttcccatcccctcctgcaactggctaatgtttgtttatcttttacaactcagctctactattttctcttccacctatgtagggcaattacccttgtacataccctgtaacatcttgtactagtctttgttgtcatctttattatgttgcattttgagtgtctgttttcttgtctttctttctaaattgagtccataagataataactatatctttcatctttgtgtgtcttagtaaatagaagcgccagattgtacatccacatttctgctttatttgcttaacaaatcataatcatctttccatattgttatatgctatattattttttgatttacaataatttattgaattaattcaatttctgttggaatttgtttctaatctttcactgttattcttaatattaccctaatgaatgtctttgtattgggttcttattttagataactccttttcttttttccttttttttttttttgaaatggagtctcactctgttgtccaggctggagtgcagtggcatgatttcagctcaccgaaacctccacctcttgggtttaagcgattctcctgcctcagcctcccaagtagctgggattacaggtgcctggcaccacacctggctaaattttttgtatttttagtagagacagggttttaccaattggccaggctggtcttgaactcctgacctcaggtgatccacctgcctcagcctccgaaagtgctgggattacaggcatgaaccaccgcacccggccaataacttcttaggagtaagttttatgtttttgttttgtctctttttttttgctctgttgcctgggaggctggaatacagtggtacaatcatagctcactggagcctcaaactcctgggctcaagtgattctctcacctcagcctcctgagtaactgggactacaggcacacaccctacgcctggctaataataaaaaaaaaaaattgttagtagggacagggtctcgcgttgttgcccaggctggtctcgaactcctgggcttaagtgatcctcatgccttgtcctcccagagtgctgggattacaggtgtgagcccctgcacccagccaacagtgattttaacgtcccaaagtgggacacttcagtcaaagaataagcatactttttttttttttttttgaaacggaatgtagtctgtcacccaggctggagtgcagtggcacaatctcagctcactgtaatatccacctcccgggttcaagtgattctcctgcctcatcctcctgagtagctgggattacaggtgcctgccaccattcctggctcattttttttgtatttttaatagagatagggtttcaccatgttggccaggctggttttgaactcctgacctcaggtgatccacctgcctcagcctcccaaagtgctaggattacaggcatgagccaccacacctggcccagaataagcatactttttaaatgattcctgtcacatagccaaacagctctctataatagttgtataatggccgggtgtggtggctcatgcctgcaatgccagcactttgggaggccaaggcaggtggatcacaagaggtcaggagttccagaccagcctggccaacatggtgaaaccccgtctctactaaaaatataaaaatcagctgggcttggtggcatgtgcctgtaatcctagttacaggtgaggctgaggcaggagaatcgcttgaacctgggaggcagaggttgcagtgagccaagattgcaccactgcactccagcctgggtgacagatcaagactctgtctcaagtgcatcacctgaggtcaggagttcaagaccagcttggccaacatggtgaaccctcgcctctactaaaaatacaaaaattagccaggcacgcgccaggtggtgcgcacctgtaatcccagctactagggagactgaggcaggagaattgcttgaacctgagaggtagaggttgcacatagcgccactgcgctccagcctgggcaacaagagtgagactctgtctcaaaaaaatatataaataaataaatgaaaaaaaataattgtataacatctatactatagcctcgtaagcattagctacttaatatttttggtatatttaataattttaatacagcatttttgattactagtgaacatgaatattttcccatatttgttaattatactttcctcttacagaaattctgtttgtgtccttcacccatttatctgtttgagtcaggttttttttttttaaattaactcattatccttaatataatatagatattaaccctttctcatataaacaataattttaaaaaatgtatcttttactttcactatatagaatgaagaaagcagtttttaaaaaatttataagtatacatctatgagatcttaagatatttaaaacttgtcttgatagatctacccagactgaatagcttcatcctatattggcattttcttgacaaagtttaccatgccatactttaaaagtttacctttaggtaatagccatttgtctttaactgtagccagtagttacctccagtcaaataatgttccttctgtattagtcaactccattttattattcagaaagtttatttttaaagtactgtgtatatatgggcaaatatataaataatgtatattgtgggctctccaggatctaaaatagcgtcaataaagaaaaaacatcctagaataacagagaagtaaaaaaccaaaacaaaacaaaaaacaaaaaaataaaaccaaaccagccagacacagtgaactaagaaatgggaagtaagtgtttgaatcacacttacaaagattaaaatagagactaggcatggtggctcacacctgtaatcccagcactttgggaggctgaagcgagaagattacttgaggcctggagttcaagaccagcctgggcaacatagcaagaccccgtctttaccaaagaaagaataaaaataaaatgtatttggcaactgggtttcaatattgagtagataggaccaatttgctaagaagtcctaccatctccatcatagacatttctgatggtaactggtgatgctttgggaaaacaaatggaaggagggcacacaacagtggcactccttagattactagatgttcatttagtttattttgttgtttcatagtactcatgttctctgttggtctcagcttcaccacagatgactattgtcaaccagataactgaaaggaacagaagtgtggaggctatctaggatttctctcactgaaaatttactgtttttgtggaggagataggtctctagagtaggaagatagttcttatttatttattcatttctctccttcctgcacactgagcataggaagatagttcttaaccgagggttataaatcagaattattcatggagggtttttttaaaattttgaattactggtgggaccccacctacagaagttcagtagatttggtattggcctgggacatttgaatcttacgtggctaccaccctaatttggagtatggaaattttaaaacgttttcattacccctgtaagatcactgcaccagtttacagttagttaatcctcattcctaccccagtcccagcactttctgtctatatagatttgcctttctgggcattttgtataaatgaattatataatatgtagtcttttgtgtctatcttcttttcaaagtttacccatgttgtagcatgactcagtacttcatttctttttactgctttttaaatttctttttatttataacctgttacatgaatataccacattttgtttaaccattcaccagttgttggacattagggttgttgaatagtacggctatgaatgtttgtgtgcaagtctttggatggacatatgtttttatttttcttggatagataccgagaaatgaaattgctgagccatatgataaatttatgtttggccgggtgcggtggctcatgcctgtaatcccagcattttgggaggctgaggtgggtggatcgcctgaggtcaggagttcgagaccagcctgaccaacatagtgaaaccccatctctactaaaaatacaaaaaatcagctgggcgtggtggcgggtgcctgtaatcccagttactcagaaggctgaggcaggagaatcacttgaacctgggaggcagaggtggcagtgagctgagatcgcgccattgcagtccagcctgagcaacaagagtgaaactccgtctcaaaaaaaaaaaaaaaaaattgtgtttgactttttgagagaaattggcaaagcattttctatagtggcaccatttattcccactaacaatctaaaagggtttttctttcctatatccttgccatcatttgtttttgtctgtcttattaattataaccattccagtgcatatgaaaatggtatctcattgggattttaatttgtgtttccctaatgactaatgatggtgagcatcttttcatgtgcttattgggcatttatatattttctttggagaaatatctattctcatcttttggccatagtttttttttttttatgatttgtcttaccgagtttaagtgttttgtatattctgaattcaagttctttatcaaatataagatttgcctatgttttctccctttctgtggcttgtcctcattttttttgatggtatgttttgaagcacgaaattttgaatgagtccaaggtgttaacttttttcttataaattgagaaccagattttaatttccactgatctataaaaacatagtggtatacttgtccactaagctatttattctgttctctagcctccagggtcgtatagacctccccctcctatgggcaaaccaccaggttcaattgtaagaccctctgctccaccagcaagatcatctgttcctgtgaccaggccacctgtcccaataccaccacctccacctcctccacctctacctcctcctcctccagtgataaagccacaaacttcagctgtagaacaggaacgatgggatgaagattctttctatgggctctgggatacaaatgatgaacaaggactgaattcagaatttaagtcagaaactgcagcaattccatctgctccagtattaccacccccacctgttcactcttccattccccctcctggcccagtgcctatgggtatgccaccaatgtccaagccaccaccagtacaacagactgttgattatggccatggccgaggtgagtaatgatagtgcacttgtatttgggattctacaggaattgttagcttcagctttagctttctctagcttcactcttacagtactttatctctgattttgtttaccagatatatccactaataaagttgaacagataccttatggagaaagaataactctacgcccagatccactacctgaaagatcaacttttgagacaggtaggattcccagagaggtcagtatttttaaacattttagggcctaattatcacatgattttccttttggtgagattatctgagcctccatttaatacagctaaaagattcttagttgaatttatggcaaaaatttataccagctctgaagttagatttatagttttctgcttttatttctataaaagggatatagttattttgtactaattgtttttgtagagcatgcaggccaacgtgatcgttatgatagagaaagagatcgtgagccttattttgatcgtcaaagtaatgtcatagcagatcatcgagattttaaaagggatcgtgagacacatagagatcgagaccgggatcgtggtgttattgactatgaccgggatcgatttgacagagaacgccgaccccgagatgataggtatgctataaaacaatctttgctaggtgtacaaattactgtatacttaacagtaaaagtttaagagaaatttaataagtaacatattcttctcatgcatgtgtatatgtaatttggagggggaagaacaattctggaccagttttcaggaaagtaggtccttgacttggtagcttgaattccagagaattaaatgggagatggagatagccagaagggaatggaaatggtattgtcaataaaggtgcagtcatactcagtaggcaagcaatttatttttgcaattcatgagctttttatttattattattattattattattatacctaagggcattctggcagccagccaaggaaaagggaaaggggggcaagcccatgaactatttatttatttattcattactattttgtatggagacggggtctctctcagtctgtcacccaggctggaatgcagtggcgcagtctcagctcactgcagcctccacctcctgggctcaagtgatcctcccacctcagtctcctgagtagctggggccacaggcatgtgccaccatgcctggctaattttttttttgtttttgatgacgatgtggtttcaccatgttgcccaggctgatctcaaacttctgagctcaagtgatccacctgcctcggccttccgaagtgctgggattataggcgtgagccatcatgcccagctttcccatgaacttcttagatgtatgtatataaagtaaatctaaatgaaaaagcaaagtcaaaatgtaaatattggccgggcgtagtggctcacgcctgtaatcctagcactttgggaggccaaggcaggtggatctcttgagctcaggagttcaagaccagcctggccaacatggcgaaaccccatctctacaaaaaataacaaaagttggctgggtgtggttatgtgcacctgtagtcccagctactcaggaggctgagatgggaggattgcttgaacactggagatcaaggctgcagtgagccgagatcacgccactgcattccagcctggttgacaaagtaagaccccaatctcaaaaaaaaaaagtaaacatttactgtgtggagtaccttcctatagagaaaattgggcagttaatgctgttgcgttataaagcagagaaccccaaatattttttatttgctgaagcgcttcctattacaccttctagagctcagtcatatcgagacaaaaaagaccattcctcatccagaagagggggttttgataggccatcctatgaccggaagtctgaccgaccagtctatgaaggaccatccatgtttggaggtagagtgatgccttattaactacaaggatgttgagaatgtaaagcatgggagatgctttccattgtagctatgaatttaaacttttagagtaaaacgtattcacagatttcttagagctggtggcattgtcctaaaaaatagcagtgtaattaatgaaataaagcatgtttatttttaaaacaaagtagaatcaaaattactgatagtctcactacctaccatactacagctattataattttgtagctttcctctcattcgctctttacagacatatttatgaagttgtaatcaaagtataataatacaatttctttatcgtgattgttctgattgatattgcaccatacacatttttcatatgtaaacctattttattaatggctctgtgacattccattgagtggataaaatataagaccaagacccttattcttagttatttaggttgcttttagtttttcactgctatgatttacacttaaactagaaactcatacctatttttaggaacaggctctcctaagatggtataactcttactcttaaaaccataaagcagaagttacagaacttaggactatccagcaaagcatttattattcttccatgtcctgttgcttaactttcctacatttaatacaaacaaggatgaattcagtgttttgcagaacattctatttgcctgaaatcatacttaaatcttctcattttcttgacttcagtagattttacattaccttaaattttctctaattaaagttaaaagtggccccaaaatcactggacttggtttgaattatattaccttaggatgtgtggggagagttgaatttcaaaataattactctacaaatagtaattttgttcaactgctggaatcctaggagaacgaaggacttatcctgaggagcgaatgcctctgccagctccttcactgagccaccagcctcctccagctccacgagtcgagaagaagcctgaatcaaagaatgtggacgatattttgaaaccaccgggccgggagagcagacctgagagagtgagtcctatgaagttgattcgtcttcgtgcaaaccagaagataagagatcttgttaatatcctgaaaagaatttctttatttttctgcaacatagtaataatatcagattcaagacgttttactatctctaaatcaccatataatctcataaatggcctacactatagaatctttaagaatttagcactaaagtacttggcaaaaaagatgttgaattttaaaacatattaatgagacctcaattaattgcgcgttgaagagaggaaaagtggatttggttttatggtgtgtggaatagaaagggagaattaggagacttgattagcttaggcttaatttcctagtgacctccaaatgtgcgcattctattaaatttgtcttattacagaataattagactgactccatttgaattaactggtactggagatttcagccagatattttaattccatatatacagaattaatagattgttgttttaaagtctttttgcctactattactatatagctacttgacctttcctgtggttgctgtttgcatgataaatcttttaccatttccttcctttcattctatttgtatcttttaatgtaaagtgtgtctcctgtagtatgcctatggttggatctttttttttttccattcaggttccctttatttctgacatttcttcaccatccttgcaagggtaactccctaatcactctagaaattcagattcctgtttctgactccgtaggacacagcggatcgtgttttttaatgcagtctgaaaatctctgccttttgattggattgtttaatacattcacattttttttttaaattatggattcaggatacatgtgcaggttcattacacaggtattttgtgtaatgctggagtttgggcttctaaagagcctgtcacccaaaaagtgaacatagtaccctgtagtaaagttattattgatggcttaatttcatttttggattgttccttgcaaatatatggaaatatggtttatttttgtttattcgtcttgtatcctgcaataccactgaattcatttattacttttagtaggtttttagttgattcttaaggttttctatgtataagatcatgtcatctgcaaatatacttttacttctttctttctgaattgaatgccttttatttcttgcctaattgccctggctagaacctccaatgcagtgttgaatagacatggcaagagtggacattcttgtcttgtatctgatttagagagaaaaaaatacaatcttttaccattaagaatgatgttgctgggtgtggtggctcacgcctgtaatcccagcactttgggaggctgagatgggcggatcatgaggtcaggagattgagaccatcctggctaacacggtgaaaccccgtctgtactaaaaatacaaaaaattagctgggcgtggtggcaggcacctgtagtcccagctactcaggaggctaaggcaggagaatggcatgaacccaggaggcggagcttgcagtgagccaagatcgcgccactgcactccagcctgggcgacagagcgagactccgtctttaaaaaaaagaagaatgatattagctgtggaatttttttgtagatgcacttcattaggttgagaaagttcccttctattcctagtttgttgaatgtttttatcatgagaggatgttggatttgttgaatgctttttctgtgtcagttgagatgatcgtgtgattttggtttttagtctgttgatatgatgtgttacattaattgatttcatatgttaacttgcattcctgggataaatcccacttgatcatggtgtgtaataatttttatatgttgctggattcagcttgctaatattttgttgaggatttttgcatccatattcataggagatattgtagttttcttgtctgtatgtggtttggtgtaatgctggcctcataaagtaagttagaaattattccttcctattctatgtttttgaagaccttgggaagagtcggtatttaaatgtttggtgaattcagtaatgaagtcatccaggcttaggcttttctttgtgtgtagttttttaaaattattgtcttagattcttcacttgttataggtctattcagattgtttatttgttcttgagtaaattttagtagtctacatctttccaggaatttgtctgtttcacctaaattatctaatttgttggcatacaattgttcatagtattcctttgtaatcttttttataaggttggtagtaatgtctcctccttcatttcttttttactcgaggcagagtctcactattgcccaggctggggttgcactcctgggctcaagtgaccctcctgcctcagcctcctgaggaactgggattataggcacatgccactgagcccagctttcatttctgattctggtaatttgaatcttcttttttttctattcagcctaggtaagagttcatcaattttgttgatcttagtcaggcgtggtggctcatgcctgtcatcccagcactttgggaggctgaggtgggcggatcacttgaggctaggagttcaagaccagcctggtcaacacggtgaaaccccatctctactaaaaacacaaaaattaggcgggcgtggtggcaggcacctgtaatcccagctgcttgggaggctgaggcatgagaatcgctcaaacctgggaggcagaggttgcgatgagccaagattgcaccactgcactccagcctgggcaacagagcaagactccatctcaaaaaaaaaaaaaaaagttggtctttttaaagaaccactgccaccgtttggttttattgactttttctcttttgtttttctgttttctattttattaacttctgctttaatctttattgtttctttcctctgtttctttagtttgctcttctttttcaagtgtcttaaagtggatggttaagttattgatttgagacctatttctttcctactataggcatttatagctatcaatttccttttaagcactgctttagctgtatcctgtaagctttggtgtgttgtgtttttttcattcatctcagagtattttctggttcctcctggtttctggctcctcttgatttctggttcctcttcattttttctttgattcattggttatttaggagtatgttgtttagttttcacgtatttgtgagtttctctaattttttcttactattaatttctaatttcattccactgtggtccagtgacatactttatattatttctgtcctttcaaatttatgaaggtttgtttcatggcctgttgtatagtctatcctggaaaatggtaggtcattgttaactgttatctcattgcagaaaattttctctcagtgatttttttttttttttggtctattctgtttcagattgttgttataatgagaggattacctggcagtggaaagacacatgttgcaaaacttattcgagtgagtatggggaagctgaaaaatcagctgcttgtgctgcttgtgttagtagtcacttgccttcttattaatagcaagcaacataatgccaatagaattgtcttccatttgatccattacagttggcccatgtggtagatgttgtcccatatatatttttatctactcagagaaacatttttgcctctgcttgatttgaaaccaccagaagattgtatattatttagccacaagagggaactttggtgtgaacattaatttattccataaattcgttttaaccttcttgactgtatgattcttaggataaggaggtagaatttggaggacctgcacccagagttctaagcctggatgattacttcatcactgaagtggaaaaagaagaaaaagatccagattctggaaagaaagtgaaaaagaaggtatggtattcatctcagatctcgttctgattcattaatagtatttaaaggaaaatgtgtttggagagaaatgtggcttttttgagggcagggacctctctcttttccgaacacagtactttagtacttgggtgtgaaggaaagactacaaagtcatctctatccaaatactaaccaaggaaaaggttttggatgattctttgcttttgctaattccatatctcttttgggggaccttaggtaatggaatatgaatatgaagctgagatggaggagacttaccgcaccagcatgttcaaaactttcaaaaagactctggatgatggcttttttcccttcatcatcctggatgccatcaatgacagagttaggcattttgaccagttttggagtgcagcaaaaaccaagggatttgaggtagaagcttaaagaactttaaagtactttgtgttgtcatgtaaatgttatatatctttgcctaattattattcattcttgcttaggtatatttggctgaaatgagtgcagataaccagacttgtggcaagagaaatattcatggaagaaagcttaaagaaataaataaggtgattttaagaaacatagaataatagagtactatcatgcgctgcataatgatgttttggttaaggaaggactgcatatatggtggtcccataagattataatgtatttttattgtaccttttctgtgtttagatatgtttaagtacacaaatacttcattgtgttgcagttgcctacagtattcagtacattaacatgctgtacaagtttgtaacctagatgtgcagtaggctttatcatctaggtttgtgtaagtatactccatgatgttcacacaatgacaaaattgcctaatgacccattcctcataatatatgcccattgctaagtgatgtgtgactgtactctaaacctcatattatctgtatcagcactcttgtctggaagctcttgtttatctcctttttttttcataataactttcctatctgctttagtaaatgtttctcttcctttgtttcttttcctagctcttcttgaaattagcctgttatggcctggcatggtggcttaggcctgtaatcccagcactttgggaggctgaggtgggcggatcgcttgagcctgggagtttgagaccaacctgggcaacatggcgaaaccctgtctctacaaaaaaatacaaaaattagctgggcatggtgtcatgtgcctgtggtcccagctactggggaggctgaagtgggaagatcacttgagcccaccatgtcaaggctgcagtgagccatgttggcgccactacactccagcctgggtgacagaccgagattctgtctcaaaaaaaaaaagaaattagcccattagactttacaatattaaattaatatttaacaaatatttaattaatatttaacaatattttaaaatattgttaaatgttgtttatcttggatgcttacttggtctttgagtagtttctagagataactcaaccatctgaatttttcaatagatggctgatcactgggaaactgcacctcgtcacatgatgcgtctagatattcgttctttgctgcaagatgctgctattgaagaggtgagtatcctttggttcaaatgcaatgcaaagtgatgttactttttcacctttttactttgaaaaacttaaaacctacagaaaagttatatgaatagtattcatacaagaacacctactgatatgcctttcattgagatcacggttagtattttgccacatttttctctgaatgcatgtattcttattaacattcttgttaatgatgtcactgtttttgtggaaccatttgagagttaagttgcagatcttataaaccttcacccttaaatacatcagtaggtatcttgtaagaacaagtacattctcttttgatttgatgacagttatcaaatgcaggaaatttagtattgataaaatactatattaagtaatataaatttcctgaattaaatttcttgaattatctcacatatagtttatattcacattttaccagttgtccctataacgtggtatatagaaattttcaaaaatctaagattcaatcctttaatataaaatatagtttctcagccttgtcattgtcatgaaagataaagaatttatgaagagtataggcctgttttgtagaatgcccctcaatttgaatttgtctgtttgtttccacatgcttaggttcaggttaaacattagcgggaatgctacataagtgatactgtgccctctcagtgtgtcacatcaggagccatatggtgttaatttatctcattattggtgatttaagcactgattacttggttaaggtgatatccatcaaatttttctacctttttctctttgtgataagtaatctgtagggagatactcttaatatcttttccccaacaaattttcattcactggtaattcttgcctgaattaattatttatttgatggaaggaaaaattttctattttttaccagttgtaggtttctgtttgtttgacctcttccatactcaatattgtcattgtgctttttttttttttttttttgaggtggagtctcactctgtcacctagattgtagtgcagtggtgtaatctcggctcactgcaacctccgcctccagggttcaggcgattctcctgcctcagcctccttattagctggaactacaggcatgcgccaccatgcctggctaatttttgtatttttagtagagatggagtttcaccatgttggccaggctggtcttgaactcctggcctcaagtaatctgcccacctcagcctccgaaagtgctgggattacagacgtgagccaccatgcccaaccgtcattgttcttttatgtgtttttaattcccatgccatttctcaacccatttttttctggcttctgccactaccattgtctggcaactctttcactaatgatttccgtggcagtggacagttctcatttcctctattgattaattttgtagccacatgtaatatagttgaccatgcccaccttcttaaaaaacatatttttctcttggcttttgtgaattcacatttttctggttttccttttacttttttggctatctcttttcagtctccttcactggcttctcctgcttctcactctttaaaagggcccccttagggctccatcctaggctctgtttttattttgtaccctctgtatagatcatctgaatctttccggtagcttagattgtcacttacgtgccattaatgttataaagtctagattgaattatattactatctaaatagtagtgtttctgaatggagggagtataggtgatttttataatcttctttttactattattttccaaattctctacaaaaaatatatattatcttagtatacctcaaactcaacctatccaaaatattgttcgtccaaacctgtttttcatttagtagtctctgttttagtaattagaaccctaaccacttgattgctgaaaccggtgctctgggagttatccctgactcttttgtcattgttgagacagagtctgactctattgccctggctggagtgcggtggcatgatcatagctcattgctgcctcacctcctgggttcaaatgatcctctcacctcagcctcctgagtagctgagactacaggcgcatgccctgtgcccagctaattttttatttttttttagagatggggtctcactatgttgcccaggctggtcttgaactcctagactcaagcgatcctcctgccccaacctcacaaagtgctgggattataggcgtgagccactgtgcccaggcctgactctttactctgcccttgtgacctgtcatgtagtcaagaaagtttagtcagttgtaccttttaatgacctctgtaactcatctgcttatttgcgttgctaccactctgggccaagccaatatcatcccacttttcactatactttttcttatattttgaaatttgaatcattgacatgtttttacctgattggaaaaatactcgttaaagatttttaaaagtctagtaatccataggcattcaaaataggtaaccatctacttagcacttatacttaactttacagggaattgtacagatggatattcaaggaaaattaaaggcagtagtatcctgtcttttatcagttctgtttcaaaatttagggtgttaaaaattacttggtatgtaacagtgagcctgtcttgctctgggcaactgtattcattccagatctcaatgagggagtcaatattttgctaaatgttaactcagtctttttttttttttttaatggttggtataggtagagatggaagattttgatgcaaatatcgaagaacagaaagaagaaaagaaagatgcagaggaagaggaaagcgaactggtaggagacagaccaaccactttgaacagtgtctctttattaaaattcttaaagaaggtttaaattcagatctgtggttagacaactactgttgatatacactttagtggtaaaagtttccataatcatcttcaaggagacttttggatactctttatttttccccagaccaaaagaaccctctaatgtggtgttaagagaaagttttaacagagtgctaagaaacttacccttgtactcatctatttgtgggtggttttaggggagtataccttttaagaaaatcaattacatatgaaagggcattcttacattccagcagatatgtggcacagcctacccaacatatgcataattgtctcttctttgctacaagatctccaaatttgagtttctgtcaacagaggcagaagaacttattgaatggggaggcagagggttgccactggctgctagatttgttcttctgcattttatcctaagtgacggggaaaaattaaatgactgtgtaggcaatggattttgctcaggctgattagaggcttacatagtgtgagtttaaagtttctgtgtacctaatgtaaaatgctttcgatcacacctctgtagagatgtttgcctttccctgtcattcaagaatatgcgacctatagagttacgttgacttttcagtgtttactgaagtacagagattagcaatgccttggaatagtgttgctttttaaatccagaatattactcggtttatttaatacttgagcccttgctaaagttgctcctcatattcttttgaaaatgtacaaaatgagaactctgattcctaccccctagagtatacagaatctccagggagtggtcccatcgaacccgtgtgtgatatagaggactcttgataaaaactgtgtttatataaagatggtgtcaacctctacattccaagatttcaaatgtggattaaaaaataagttttaaagttaatggcatttgagtctcagtatgtgttttttttaaatctagttttcttaagttgtattttggcatatataatttaaaatgtaggcaggatattcactacaaggtccacgctcttctggaatatggctaatgacttctttagccatttgcagcgtgtgtactagaaactgattacgtgagaagtctataatgttttagctttctgaagctccgtctttcttttgtggagatttcagtggttcataacatctgacttgcttaggtgtaggtcaaaacttgggaacttttaattgaatgtactattactttttaaagtgaaacacactgtaatactatatttttacatcagagtcatggcaaggaggccttaaaattctaccctgctggattatctgttttatttccaagtggcctacaatttcaagcaatgggagagtaatatagtttaaaggaagcacaggatgattccagcagggggaaatgaatacacttgtctgcctgacttgattataaaacttctcttaacccattcaaagatgcagaattgaaatcttttactattggagtccattccaagagtaaaagattcttggagaatatgttaaccaagggttaagagcaagtttcataccaaccactcagatcatttaaatggaattctcagtaaaccttgcattttccactctgcactaattaatatagctggatgaaatccaaagttttgttggtaaagataatcgtttgtaggggatcattggtatgatagtttgcctcctttagtgcttcagtgaacctagtagataaaatttataaatatattattccagtgatgcttaaagttttcagatgatttttaagatgtaacttgtcttcagtacttttagcactatcacttcagtatagctttgtcttggtttgttctaaaaaatgtatttgggaaatatataatttgtaatccaaaatactacctagtaagttgaaattgaattattagttctggctggtagactagaaatgtatgaaacccataggattatgctctagtaaactcttacacagaagctatcatcatgaaatcttcaaaatgctttgtgacttactttacctgtgtgtcagtttgtttcatgaacttgaacattcccaacagtagagagatagattgattcataaaagaggatactgacacctttgatgaatctgtcctatttactaggttccaatattaacatttctgtatgttaggtctaatggaaaacagtctaaatgaaggtaaaggggaataatgataaatcacatggtaaaagcatatacttgctaggtgaataaacagaaatgattactgcatagttcaataggcacactgggaaatttgaaaatcttttgggagtgactttgaaataagccacccagttattttatgaaatataagatgtaagttgccagtggagatttctggtttttcatgtaagaggaaaacataattttaaaaaacatcagaaataataatctagttttcaactgataaaaatgttctgaatttgattcagtaaaattagccgttgtatgctctaactggtaaatgaattgagtcattttaaaatgaagttgaacttcctaatcgggtaattgggttaagtgccaccaattcttttcctttcttttgagtacttaagattactgaaatataaagtaactatcttgaagaacactttttgcatcttatagctactatcacttgagaatagcagttgtatttagaagataacctagctagtattacaaattctctgatactctgagtaatattaatattagcacagtaactacctgtacattcttatcatatttgctatacagctgttgttcagactacaattgtgagtcctgaactgtagctgcctcaaagcgccttcatgatactattctgaagtgactactctgaaatgtggacagtgaagtttggtgaatttggtcatttagtttcttcaaagataatgagattgtgtttcccctaaggatgtatttacagctagtcagtggaaactgaatccattcccagttttaatgcttttccagttcaaacgtgatatgcatgtatgtgtctctttctaacccttcgagcttctctctgtgtacgatttagggttacattccgaaaagcaaatgggagatggacacatctgaggcaaagctaggtgggtatttcctttttcctgtttttatatgtgatacctgatggtaatggtcatagatctttctgctataagaggaacaaatttcctaaaacttctacttgaacagagatttctggcctaccttatatcctccaatctattttgctagtttttatatcttgtaacaaagtgataagtattttaaaagaactgctttcaatactatttaaagtttttagagtcaacagaaatatttgataatttagcaacaaaatattgtcacttataaaatctattcttttatattaatcagaaatgttggtgctgatgagatttcttttttaaagaatatttaaatgcagtccaaagttaaacctgattatgaatactttagataataaaaataatataaagtttaaaattaattaaaaggcatttattctccttgtataataaatgagagtttctgagtagagaggagtagatatataattcaggtttttgaggagcctgctttataagattcagtttaaatttttcttcaaattgttaatgccaaattccaaggtaaaccagtttaaatgattgtctaaatcagaatttggagttgcttaatgtgaagttatctgtcaaacaaaaaagtcatacatatccaatggattccctctattatttgttggtgaaaactgcaaaatattttttcagttttacttcgcttaaagagaaccatttaacatgttgattaagatgtattaataaaaatctaaaacaatgtgctaaggactttttgagatcagccttactgatgtatgaagtatgactgtcagtttatgtttcttttcctggtattatactccaaaactaaaggaaccatctaagtatcttaaattgatacaggaagtttgagtcactgagctgcttcattgcttgggacatgtgtttctgacatcagaggagtgcattttacatgcaattacataagttgtgcctttaatttgccccaactacttgtgttagtagttggtattgactaggttctgtgttaaaagacagttccacggactttattattacattactggtataggtgctttgttgtcaagtctaaaagattttttttagtttatgtcatgtgaaaattatatgtggtttttgacatattcttctagtagtcttccctctgtgggaaatcttaataataaccaattgtcatcttccagagacccttaaagcacttatgtgtttaaatgcaattaaatatgtaggaaaataaaaattacaaaatacttttaaaataataataatgctttagttctgcttatttcgacgttagattaactctctgtgaagttctgtacattagaatgacccataatatgccaagatcatttctctcttctggttctcttaaatattgattatcctttagggcaaagagagatcataaataaagatagttaaggggaatgtaaaagtgataaatattaacttgtaatctctagaggcctcatgtaatacatgatctggggtaatgctgttttaaactcaagccagtccatcttttacttttctttctgtttttaaaaggaaaagggaatttagttgtgatgattattcaagaatatatattaatattggtatttcttggaatttctggaaaacattctggcccgtctaccatttgcttctcagaaaaaaacattttatacaaattttcagttttaaagacagaatagtagacaatgaattccagaaatggatttttaaaacaaaccatttcagtgaaaggcactgaagatctggtaataaatctaggaaataaattttaacatatttacagtcgggtttttattttttaacaagagtgatagtgatgttgtatataaggacttgtatcttgcaccactgtattgagagctaatcccaccacagaggaaggcaaatttagtgtgcattcttgaaagtgcttagtactttgaggttggtccattgagccaactgagaagattcttctctaaaacatgaggatcttgtgtcggatcttgtagcctatttatgttgccttccttatcataacaaatttaatataatttgattaccaagtacaatttatttttctgagtactttaccaacattctccaattactcttggaaaatgattatactgggtggaaatgtattaagttttagcagtgtcacatgttgagcaaaaacagttgaatctgaaacagaggaattttgattcacaaatgagtctgccagtgagaacatacttacctatagtctttgaagcagctggttagagcttattgcagattcttggtctatgctcattaagtttagtacacagttcagcctgtgcctgaatgttaaattggaagtgatgtgatttttagaacagttcagaacaggcctgagctacctctggcatggagttgttgaaggctgcctgtggcccaccttcagtcccaccagactggttcttccctgctgggacacaggcatcataatgcaagggcaggttgttacttgccacatcaggtggtgggattcagcattgaagctacttaaactccagtgacatgattttagtttctcatactgtgaagctagaatatttgagactgttaccatcctaatttaggtttcttcatataaagtacttttgcttttctcatctcagtgtcatttgtctctactcttgagttgtatattggttttctacatgtcagacagattcatctcttcagagttggaatataattattatttgtataggtgcataatcttgtatgtttacgttgaacagattttcagaaataccatttacatttagaaaatacatagatgtatctaaggaatttttctgttgtgctataatacatactgtttcaaatatgtggtaaaattctgtgacctgccatattggatttaaaacttcatcttcatcttaaaacttcatcttttgaaatctctgaaaatcattagtgtgcatgtattgaacaccagtctttattctgtaattaacaccccagatttctttcccctcaccttatgccatccatctgtgtgtttggtttccagtatgccatgtggaagaggtgtgagcctttcttcagcccaagaaggaaactttaaacatatttgcacaataaaatttcaaattaaacatttcaaaaagggtgctcagactagaaatacatgctcttctgaaattccatgttgcaactgtaactcctgtcatatatacccagtgtatgaggaaaagttcttgcagttttcacactgcccttctgtattgctgcctggctgtgctctgttgttggaactgaaatatgaaatttttactttgaagtatgttaatgtcaaagttgatcgtattaagtttggaaatcctttgaggtttatctaataagtgtgttggagcttctgtctcttctggtaatactgtaccctgttgaaccaagaacagttttattgtttgtgggacttcgttggttttctaataccataacctgtgtccctgtgcagtcagggggtcacttctttaagatcatgtataatacggcccgtcatatacacgtagatagagccatgtgattccagaaattagaagactggatctgtggaatccatacatgttaaaattttgccaaaatgagatgattaaaatttttgtgagttttataaactgttgcagttcgccttactgatttttcaatgataatcacttttatgggaagggggcttaggaacaaaaaactttgccaagaatgcaaaatcttactggtttttaaagcttgtaacagttgtgtgtaaaacttttatatttgaaacgtaaactcaccctttctgccactgctttcattgcacttttcataccaagttctctccaacgtggtgtctgaaagatttttattatatacactctttatggaattcaatgaagtgtggttatgctgtgtttctgaagtttttaggcttttcttcattggcctgcctaatactagtgtgtttctataacttcagatgattcaaaagtttagtgcttcattgtagcaaaaaatgtatataactcataatatcctacatgtagtattcaaaatcaattattaataaccaataaaagactcaacacattttcattgcgtgttcttctttaagacacctaaactcatatctcataatttctgaatccgcaatccctattcattaattgattacagtttttgagttgttggaaagcctagccctctcagattcagggttcagaaagaattaccaggtctggtaaaattgtctgactagcccttagcctcagaatggtcaacttcatagtataagcaaagaaagtggtgatctcatatagtcagctttttcatgaacattaattcatggtgaatgcactcacagcaaccaaaatccaaaaaaaaaaaatgttcatctaaaaccttaaacattagcttggctcattgagttcttggtacaacctgcttttcatatgacacagtatcaaacatgatttcagatgaaatgggtggtgttaatattgtgttaaagaaaaaaagaatggaagacactgtctagaaaagcccaactttgcatttgccatcagaaaatgagaactgtggtgggtgggaggacaaggaggccaggagccaagtgccttttcttgccttgcccatatttgctcttaaaccaacatcgtaaacataatggctaccagtgtgaataccaaacaatggaaattgcacagaacttgatattatctcagccaagaagatagtttggatctgcaagtgatgctgcactcaaaaatgtggatatgccctctgaaagcgttccagccttcttttcccctgtgtgtgtgtcgtgtgcaaactcacactcttccttaatgctacggctctgtgtttgtccctcagacaagttggatggcttgaggactggtactaaaaggaaacgtgactgggaggccattgccagcagaatggaggattatcttcagctccccgatgattatgatactcgtgcttctgagcctgggaagaagagggtaagagactttgtcaataactgccaacaaatgaagggcccatttaggcatctggttttaggaagttacaggcagatgatcacatggatgctatttttagaatgatttagtttacgctatgtcatgtatcccaagaaggagtcataccttataaattatctcatcaaaatgtacaagtagcttaaaaaattggagaacagaacctcacatggctagcacgttgtcaaccttaaaggcattgggagtggccagtcacttgtgctattttgtcatggggcaaaaaaagccaggtacagagtagggtattgaagagaacctgtggaacttcttaatggatgggatgtggagggtccaaaggtagatcaagggtgaccccttggtactctggccatgagcactgcatgtgtgtagtaccatttagtgagagagaaaactgggggagtcataggtcataatttttggaactgagagaaatgatttaagttctgtgagagaaattctaatttttcttctaattaagttagaaatataagtgaaaatgtcaaaatgactgttggatttattagtataaaactcaccagagagatcagactgaactaacaaatttcaggaaatggtatttaaaaccgtgggactgaatgatcttgcccaaggaaaaagtataaatggaaaaggtaataggacgccagacctccaaaatttagttcagatagaggtgtttcaagaaggaaagagtatagtcagtttttaaatgatgcagaaaagacaagtaagtttggaacagataaatggctgctagatgttggcaacatggaggtcactgatgattgtagtttgtcatcagtctacagtgatgaggcagcagaaaccagtttggagcagattaaagaatgaataagaaatgatgaagtacagtacagcatatataggcaactttttgaagttttgctgtgaaagggaatagagaaatgaagctaggatattagataggtctttacataaatgttgaattcgatagtgatagatgtgtatatcctttaaaacaaaataaagcaaagggatcgtattatatatactgttgtgtagaagtctttttcagctaatccatcttgatctttctatataagcatatacagaactaccattctttttaaagggctacttggtgtcccattgtttggttgtacaatcagttatttaactagtccctttgtgttagtccgtttgcgttgctataaaggaatacgtgagattgggtaattcatgaagataaaaggtttattttggctcactgtcctgcaggctgtacaagaagcatggtgctagcatcagctcctggtgaggcctcagaaagtcttcaattatggtggaagacaaggggggagccagcatgtgacgtggcgagagaggaaccaaggggagggggtcccaactccttttaacaaccagatctcacatgaactcagagtgtgaactcgctcattaccgtcaggagggcaccaagacattcacgaggatcctcctccatgacccaaacaccttcagtatcggggattacaattcaacatgagatttgaaggggacaaacatccaaaccataatgtctttactgatggatgcttacagtgtttccatttattgccagtacagatgtgaaggttgtggtgtgtatgtctctctttacacgcttacatgcaaataattgcctgtttttctacagcagtgctgtaatcaaactctttaacttttgacaatctgataggtgaaaaaaatagtatctcatttttcatttatttactaagaatgaggttgtgcatcatttatctttatgcatcatttctttgtatttctttcttaacgaattttctcagtgccttaatgtgcttagtgtacttagtaatgggcaccattacaaagaatccaggtttcaaagctttttaaaatactgcagatactccaaagcctgcccttgtctgtgtagcttcaaaggatgggtaagggagagcccactgccatttgcacccagcctcaccaaaggactgcttatagtgatacctcttactccagttttaaggctggagccaacagaggcagaagtggcccttccttgcaaataataaagtgtagttctggtaacaattagtaatctaaaatgagaaatattttctctgtttttactcaggtaactatcactgtcttcactgaggagtatgtaatcccatgcagtttattttattaggttgggtgaccaaagagaactgagtggtgcacattctagttctttaaagttgctcctctttaagtctcctcccctgccttataccttgacttcagatagtttttaactcttgaaccactcaccaaaaccaacattagagcacaggagatcctacaggtagcaaagaatacagaatgctgtacattactcattccttcttgggtttctttgtttctgtgattcagcttgttacagatatcagatgggttcttgggattaacttcctctataacaaaaacgtggttctgtagagttggttatattagaattttgcctaaatggctaggctttaaaatataatttacttttaaaatatttgcttgcttgggtataaaatggtagcttacttggactttaatttgtatttctttgatgactatggaaggtgaacctttcccttgtttgtttgctgaatttgtatattttagaaatacttatagttacagtggatgaaatataagtacctcaaacctttgagggctagttaagatttttctgtattataacaaatttatttttacaggaaaaaacaacagcaaaaatgtcgtaagtctcaaaagtacctctaggaaaattaaaagggacactgatattcaagaagccatttcaagctgaaagtcattattctgctccttgtatgtttagtggttcggtaatcatttattcattccatatgttgaatgtctttgtacgaagtctatgaatgagtcctcttaaggagctgacatccagtggaggaattcaacatgtaaataaataattttactatagcatcagtataaattagagatattaacaaaatacaatagtttccaaaatattttaattccaacttcatttgttttttgtttttttgttttttatttttgagacagagtctcactctgttgcccagcctggagtgcagtggtgattttggctcactgcaacctctgcctcccaggttcaagccattctcatgcctcagcctcctgagtagctgggattacaggcacccaccaccacgtccggctaattttgtttgtatttttagtagagacggggtttcgccatgttggccaggctggtctcaaactcctgacctcaggtgatctgtctgctgcagcctcccaaagtgctgggattacaggcgtgagccactgtgcctggcctaattccaatgttaaaatcttgaacatttattcgcaaacatactactcatttcaaaaacacctacacattttttcttctaatcctatattctttattttatctgagtttaaaacttagaatttaaactgtagatttaaaagtagcaaggtgagattgatcagtatatttaactatgtgctgaggttgataagtatatttaactatgtgctgaggatgccgtgggaatggatttaaatttgctgtgggctgtttactttttctttattcaatgagccttaccatataaggggcaaactgtggccactgaacaaagaaaaagtaaccagcccacagcaaatttaaatccattcccacggcatcctgagcacagtattgtgttttcacataaatgcccaagacttagttcgtaatgatctttcgctaaaatgtgtatccttgatccaggtggagctgagagaatatacatgaattaaatttaattaattaattattattgaggtagggtctctctgtcacccaggctggagtacagtggtgtgatcttggctcactgccacttctgcctcccaggctcaaacaattctcccacctcatcctccctagtagctaggatttcaggcacccaccacacaccatgcccagctaatttttgtatttttagtagagacacggtttcgccttgttgcccaggctggtcttgaacacctaggctgacgtgatctgccggcctcggcctcccaaagtgctggagttataggtgtaagccactgtgcctggctgtatatatgaattaatcaaaataggtacttcagcattgatgagcagaatgcccaaagatttttctatattgaagcccacattatttattaggcttcttactaaagcccatgaaagacattgagccataggttttctatacactaaaaacctactttctggaaagtcagatgttaccagtttcttcccactgctattactttggctcctccctttgaccaggtgatactgttaaaagcctagttatttcattgctagtcatgcaaatggtaattagtgtacattagagcaataatgcattcccaggttcagtgtaaagagcatggtgtttccatgctctggttctctctccttgtcacagataataaatcacaagccatgtttaaaatacattctctgcagtctttgatactgtgtagtgcaagcaacagattcatagtttctttttaagaatctgaacttttacagaatatgtatatctccatatacttttaaaaacatattaacataatatgtggctgggcatggtggctcatgcttgtaatcctagcactttgggcggccaaggcaggaggattgcttgagtccagcagtttgagaccagcctgggcaacatagtgagactctgactctaaaaaaaaaaaaaaaaattacaaaaatttttaaaaagcataatatgtaagaatatatatatattaaaaatcagaataccaataggaaatatccctgatccatatatttgtagttgtaatcttgccatgaattatatcagttgagtctgtttcttggtctctttatctcatgaatgaaagtaataataccagcttactgttttctctaagattaaatttcaagaaatatttttgtgtagagataaataaaattcagttattgatctagggtgttgatagtctgttagggaagacagatctgtaagtggataattatactacggtgtggaagttcaaaagcagacatatcaaaatccggaagttaactgtggaaagcagtgattatttgattggcaaaggaaaaaggggtaagtcagggaaggatgactagactcatgccaagtggataaggttagggaaaagacatttcaggaagaatgactagtacatatatgcagagttatagagacatgaaatggtgcgatgcgctctgagtgctagaaggaagtctgtattgtttgtataaaatgccataggcactggccagagatgttgcaggaaagtgtagttggggccagatcaagagggacctgagttcttggactttgcctggtaggtaggggaaggagttaaagcaaatgaatcacaactgtgtgttttaggaagatcactctggcagcatgaatctggagcgggtgagtacagacaggaagactaggtagagattagtgctttgctttcaggtgaaaaaaaaatgaggtcagtgaattattaaataaaaaggaatggcagaggagaaagagaggacaggattgagctgaactgttcaggagctggaatggttaggacttggattgtccagagagttttctctttgtgacttaaaatatatggcttttcccagttttcctgggttagtttttaattttttaaacttgcggtttcaaatgagtcattctaccccttagactgtccagagagggagggggctctttgcatatttatttttcctaaagctcagcctaatgctatgttctttttaggtcagatgggcagacctggaagagaagaaggatgcagataggaaaagggccataggttttgtggtcggacagactgattgggagaagatcacagatgaaagtggtcacctggctgaaaaagccctcaatcgaaccaaatatatatgagacttagtttttgaacggagtcattattcctctaaggtaagagtacacagtcatataaatagcctactgtgtggttgcttcaaagggtttgagataaagaagacagcatattttgctaaaaatgctctcttcttgtgttattttatagttctgaaagagtaagtatgtactagttgttaacatttacaatactattagaaaaggaagccattttctgcaagctggctcacttataaaaataaaaaccttgagaaaaacttgaattctatagatttgggaaggactgaaatgatgttatactaagggctactgaactttttgcctgttctttccaggtgtgacagccttttcttttctttccaggtggttcgctttgaggtggtctgaagccaaggcctcgcggagcttctttgtgtgtcaccttgcttccacgtttcagttcttgttttgtttctactgctttagttttttttaaagttctccagtgtccccaagaggtattagaatcttgctgtacccaagcaagacgttaatttttcttttaactgttttggggagggagggagtgatagcttaactgctgaagccaggcgggggtctgctggaggattccaacagagagtatttcctccactgtacaatgtcacagactatctctatcatcattgctttgtggctgtttctgttttttactgtatgtaactggtagctgattgtactaggattaaaaacaataaactttcatgataaagccgatgagattcatgggctatacagcatgggcccttttctcttgttttcttaattttatttttaattgctttttaaatatggtatgtcctaattaaatgctagctgaacatcccaaaacctttttttcattgaatattatatggctcaatgattccgtagcacatgttgtaaaacacagggttcaaatgatgttcaaaacactcatctttgttttatagctgatttctctatctttgtgtcttgaagactgaccaagttcaaatattcatcagttccctggagcatatccattctgtaacatgatgctttatttaaaaattttttttgatcctctctctgttcttccctctcttctttccttccttcttcttttcactttctgcctttatgctgttaggtttttattttttcctgatctggctttgaattctggtagacagaactgatgtattctgtggaactcaagcttgttgccttcatttgaacttgaattgtggatttttaaatgaagattgcagggaaagagtataaagatgcagagcactctggcatgtaacctttaagcctgtcaggttttcaagttcttgccagattgttcattactggaaagcatggccttctgcacagaatttcctctcttgtggttaataccaggtggaacccagaaacatacagagataaaacccaaatattatttctatgtaaacacagaaaagggactcttccctttttcatcctgcaaagaaaaaagtcatcttttagcatgaaagaagatgagagagccttcttcctcaagcataatttgcattttgtaatccaactcagtaatttgtaaatgtgttcactgaagacttcaatattttgaaatattctctttcaggccacagatgaaaatcctttacttttatgacctacattaaagactgtatgaatagagctaatagttactagcatttgaatagtatcactttgggttcaacaaattgatattatagtactgaatacccctaatttaatggaaattctaacaactttctgtacttttatcttccctgaaaatctgaatttttaagcaagtgactttaagttcattaagtcaatattgaatgtataaattgctacattaaataacttctgctgtttgtagtatttaataagctattttcattgcttattggcctacaatacatttctgtgtactgacctttctcagcagcctttattatgtagagtgaagatatgtcgcaaaaatagccaaatagaattattgtttgtacaaagactcatttactactttctaaagccacccaatgcctattatcaaaaacaaaacttccataatgtgttctctagttcagatgaaatggaggccgatatgttcttctgcaggatgctttatttcagttgtccttaaccttgtgatgttctgacagtagttagaatgccaatgaaatgagtggtgattatccgtgagtcacttggaatcatgggtaattttgcatatgtgtgttttcaccttacagccatggctttatgtctgtgctcttataccagggcagggtgggaagctggggaagagttaacatagtcagaaacggcctctgccaattttcagaagatatagattacgtgaccttagagaatgaacatagagtgctcctactttagaaaatgggtataacaaccttcatgcaaggagattaatgaaaaaagatttggcaccaaaaagagtaatagagacagccagctgataattgattttgctagtccaatgtgggacttaacaaaattcttgcacttacattactattagaagcagtatcgtataggaagcccaaggtatcttgaagaagaaatttggtgtgggtagaaaatgccttgataatacaaatattttaagtttgttaagaggtgtcctggaaatgcagaggactaattttggattccattatttgctagcattttattttaattttattaacattgtcttctcttagaaagttgctggtttaaatcatatgagttttattttaaatcttttgtggtgtcatgttacttaaaataatcttatgttgggaaaggtttctgataccttggtgggtatttcagctttttttttttttttgtcagctctgtaaaggatgatttcagacattttaaactgaaagtgaaatctctcacttaagtgatctaactttacttgtaaacttcctgtgtgaggaattcagtagacgagacccagaaatgtttctgtttgagaatatttagagttaagtgccgtatttgaaatattcagggactgattgtagaatcagaagtcattaataataatacacaagtagtctattgacagttgattcatataattttctagaagtttgagtttgattcagatatcagtgttaaatccagaagtttattgacaaagataaaatcttaaattttctggttggatttgttttcctcgtgaaagagttttgatcattgagcaaaccaaagtaggtgccatgtcatctagagatcgactattacattttttattagattgactaagaatctcaactgaggttttcttattttgtaggcccctcagtttttgtgttaagtattttatcctgctaactgtgcaaattgcagatattttggtaaagatgtctagagcctggcttaattactaggattataaaagcaacagattctcagctgagataagttttgctaagccatagaaggagaatgatttctcatttttagtattcacagaccctaatacaagttcagattcttctagaagctgtatgaccttaagcaacttttttttttttttttttttttttggagacaaggtctcactctgttggctggagtgcagtgacgcgatatagctcactgcagcctcaacttcctgggctcaggtgattctcccatctcagcctcccaggtagctgggactacaagtgtgcaccaccacacccagcctttttttttttttttttttttaagagattggttgttgccatgtttcacaggctggtcttgaactcctgggagcaaatgatcgcctatctcagcctcccaaagtgctgggattataggcgtgagccaccgtgcctggctgaaatattttaacctatctgagcttcagtttcctgcctataaaatgaaaataacaaaacacacctattaaacattgagataatgcatgtaagctacttggcacagtactgagcacatagtaaaagctcaaaaatcagtagtcaccatcatcgttactttttgacttgttctcatgtgttctttttgaaattcaaaatatccagctggcttgaagatagttgtcacgttttatagtcagctatcatagactgagctatgtcatatgtaatagtacagtgtgttgaaagagtaattattcagaagcattttcaggtaaccagtgacattgattttcagaactagtacggaggcttgagaggctcaggtgtaaaaggtaatttagtacttagagggggttgagtagtaacagaaagtagttgtcagaccacaggtataaacataggtgagggcacagaatcattgatttgccttgattttcacatattcaagaagaaagtaactttgtgaataaataatgcgttcataaaggtataaaactcaggaggttcaagtgtcccatccatcttaaccctcagcctcccacgactccatctgtagaggcaaccagtgttgagaaaaattgtgtggataagcattaagtattaatgtttttacctggtttttgtacacacactaccttatttttcctttaccagtatgttttagaggtcattcagatcatatataaaatattcacattttctctcccccccacctccttctttggttttccaaaggtaccttcataatataaagaggtttactgaaaaatttcagaaattgtttcagctgcatctctgttcttttcgtggcatggaatacatggtatgggtatatttgtatacaattctttcatatatgtaggttggtgtaaccaccctccacctttctcctagtcccccaaccccaccatctctaacccttggcagccactaatctggtctccatttttataatcttgtcatttaaagaatgttataaatatgaagtcatacagtatgtaaccttttgggattggcattttggcttttttcactcagcgtaattttcttgagattcatttaagttgttatgtgtgtcaatagcttattcctttttattgctgagtagctttccaactcattctcttttgcagctgcagaatgttttatgtctttactatcattttaacttacagagtctctattaatgggtattcatgctctcgtttactgttataaattatgaatttcacatatactcagtcattctgcagcttcctgtacttgcctgatttctagcaatgaaggaaaataccgatggcaccatttcatagacatactcaaaggatgacaagcacttaaggaccagcacagcacagcggtgaactctcaagacagtatgacagtaatgagatgacgaaggcacatcttgtttcctggaaaattctgcatgataggagactgacaaagcaaagaaccatgatgtgtcttagagaaccagaatggtcagagactctgatgatcccctggtccacacgtgactgagagttaataccttaggtcactgttctcagaacctggatatttatatgcacgtgcacctcagtgactgatccattctcagttttcaggtccattgctttcacatttgaaatagtcaaggagcatctttatgactggggctgagcttctgcattcatgtacagccctctgcctgccagcagtgccttgcatttgtgatcctacaaagagcctgtggacttaatggtttactgtatagggaaaggcttgactttgtgtcttctacttaagaagcttgaactttttaccaaatattcgtactccttttcctgaaaatactgatctaggctacagatccatctcttaaccatatttgaaaaattgaaataatatcttctgccataacttgaaattccactctcagatctgttatttctgacagtgagtttgtatttctcaagtagatatgtctgatgcttatttcttttacagcatctggctcagtgcatggctcatatatctgtagagtgagtaaatacagggaatgtttcctatgtgtatggcaagggtcacagactcaggcaggtaacagatgagcaaggcagagggtggagactggtaaactagacaactagataggtcaggtcaatcgggggcagcacctgctcagccatagcagattgtggccatgtggggatataggtctcatattgccagatttcctgggttttcaagaaaaagtgaaaaatctggatttttatgtgagatcttccagtatttcagcatcaggttctttttgtttgtgagtgctttggccctcacagcctgcctgccacatctgacttgtggactgccggcttgaaacctttgatatttagagaagtggttagaccttagagttggttctggtgagatccttcttgttttacagatgaggtttctgagaccgaaagaagggaagtgacttgctcaaagtctcactgttactcagtggcaaaacaagactagaatttgggtttcctggtccataacctgtcactttcttttttcttaactacaatacctcctttatgaagaccttcataaattctaggatggtgaattctcctttattttgtgtgtcgtgtgcaagtggacatgtgtgtatttactaaactctgtggacctggaaatacattctgatatgactatcaggaacaatgtgattacttctgaaaccaacttccttaaactctcatgtataaggtagctatacacctaggatccctcttaaacacttactacttggttgggtaattctcatgaataacagaagcttgaaaattaacagagtattggattcagtgattgtacaagagcagtggagttttctccacaaagtagagaaaatcatttgtgtattgttatgcaaatagcttacagaactattaataattttgttttctttaatttgtaatttcttatgtaactagtccatttgctttcacccagtgatgagcatcttacctgcttcactcggtagcgctccattcctaatctttttaaggacaaattcatcaacttggcgttaaagtctatcagtaacatgatcccagctacttctccagattcctcttgagctgtccttactacatgtgcactacactgcagccacactgtgtgacttattccctggggtttctattgtttctgccttgcttttctcatcctttagatattagcattattggctgggcacagtggttcacacttgtaatcctagcactttgggaagctgaggcaggcagatcacttgagcccaggaattagagaccagcctgggcaacaaaaatgtcggctgcagtgagctgatactgctgtccaccctgggcaacagggtgtgagacctcatctcaaaaaaaaaaaaaaaaaaaaaaagccaggcacggtggctcatgcctgtaatcccagcattttgagaggccgaggcaggtggatcatgcaaggtcaggagtttgagaccagcctggacaacatggtgaaaccccatctctactaaaaatataaaaattttcagctactcgggaggctgagccaggagaatcacttgaacccaggaggcagtgacccaagattacaccactgcactccaacctgggtgacagagcaagactccatctcaaaaaaaagatcggtggtgggagaaactgtccaaaggcccagctcacatggtactgcgtccctgaatctgttcctcatcttgttccctcccagctctcacaggctttgtttgtacatgtcctaccatcttctcttaatttgcctttctagtagagtaacttatatatccttcccccccatccttacccacttacatacaagctcctagaaggtgagaattatgttttactcatcttccatccttgtaacacataatatgcagtatctgttacatatagttgctactcaagaagtatatttagaattgatgacctggtgatttttaagtataaaattaattcatgtaggttcatatatgtataatttataaaaccaattcttgtgtttgctttttccctacctctgtatcttccagctggtggcatatcaatacttaaggcgtagcacattcaaatgccttcaaaggacaggaagataagtgtaaatgagagaattggccagtaatttcataatatatttagttttattctttcaacagaaacttactttgtttgcagattagacatgtgggaatattcttcactcttatagaaaaataccctgtttctcattctcaaaacttttggcactctcttagttttcccacctttggtagagacataagtacagtattattttttctttactgtgagaaaaacaacagcagaagcagaataaaacagggtacttggccctctcagcctcagggttcaggaagcagtagggtatggtggaggctgggatggtgcagagtgcttgtcctgtctcaggggacaattctccagccagtggttggaatgaagaaagacagacccaatgttactagatgaagataaagtggaagtctgcatttttatgtgaaatagtcacagtagaaacaaatcacatctggaagccacatgttaccaataggctgtcattttgggacttttctgacatgctctaaaggatgatgacaagtctgaaagacagttatggcaaagaagatatttgtaagaaaggaaacatcaggttttattacatataaatattttgagcagcacctttttactagtattttggaaaagcatttctgtcttcattgagcgaagtggcaatacatatgtaatatactgatgctgaatttgcggtgggttgatttttgtccattgttggctttcacatggaagcatgaatattgtctccccgctaccccttttgagtgacatccttccagtacctccatttctcaagttgcaggtaagcaccttgtgtatatacagttaaatagtgggcacacatctatcccaggaaaagaagacagtgagaattccctttggttaagtggagcagttgaatggccactatacctggatgcaaatttgatccgaattttctgctctaaaccctccactgctttctgctgtttccactgaggaaagaggatgtgtgtcattaaagctttgttgggacctgtcacagtcaaggtgggtataattatgtttaatttattgaagtgtttctgggcatcgtctttttcaaattcatatattctatccagaagatgtgaattcattttcattattaaaaaaataaaatattacagataaagctcaacactcccccctcccccttaagcacaaataccttgaatcttagaggtaattactattattttggagtgtggcttttccaaacctttttgtgtgtatttgtatacatatgtacttgcctataaaaatacagttttactgttttttacatgactgatattctttacatactgttctgcagacctactatgtcttggatacacacatgcatgtatatatgtatatataggtaaatatatatataggtagatataaatacatgcattcatgtttgtgtatattccatgatatgtgtataatggcttactttttcctttttttgtgagtttttcactgtcataccagtgttgcattgaacatccttgtaaatgccttttgcaggcttattttcaaaaatcttccctggggaagatacagaagaattgaattactgggctacagggaaaccatttctctttttattttctcctaataattatctacatgtgtgttttagaaacagtcttaatttaatattgggggtttcaaaattttttttctcattttaaaattccagttttatatgctgtactcatttgaattctgccttttgaatctagatttggaattgatatggataagcaaaataggttctaagtggtagtgatagttcataaccagtttgcttttggaataggtgctgtttcaatcttggggaaggtaaaatgtcaattgaggaaataatctttaatcatgaagttcttttttccaagtcattctctgctccctttggaattatgacaacttggatccagaggtgctgtgaaaatattttcttacatcatacctcttcttttcatacaagtttgaatgatcccggaaaatacagtttttgtattttcaaaaaaaaaaatgaagtctggaacacccacttttcttaataggatctagtttatttgtttaggtagtaaagcttttattaaaagaacatactttgaggattttctgtttctcacctgagccttctgtattcactagatatgaaactgagtgcattggcagggcctctactagacctgaaaggcagcattcccagtgtttattttcaggggccagagggaaggctattgactgacattggaggccttaacccctggattggtaaggttctggtggaatgattgcttagattccataaacactcgaatagatgattactcctttctgtatgtatgcatttttggaagaatgataaaatatgaaaagtgtgaagagttgtgcactcaagtggtggttttgacctggggagcttttaaaactcccaaagctcaggctacacctcatagcaattaaatcagaatctaggagtgggacccaggccttggtaattttttaaaaggccaccaggtcattctaatatgcagccaactttgagaactggtggggtaaaggggattttaaattttatttcatctctagctgatgataggttcattaagcaaaactttcgaaggccctggtctgttggttaactttgcaggtgtggaagatacagttgttggaaggatacttgttaatgaaactctttaaatgtgcaaaagaaaatccacctaggctgaaagagttaatgcggtttccaaaggtgcttgatagccaagaaacagcttaggcacagggacagtctggcttcttgggagcaaataaagccaagatttaaaatgccttttaatctaaaacatatgtttgcccgtgggcctggaaacaagcctaggcctttgcagttgtgaagtttcctcacgatagacagacatgagttgtggtccaatgttatttaaacttgaaagcttagaggagaaatttggtttgtggaggaggttgtagatgggagaagagaagtgcagtgggcaggcagaacaaattatttttctgtggtttgtcctttctgattttaagaggagaactagttcatagttccagttatcacatacaaaatggaacaaacctcaagaaaatgagaattgctattttcaataagctagaatgatctctttaaattaatctgctttgatacctaagataatctctatttgtggcataagcgtccttataaatgcattctatggtggtatggactgttttgcgtcttctttagagtacgtgactccttcattagaacttttccccaaagattctgatttctcattgttttttaaatttttattttgaaatagttacagattcataggaagttgtagaaaaaaatgtacagagaagtcctggtgtattcttcaaccagccatccccaatggtaacatcttatacaatgagaagtgtgtgtcaaaacttttaaaagccaagaagttaatgttgatacactccacagagcttattcagattttaccagttttacaagcactcatgtgtatgtgtgtgtttggttctgtgcagttttatctaatgtaacttcatgtatttgtgtgtgtttggttctgtgcaattttatctcatgtagcttcatgtaatcaccaccaccataatcaagattcagaactccatgtgggaatgtgaagaactgttaagagaatgagtatagaatgagtcactttgcttgtagtcccatcatgacttaaattcaggactttatattgttggggactgctgctttgagggggtaagtagcatagcttttgcaacataaagtggctttttagttttttttttttcatgagatcatcaatattggtgcttttctcagtaactacgcttttgagtagttcaagcatggccacttgctttatttgaagggagtaaaatgagaagtatatgccccagagcataagaatctgttgctgatcttaatttttggacaaattgaatgctaggaagttctttttctgccaaacttcagaacatttgagacctgctcagtaaacagtcattgtatatttttagtcctaaaacagtaagaagactattggcctcccagagaaatgccctgatgtatttgaattgaataggcatggctttataataaagaaatagtaacagtcactttaaatagcatattctaagcattaagtcaacctgtcaaaccctgcctcactcacattttttaggtgattactgtctccagagcataaggatacataatcatgtctactgttcacatggcataaggataaatcctcatggataggataatttaaaaattatttttgcaatagtatgtcaaaattaaggtgtttaggaaagtccattgttattaaactttctgttcccaggacttgctgataaattacaatcaacaaaacagtttgtattctgttcttgtacccacatccccctgtctaccttagaaattcttttttggggcaccatttttggcaagaattctataggaaataagagtttctggagtttgttctgattggttcagagtcagcaagctcagctctgatgaagtaatgggatgtgtgaaaagaagtgtctaaacaccaagataggaatattgagcaaaagcagctttggggtgtatatcaaaaatgcattctgtctgatgtaatggtgtttttttgttagaaatttaatacagtaagaagtcagcaaaacttcatgttgacaatcccattgtctcataaagcttgatttgaaaaagacaatgtagaaacagactatccagaagacatttagagccttaaatattctgataatcaccaacccacactcatggaagagcagaggagaagataatcaacattagtgactataaatgaaaagaaccagaaaggctggattactttccatcaaaaaaagtaggttgggtgtggtgcctcatgcctgtaatcccagtgctaggaggctgaggtgggcggatctcttgagcccaggagttccacaccaaactgggcaacatggtgagaccccatctctacaaaaaatagccaggcatggtggtgcatgcctgtagtctcagctacttgggaggttgaggtgggaggatcccttgagcttaggaggtggcggtttcagtgacccaagattttgccactgcactccagcctgggtgacagagcaagaccctgtatgcaaaaaaaaaaaaaaaaaaaaaaaactaatctttatgaaaaaataatcctgaatatagatttaactgttaagaggggggaaaaccaggattccagttatgtttccctcgccacccctgacccagtcaagaaggcaatgaaccagccagccccttttaacaagtggaacaactacagagatgttttgaataactgtacagaagttaagaaaatattcaagccaaaactagtctactcaatgaacatagatacagccccaaaaagcagtggttagagatggcaagttgcataattttagaaataccacattagtcactgagcttttaattaagaggatgtcaaaaatgcagtgtaggccaggtgcagtggctcactcttgtaatcccagcactttgggaggcagaggtgggtggatcacaaggtcaggagctcaacaccagcctgaccaatatggtgaaacccgtctctactaaaaatacaaaaattagccaggtgtggtggcatgcgcctatagtcccagctactcaggagactgaggcaggaggatcacttgaacctgggaggcagagcttgcagtgagccacgattgcaccactgcactccagcctgggccacagagcaagactctgtctcaaaaataaataaataaaaaaaaaataaaaaaaatgcagtgtatccccctgtgtaaggaaaaagcaggtcagcgtctgagcaaccaaccaagaaacagcaatagtcgtaatgccatttgtcaaacatgtcaacatggggttgtatttaaaaagtaaatgacgaaatgcatgtaaactttataacacaaaggtttttagctgggttttcttcccaaactatattaacatagtttaaagctaagttttatggttgtgtccgtgttacatgtcagtgatgttgttaagctaagaattctttttcactgtgaagcagtacaaattcatgactttgctaacaatctatgactgctgagcagtaatacagctaacaattactgagcacatactatgctctagaagtgtgttgagcatttcacatgtatggttttacctgaaccttagaacaatattatgaggtaggtgctatattattatctctgttttacagatggccaagctgaggccaagaagagtaagtaatttagagagatccgtagctgataggtggttgagcccggatgaaaacacaccccaaagcccatgcacctaacaaactactcgatttgggaaaggtattaggtgaggtggaaagcaaatagggtgggtgaagcattgttaggtcagatacctgaggataaagtggggaaagggtaaagggaggaacaacattcttgccgacagctgaagctccagtccagaagcagtaactgagggcatggaagtcagagccacagaaatcagtaaataggggaaagagaaaggttttcctaagggaagaaaaggaattgacatttgtttgaggtgtgactggagaattggaaatggcaaaacaagagtttctgagcatgaaggggtgagatcgtgagaaatgaaatcaccctgaagaactcttggtgaaagaaaagcagacccctagtgagcagatggacatgtaaaactggcgacggtttgggttgttcctttactgtgttcattgttcacctgccttcaacatttcatcagacactcccttcctctggaggctagcatctgttttgctttttttttttttttttttttttaaataggactgagcattcaactcttaggcacttggttatatatagtacttaggttattgaaaagagggccgagtgtggtggctcattcctgtaatcccggcacttttggaggccaaggcaggcggatcacctgaggtcaggagttcaagaccagcctggccgacatggcgagaccccgtctctactaaaaatacaaatattagctgggcatggtggtgtgcacctataatcccagctacttgggagactgaggcacaagaatcacttgaacccagaaggtagaggctgcagtgagccaagatcgcatcactgcactccagcctgggtgacagagcgagactccatctcaaaaaaaaaaagctt

SEQ ID NO: 59663 - DNA, 447 bp, Homo Sapiens
  misc_feature (39)..(39): n is a, c, g, or t
  misc_feature (89)..(89): n is a, c, g, or t
  misc_feature (299)..(299): n is a, c, g, or t
  misc_feature (313)..(313): n is a, c, g, or t
  misc_feature (322)..(322): n is a, c, g, or t
  misc_feature (403)..(403): n is a, c, g, or t
  misc_feature (420)..(420): n is a, c, g, or t
  misc_feature (442)..(442): n is a, c, g, or t
gctttaattaaagatcttttttttttttttttttttcanttataattgaaaatataatttgcataacaacagtaaattctacacatganggcaaacgtccgtggttgacagaaattacactggccagaatccccagtccccatgaggcttgtccagacgcagtgaaccagtcgcagctgataacacacagaccattcccgatcccagaggtgcatttcaggattcattctatttcatcaggtgacgttttaacagaaacaaaaccgcaggcagcggttggggggagctggaggttggantcacaccaacattntaggcattnttactctaaaaaaaattacttttttgggctggggtgctgtgggctcacaccttttaattggggggggccaggcaggtgggnttacctgaggtcggggntttcggggaccagccttgaccnactgg

SEQ ID NO: 59664 - DNA, 716 bp, Homo Sapiens
  misc_feature (661)..(661): n is a, c, g, or t
  misc_feature (677)..(677): n is a, c, g, or t
  misc_feature (701)..(701): n is a, c, g, or t
agacctatttgttagctagtagagctttatgttcgctgtccatgaaaccttctgtaaccacagtgactacaagtagttctttctctattgaattattaggtccagaatagaagatgtcattgtacactttatttccctcacactgtgttacgctctgatgtgctatgcttagctatctgtcagagattagtaaattataaaactcatgtgtactacttaagtttatatcttatgctagtttataagaacaattaaaaggacttagaagattaactttggtttcatggtctctgaagtcactgactgctatttcagcttgtttacccttacctagcattaagactccatctacttctgtgcagtatatgaaaatttttaaactttcatttagactggtggataggactgaccattacaaattgtcgttatcaattttttttcctttttttttttaagagccaagttctcactgtctcccaggctggagtgcagtggcatgattatggctccctgcagccttgaactcctggactcaagctgcagcctctcgagtagctgggtgcatgtgctaccacacccaattatgaatttcatcattagtttcttagtagagtccacatgtcctcagtagtaagttcatcagtgctaaatatttgaaggnatttctactggtttgnaaaagtaacttaagcctacctggnctgctatcttttgag

SEQ ID NO: 59665 - DNA, 497 bp, Homo Sapiens
cttcgacggtgtctgcacacagaggggctgtttctgtctgttctccccctgcacccttctcagatgcaatctcaagtcataggagaactgtgcaaatgtttctcctggatggtttcctttagagcatgtgtcctataacttgaaatggttgtctgagcagaatgtttttagaagttagatttttttaggggggaaacaggaaccaaagcaaagccaatagagatcttgaaaaaaaaaaaaaaaagaaaaaaccacgggggttatcttaggaagaaaaaagctttttccgatgtgaaaactttttattaatatgggatatatcgggctccccttccctagtatgtataagggagaggaaatcacttctaaatttcaaggtaaatataaaggtggaggcccatccctctacccggaagactctgaagcctcgggaagtatcccttcccaatttcaattggcccaaaataggtagaagtgagcctatatttcggggggca

SEQ ID NO: 59666 - DNA, 491 bp, Homo Sapiens
tttttttttttttgtattggtttcttgtgtgttacttacaataggcatctaggagtcacatactcagaggcctaaagtccttgaaggccttgtttatgaaaggccacccagtgaaaagggctcacttttcctgtgtgagtcggggctggacagagctcaggccttgtctcaagggggcagtcgtagttgtacttaatcatgtggtaaggtgtacccaagtgttggtagagcttctgacttttatgtgaattcttccattatctaaatgttggctcaagttttaaaaactttgggctcaagttttaaaaacatatttggcctagaatcactaatctactgttatttgagatatttaccctagacattttagactagccaaaatatacttaagtaatttaggtatatatctcattgatatacagtccttatccttgaggggaaggtgcagtgtcaactctcagaactgccattttgaagattaaaagtatgat

SEQ ID NO: 59667 - DNA, 10708 bp, Homo Sapiens
  misc_feature (5785)..(5785): n is a, c, g, or t
  misc_feature (10696)..(10696): n is a, c, g, or t
gatcaccatcaccgagaccacctcacacagtactcccagctacactacctcaatcaccaccaccgagaccccctcacacagtactcccagctacactacctcaatcaccaccaccgagaccccatcacacagtactcccagcttcacttcttcaatcaccaccaccgagaccacatcccacagtactcccagcttcacttcttcaatcaggaccaccgagaccacatcctacagtactcccagcttcacttcttcaaataccatcactgagaccacctcacacagtactcccagctacattacctcaatcaccaccaccgagaccccctcaagcagtactcccagcttcagttcttcgatcaccaccactgagaccacatcccacagtactcccggcttcacttcttcaatcaccaccactgagactacatcccacagtactcccagcttcacttcttcgatcaccaccactgagaccacctcacatgatactcccagcttcacttcttcaatcaccaccagtgagaccccctcacacagtactcccagctccacttctttaatcaccaccaccaagaccacctcacacagtactcccagcttcacttcttcgatcaccaccaccgagaccacctcacacagtgctcgcagcttcacttcttcgatcaccaccaccgagaccacctcacacaatactcggagcttcacttcttcgatcaccaccaccgagaccaactctcacagtactaccagcttcacttcttcgatcaccaccaccgagaccacctcacacagtactcccagcttcagttcttcaatcaccaccactgagacccccttacacagtactcctggcctcacttcgtgggtcaccaccaccaagaccacctcacacattactcctggcctcacttcttcaatcaccaccactgagactacctcacacagtactcccggcttcacttcttcaatcaccaccactgagaccacctcagagagtactcccagcctcagttcttcaaccatctactccacagtcagcacatccacaactgccatcacctcacattttactacctcagagactgcggtgactcccacacctgtaaccccatcttctctgagtacagacatcccgaccacaagcctacgaactctcaccccttcgtctgtgggcaccagcacttcattgactacaaccacagactttccctctatacccactgatatcagtaccttaccaactcgaacacacatcatttcatcttctccctccatccaaagtacagaaacctcatcccttgtgggcaccacctctcccaccatgtccactgtgagaatgaccctcagaattactgagaacaccccaatcagttcctttagcacaagtattgttgttatacctgaaaccccaacacagacccctcctgtactgacgtcagccactgggacccaaacatctcctgcacctactactgtcacctttggaagtacggattcctccacgtccactcttcatactcttactccatcaacagccttgagcacgatcgtgtcaacatcacaggttcctattcctagcacacattcctccacccttcaaacaactccttctactccctcattgcaaacttcactcacatctacaagtgagttcactacagaatctttcactaggggaagtacgtctacaaatgcaatcttgacttcttttagtaccatcatctggtcctcaacacccactattatcatgtcctcttctccatcttctgccagcataactccagtgttctccactaccattcattctgttccttcttcaccatacattttcagtacagaaaatgtgggctccgcttctatcacaggctttcctagtctctcttcctctgcaactaccagcacttcttcaaccagctcctctctgaccacagctctcactgaaataacccccttttcttatatttcccttccctccaccacaccctgtccaggaactataacaattaccatagtccctgcctctcccactgatccatgtgttgaaatggatcccagcactgaagctacttctcctcccaccaccccattaacagtctttccctttactaccgaaatggtcacctgtcctacctccatcagtatccaaactactcttactacatatatggacacttcttccatgatgccagaaagtgagtccagcatctcacccaatgcttccagttccactggcactgggactgtacccacaaacacagttttcacaagtactcgactgcccaccagtgagacctggctgagcaacagttctgtgatccccctacctcttcctggcgtctctaccatcccgctcaccatgaaaccaagcagtagcctcccgaccatcctgaggacttcaagcaagtcaacacacccatccccacccaccactaggacttcagagacaccagtggccactacccagactcctaccacccttacatcacgcaggacaactcgcatcacttctcagatgaccacacagtccacgttgaccaccactgcaggttggaccttctgcctctctgttcccctccttcctcccctgcaaaattcctgtgtcactgaggtgaggctttatcctgagcttccctttctttctgtgttttccaggcacctgtgacaatggtggcacctgggaacagggacagtgtgcttgccttccggggttttctggggaccgctgtcagctccagaccagatgccagaatgggggtcagtgggatggcctcaaatgccagtgccccagcaccttctatggttccagttgtgagtttgctgtggaacaggtggatctaggtgagttgccagagctatgccttctgcacttcctcccacagggtgtcactgactctccccagacttatccctctgtggggcctggaggcacccatgcctttttgcccggtccttccctccctgccatctctcccatgccctccgctgccctgtgtcatgctcctctccgtcctcacccttaggaggtggctgggactaccctccctcctgggcccatctcctgacttgggctgcttggagctgtatcagtttccaactgctgccgggccaacaaacacaaatctggctgctggaacaacacgacattatcatgttagaattctgtagattaaaagtctgatgtgggtgtcactgggctgaaatcaaagcgtcaccagggctgtgttgtctttcaacggctccaggaaagaatccatttttttgccctttgcagcttctggagcctcccacagcaaggctgcatctctctgtgtctttctcccatagcctcatctccctataatgaactctggcctcctcaattgcttctcccactgttaaggacccttgtgataactttgcctcctccccaaatagtctatgttaattttctcaagatcagctgattacgccgggcggggtggctcacacctgtaatcccagcagtttgggaggctgagggggtaggatcacctgaggtcaggagttggagactagcctggccaacatggtgaaactgtctctactattagttgggcatggtggcagatgcctataatcctcactattcaggaggctgaggcaggaaaatcgcttgaatccaggaggtggatattgcagtaaagcgagatttcgccactgcacactagcgtagatgacagagggagagtgagactctgtcttaaaagaaaaaaaaaaatcagctgattgtcttataatccctgcactttggaaggccgaggagggagtatcgcttgaggcgaggagttcaggaccagcctgggcaacacagcgagaccctcatctccacaaaaaattttaaaaacttacctgggcatggtggctcatgcctgtggtcccagttatttggaaggctgaggtgggagaatcacttgagcctgggagttcaaggctgcagtgagctatgatccccctattgcacttcagcctggatgacagaatgagaccctatctcaacaataaaaaaaagttaggctgattagcaatctaattcaatctgcacccttgatcctcccttgccatgtagtatagcatagtcacagttctggggattaggacatggacatcttcccactatgggggcagccaggagggaccacaggctgaccgctatctttctgcctgctttcactcatctccacacaattccttccttcctctcgctctcttctttcttttcttcttttcttttgtctctttctcttttctttttttctttctctttttctttctttctttctctttcttttctttcctttcttttcttctttccctcatcttcacacaatgctttctccctttctttctttccttctttctttctctttctttctttctctctctctctctctctctctctttctttctttctttctttctttttctctctctctctctatctttctttttcattttgttgagagacagtctcactctgtggcccaggctggagtgcagtgatgcaatctcggctcactacaacctccgcctcctgagttcaagtgattctcctgcctcagcctcctgaggcataatgcatcctggaattcctacatctgttcctgcctctgggcatcagtcctcagggatcttggaggggagcagcaggaggagcctgtgggttggggtggtggtgttggtggcttcagacaaaagcagacagagaagtgactccggacatgcatgctctgtgtagatgtagtggagaccgaggtgggcatggaagtgtctgtggatcagcagttctcgccggacctcaatgacaacacttcccaggcctacagggatttcaacaagaccttctggaatcaggtaaagggcaaagagaggggattttttttttttttgaggtgtagtctcgcactctcaccctggctggagtgcaatggtgcgatcttgggtcactgcaacctccgcctcccgggttcacatgattctcttgcctcagcctcccaagtagctgggattacaggtgcacaccatgacacctggctaatgttttgtatttttagtagagacgggttttcactatgttggccagactggtctcgaactactgactttgtgatccacctgcctcgtcctcccaaagtgttgggattacaggcgtgagccacggcacccggccggggaggggaattgaagggtcttccctggagctggggttgggcgtctgggtcccctcaggtctgcaggttcggacgtgagcccagggatccttggtgtttcagatgcagaagatttttgcagacatgcagggcttcaccttcaagggtgtggagatcctgtccctgaggtaggagacccatctggggatgcggaggcggtgttgggtgggggaaatgtgcgcacacaaaaaacccattcctttcttttgtaatcatcagattttataaagaggggtggagggggtacataaggaatcactccctgggtattttttcggatcgttttctggggccatttatctggaggaggggtggcacctctcttcttcagcacactggaaggagagaagttgcagggacatgtgggaaggtggtgcctggattgatgactttgtccccctctggctggcccctgctctactgagtgggtcagcattagaaagagagagagagaaagagagagagggagagaacgcacgtctaggggcgcccggtggatgatggcttgatgcaacaagaagagaacgtcaggccagatgtggtggctcacacttgcnatcctagcactttgggtaggctaggcgggtggatcacctgaaagcagttcaagaccaacctgggcaacatagtgagaacccatccctacaacaataaaaatagtaataataataataataataaaatgattagccaggcatggtagtgcacacctgtagtccctgatacttgggaggctgaggagaaaggatcactttagcccaggagttggaggctgcagtgagctacaatgataccactgcactccagcctgggtgacagcaagactttgtctctataaaacacacagagagaggaagtcaatcatgtcagtcattccttgtcctgccttcccaggcagaccaagtcaggaatgctggcagccccttctgaaaaggatgcacgtggcatcccaactcatgacctctgctcccttcccccttctggtgcactttgggttgcttctggaggtgcccctccaaggacccatatgttcctggctggggcactctctaaggctgtggacccctcaggaatggcagcatcgtggtggactacctggtcctgctggagatgcccttcagcccccagctggagagcgagtatgagcaggtgaagaccacgctgaaggaggggctgcagaacgccagccaggatgtgaacagctgccaggactcccagagtgagcccaggctggagggaggggccagggcctgaggtgtcaccccagcccactccagctcagccagggggccactgggctcaggtgccagccctgtggtacctctggcaggttgggagaaggggaataagtccacacacaacggtgtcaagggtggggctagggagggtctccccgtgacctcggtactgggaaagagaccccctgattgtcatggtcagcatttcccggatggctgaagacctcggattattcaggggagatgaggcaggcaacaggagtcttcgcctgtggctctctccgtctgggagagggctctcccagacggagagagccctcactgccctccctgtgcctatcctgcctcctggcgctaaccccttgaccttaaccccttgatctgccccgcccattccatctgtgcctgtgtttccgcagccctgtgttttaagcctgactccatcaaggtgaacaacaacagcaagacagagctgaccccggcaggtaagggtggggtaaagggctgagtggtctcccgcggctatgatccgggctaccagggacatttgcccattgaagcctgtgggcagggagagacctttgggggaggcaagtcatgtggcccaggcggcccttcctggcgctggttagtggcttccacctgaggacagcaggggccacgaggagagggtgagggtgctgcgggtggcctcccctcatcgaatcccagggtctaccccacagcatcccacctcggaaatggaatcctcctcgcgcatattcagaggcaccattatcaggcccctgaatagaatggatgaggttcttgtctctgtgcatccccctccccaacccccagccatctgccgccgcgccgctcccacgggctatgaagagttctacttccccttggtggaggccacccggctccgctgtgtcaccaaatgcacgtctggggtggacaacgccatcgactgtcaccagggccagtgcgttctggagacgagcggtcccacgtgtcggtaaggccccgctcaccatcggcatcagccgagcccctcccactcattctaggatgaagccctgccccatgctccgccccggctccgcgccctgggcctacagtggagcctcgtccccagagtgccgctccaagcccatccccgttgccctacagtggagccctgccctggagctctgctcctttgatggggttgagtcctgtcccctaattctgggagagaaccccgcccactcattctagggtggggccccgcctcctcgttctagggttgaaccccgccccctccttctagggtggagccctgcccacttgatctaaggtggaatcccgccccctcacctagggtagagccccggcccctcgttctagggtggattcccagccccttgtctagggtggaaccccccgctgccctaggctggagccccgccccctcacccgcccccgcggggcccaggtgcacgggtggaccccgagcccggaggtgaagagggtctgaccctgcgatctcccgcagctgctactccaccgacacgcactggttctctggcccgcgctgcgaggtggccgtccactggagggcgctggtcgggggcctgacggccggcgccgcgctgctggtgctgctgctgctggcgctgggcgtccgggcggtgcgctccggatggtggggcggccagcgccgaggccggtgagcgtgcggggggcggggccggggggcgagggcagccaaggggtcccaggcgggccggctctgtctgaccgcgcggcggccccacctaggtcctgggaccaggacaggaaatggttcgagacctgggatgaggaagtcgtgggcactttttcaaactggggtttcgaggacgacggaacaggtgagtcctgcctcctggggaagcaggcagaggctttcctgggcaccactgcgaggacagacgccctccctgccttcctcgcatttactccgtccccctctcccttccgtcccctccctctccccttctctttctccgctcctctctctctctagacaaggatacaaatttctatgtggccttggagaacgtggacaccactatgaaggtgaggggctaaagagggggaccccaaggaactctcccagcctccattccagaatccctccccgacccccaccagggcagggagggggctgggctcggatcagcagtgacctccctgtcagcccaaaccagtggctccgcgttcccgtccctcactgtgactctgacaggtgcacatcaagagacccgagatgacctcgtcctcagtgtgagccctgcggggccccttcaccaccccctccgccctgccccggacacaagggtctgcattgcgtccatttcaagaggtggccccaggacgcgggcagcccaggctcctgctgttcttgggcaagatgagactgttcccccaaatcccatccttctccttccaacttggctgaaacccacctggagacgcagttcacgtccaggttcttccactgtggaatcttgggcaagtcagtaacgagcctcagtttcctcacctgcaaaacgggtacagcattcctgtatgatacgtcacgccgttgttgtgaaaaccacatagacttggtcaattctcggtcctactctgccctcccgtctcagccctcgtgttgccattgcctctctcggatcctccaatcctcacgtccttcacctggtctctggccctggttcttattttctctcaattccctactgcctgtttcttactttgaacctggaggcagcctgcagccccatcccatctcctgccctctcctgatctaactccctgctgcatctcttgctctcattccttagacgtcctccccttttgaccccgttccttcatccatcctgcaccccagtcccccagccctaaatcctccctcctctcctcacatcctggtccctagcaaggtatagatagcctctgtgtcttaggataccccgggtgctgttccctcggtcaccctgttgcccagttccccgtttctcttgctctcattccttgtatcctttccccttttgagcccgtccattcatcggttctgcccccgactcccccagccctaaataccccagctgctgttccccccatcaccctgctgcccaattctttattctccacccctttctctcacccctggagccctgcgggtgggggcagggcatgagttccccagtccccaaggaaaggcagccccctcagtctccctcctcctcattcccttccatctccctcccctctgccttttaaacccatcccctccgattcccctcctcccccctctctccctggtgtcacctggattcctgcagtaattctgagcccttgaaatcctcagtcgccttggcggggaagattggctttggggacaggaagtcggcacatctccaggtcttcatgtgcacaatatagagtttattgtaaaaagcagcagctctctgtcggtctccttttcaccccctcagtggtctctgtttgatcagagaacagggatttccagaggtggcactgtaggaggatcctgggagcacctgtgtctcctggggacaaaggagggggtctgtgggcagcccttgggggccatgaggttcctcacagaaaacacagaggttggggggacccattttattggggagtgactctgggcaggggccccttgggctttgtcatctatgctctccccacccccaccactgccctgaccttgatactgggggcttagggagcaattagacccctggtgttggttcagggagttgggtggtccaggggctagggctgcctggtccagccaccttttgcaaggatgggtaaagctgagcctccccaaagatcttgatcccccacaaggcccccaaaccctgatagcaaactcacacagcagagcctgtctatgctggcaccgggcccttctgttcctgctgttgtgggcagtcaggcctgcctgaggagtcgagagtgatcagaaataacgtgtccccttgggtctttgggtgctggcttgggagaggcccctttgatgctttctctgggcagggatgggccatggccttttgtcacctctgtgtctggccaggggttgggggacaaggaccattaaaagtcttaaggtggtgaagtggggcccttctgcccaaggaagaagggcttggaaacttgggggacccccaggggaaaaggcccctnggacattttggg

SEQ ID NO: 59668 - DNA, 502 bp, Homo Sapiens
  misc_feature (424)..(424): n is a, c, g, or t
  misc_feature (467)..(467): n is a, c, g, or t
ttttttttcatattgaacttttatttctgtgcggtagtcagttaaattcttcatggcatatagtaattatcaggccatttgagaatattttacaagcaggttggaacagagaacaggtagtaggaaaccaaatcttatctctttgagactcattttgaattaactacccctcacctctcattcgaaggcactatattttgcagagaaaaactcacacaacccaaatgtttaatcagaagccatgtaataactgaaacacatgttcagtttctcaataatgcttatttctaaagagaacattaaaaactttggtggcgccggggtggggcttaaaaccattgaatcactgggtccccaacttttttgggcaccaaggaccagtttcctggaagacaatttttccagactcgggggtggggatggnttcaggatgaactggtccagcgcagatcaggcattagattccntaaggagtgcacaacccaagatcccctgcatgcac

SEQ ID NO: 59669 - DNA, 547 bp, Homo Sapiens
agtagatttagggtttctccatgtcggttaggctagtcccgaactcctgacctcaggtgatccgcccacctcggcctcccaaagtgctgggattacaggcgtcagccaccgtgcccggcctctgaaacatctttcttaatttaactttcaactaagttctagtctgtaaatgagaaatgcaagtaagaacaaggggtcaatttattttaagtaaatttgtcattaaatatcaatgtgtacaatttcaaacatttataaatcttccaatttatagaaaaattaatgtaatcttaaaattatttgaacagtggctttcacaattatttacaatgaactcaacctacttttgtagaaacatttatgtttaaaagtacccctgccacaaagtgatcatttcacagtacctttctataatatttatgtcacttaagtggtggctgcatcaataaaacctagcagattcaataaattagaaacagcacaatcagaacagtcaataaagctaccattgattccaaacaaaacagaaccttttatagtaagatat

SEQ ID NO: 59670 - DNA, 6272 bp, Homo Sapiens
gttagctcaaataatgtgcttttaaattctcaggctgatgacagagttgtaataaataaaccagaatctgcaggttttagagatgttggctctgaagaaatccaggatgcagaaaatagtgctaaaactcttaaggaaattcggacacttttgatggaggcagaaaatatggcactgaaacgatgcaattttcctgctccccttgcccgtttcagagatattagtgatatttcatttatacaatctaagaaggtggtttgcttcaaagaaccctcttccacgggtgtatctaatggtgatttgcttcacagacagccattcacagaggaaagcccaagcagcaggtgcatacagaaggatattggcacacagacgaatttgaaatgccggagaggcattgaaaattgggagtttattagttcaactacagttagaagtcctctacaggaagcagagagcaaagtcagtatggcattagaagaaactcttaggcaatatcaagcagccaaatctgtaatgaggtctgaacctgaagggtgtagtggaaccattgggaataaaattattatccctatgatgactgtcataaaaagtgattcaagtagtgatgccagtgatggaaatggttcctgctcgtgggacagtaatttaccagagtctttggaatcagtttctgatgttcttctaaacttctttccatatgtttcacccaagacaagtataacagatagcagggaggaagagggtgtgtcagagagtgaggatggtggtggtagcagtgtagattcactggctgcacatgtgaaaaaccttctgcaatgtgaatcctcactgaatcatgctaaagaaatactcagaaatgcagaggaagaggaaagccgggtacgagcacatgcctggaatatgaagttcaatttagcacatgattgtggatactccatttcagaattaaatgaagatgacaggaggaaagtagaagagatcaaggcagagttatttggtcatggaagaacaactgacttgtccaagggtttacagagtccacggggaatgggatgcaagccagaagctgtatgtagtcacattattattgagagccatgaaaagggatgtttccggactctaacttctgaacatccacaactagatagacacccttgtgctttcagatctgctggaccctcagaaatgaccagaggacggcagaacccatcatcatgcagagccaagcatgtcaacctttctgcatccttagaccagaacaactcccatttcaaagtttggaattccttgcagttaaaaagtcattccccatttcagaactttatacctgatgaattcaaaatcagcaaaggtcttcgaatgccattcgatgaaaagatggacccttggctgtcagaattagtagaacctgcttttgtgccacctaaagaagtggattttcattcttcatcacaaatgccgtccccagaacccatgaaaaagtttactacctccatcactttttcatctcaccgacattctaaatgcatttccaattcctctgttgttaaggttggtgttactgaaggtagccagtgtactggagcatctgtgggggtatttaattctcatttcactgaagaacaaaatcctcccagagatcttaaacagaaaacctcttccccttcatcatttaaaatgcatagtaattcacaagataaagaagtgactattttagcagaaggtagaaggcaaagccaaaaattacctgttgattttgagcgttcttttcaagaagaaaaacccttagaaagatcagattttacaggcagtcattctgagcccagtaccagggcaaattgtagcaatttcaaggaaattcagatttctgataaccatacccttattagcatgggcagaccaagttccaccctaggagtaaacagatcgagttccagactaggagtaaaagagaagaatgtaactataactccagatcttccttcttgcatttttcttgaacaacgagagctctttgaacaaagcaaagccccacgtgcagatgaccatgtgaggaaacaccattctccctctcctcaacatcaggattatgtagctccagaccttccttcttgcatttttcttgaacaacgagaactctttgaacagtgcaaagccccatatgtagatcatcaaatgagagaaaaccattctccccttcctcaaggtcaggattctatagcttcagaccttccgtctcccatttctcttgaacaatgccaaagcaaagcgccaggtgtagatgaccaaatgaataaacaccattttccccttcctcaaggtcaggattgtgtagtggaaaagaataatcaacataagcctaaatcacacatttctaatataaatgttgaagccaagttcaatactgtggtctcccagtcagccccaaatcactgtacattagcagcatctgcatctactcctccttcaaatagaaaagcactttcttgtgttcatataactctttgtcccaagacttcttccaagttggatagtggaactttagatgaaagattccattcattggatgctgcttctaaagcgaggatgaatagtgagtttaactttgacttacatactgtatcttcgagatcactggaaccaacctccaaattattgaccagtaaacctgtagcacaggatcaagaatctttaggttttctaggacctaaatcttcactggatttccaagtcgtacagccttctcttccagacagtaacactattactcaggacttgaaaaccataccttctcagaatagccagatagtaacctccaggcaaatacaagtgaacatttcagatttcgaaggacattccaatccagaggggaccccagtatttgcagatcgattaccagagaagatgaagaccccactttctgctttctctgaaaaattgtcatctgatgcagtcactcagataacaacagaaagtccagaaaagaccctattttcatctgagatttttattaatgctgaagatcgtggacatgaaattatagagcctggtaaccagaagctacgcaaagctcctgtcaagtttgcctcatcatcttcagtccaacaggttactttttctcgcggcacagatggccagcctttattattgccatataagccttctggtagtaccaagatgtattatgttccacaattaagacaaattcctccatctccggattccaaatcagataccaccgttgaaagctcccattcaggatccaatgatgccattgctccagacttcccagctcaggtgctaggcacaagagatgatgacctctcagccactgttaacattaaacataaagaaggaatctacagtaagagggtagtgactaaggcatccttgccagtgggagaaaaacccttgcagaatgaaaatgcagatgcctcagttcaagtgctaatcactggggatgagaacctctcagacaaaaaacagcaagagattcacagtacaagggcagtgactgaggctgcccaggctaaagaaaaagaatctttgcagaaagatactgcagattccagtgctgctgctgctgcagagcactcagctcaagtaggagacccagaaatgaagaacttgccagacactaaagccattacacagaaagaggagatccataggaagaagacagttcccgaggaagcctggccaaacaataaagaatccctacagatcaatattgaagagtccgaatgtcattcagaatttgaaaatactacccgttctgtcttcaggtcagcaaagttttacattcatcatcccgtacacctaccaagtgatcaagatatttgccatgaatctttgggaaagagtgttttcatgagacattcttggaaagatttctttcagcatcatccagacaaacatagagaacacatgtgtcttcctcttccttatcaaaacatggacaagactaagacagattataccagaataaagagcctcagcatcaatgtgaatttgggaaacaaagaagtgatggatactactaaaagtcaagttagagattatccaaaacataatggacaaattagtgatccacaaagggatcagaaggtcaccccagagcaaacaactcagcacactgtgagtttgaatgaactgtggaacaagtatcgggagcgacagaggcaacagagacagcctgagttgggtgacaggaaagaactgtccttggtggaccgacttgatcggttggctaaaattcttcagaatccaatcacacattctctccaggtctcagaaagtacacatgatgatagcagaggggaacgaagtgtgaaggaatggagtggtagacaacagcagagaaataagcttcagaaaaagaagcggtttaaaagcctagagaaaagccataaaaatacaggcgagcttaaaaaaagcaaggtgctttctcatcatcgagctgggaggtctaatcaaattaaaattgaacagattaaatttgataaatatattctgagtaaacagccaggttttaattatataagcaacacttcttcggattgtcggccctcagaggagagtgagctgctcacagatactaccaccaacatcctttccggcaccacttctactgtcgaatcagatatattgacccaaacagatagagaggtggctctgcacgaaaggagtagctctgtttccactattgacactgcccggctgattcaagcttttggccatgaaagagtatgcttgtcacccagacgaattaaattatatagcagcatcaccaaccaacagaggagataccttgagaagcggagcaaacacagcaagaaagtgctgaatacaggtcatcccctagtgacttctgagcacaccagaaggagacacatccaggtagcaaaccatgtgatttcttctgactctatttcctcttctgccagtagtttcctgagctcaaactctactttttgcaacaagcagaatgtacacatgttaaacaagggcatacaagcaggtaacttggagattgtgaacggtgccaaaaaacacactcgagatgttgggataactttcccaactccaagttccagcgaggctaaattggaagagaacagtgatgtgacttcttggtcagaagaaaaacgtgaagagaaaatgctctttaccggttatcctgaggacagaaagttaaaaaagaacaagaagaattcccatgaaggagtttcctggtttgttcctgtggaaaatgtggagtctagatcaaagaaggaaaacgtgcctaacacttgtggccctggcatctcctggtttgaaccaataaccaagaccagaccctggagggagccactgcgggagcagaactgtcaggggcagcacctggacggtcggggctacctggcaggcccaggcagagaggctggcagagacctactgaagccatttgtgagagcaacccttcaggaatcgcttcagtttcacagacctgacttcatctcccgctctggggagcggataaagcgcctgaagttaatagtccaggagaggaagctgcagagcatgttacagaccgagcgggatgcactattcaacattgacagggaacggcagggccaccagaatcgcatgtgcccgctgcccaagagagtcttcctggctatccagaagaacaagcctatcagcaagaaggaaatgattcagaggtccaaacggtaagaccaagaaaacaagagtacgtatacaagtgtaaaccaggccaccaagtggtcgggagctctggcttgcacccagaataaatgtattatactcaagtttaaacattatgagaaagttgtgagagtcatttctcacttatggcactgaaaaaaaaaaaagcacatcatggtatgaatgactcatatgcaaaagatgaaaaacttctcactaatttgcatgtcttaggctcctctttattagaaacctaaatgtaaataaagaatattttaggccaggtacggtggctcatgcctgtaatcccagcacttagggaggccgaggtgtgcagatcacatgaggttaggagttcgagaccagcctggccaacatggtgaaactccatctctactcaaaatacaaaaattagctgggtgtggaggcacacgcctgtaatcccagctactcagtaggctgagccgggaggatctcttgaacctgggaggcagaggttgcagtgagcttagatggtgccactgtactccagtctgggcgacagaacgagactccatctc

SEQ ID NO: 59671 - DNA, 784 bp, Homo Sapiens
gccaaagtagactgcttaaatgataagcttgctaaagagttgtatgcacaaaggatgattaattctgggactatactcacaccaaggtctgctgtcttatagccaagaattacagctttatttatagagagtgaattatgggtattttttcagaaaatattgtcatctgatatacacataaaacaactcacattgttggagttaactaattatccccatttcatggttttcagtggcaacttactgacccttgttttgcctgtgcttgtatgcatgcattttcaagcaagtaataaagcagcctcatttaattctggataatgctgggttttacatatagactgaatgctataatcaaatctattgacagtatctgcagttctttcagaattccagggcaaataatataacgacctgatatctttctacaggaatattttcagacattatatagcacattactgatttaatgcttttacttttatctttcaaaacaaattcactaaaaattaacagctatgattctgaagtcacctttctcaaaccttgaaaatgagctctaggatctctataaacatttctaacacttttcctgtagttaccatagacagacatctgtcgttagacctgtgtggtatttcaaagaactcatatgttaacaaatacccatgcaaagagcttcaaaagtgaaccgcgttaaaggaacacatttactcactcagacatattggcattgaatcgcaaagttattgttacatcacgcatttcccaaagaatttcatct

SEQ ID NO: 59672 - DNA, 475 bp, Homo Sapiens
ctagtttggggggagtctctataacctaagggaagtacatattctttgatctaagaattccactgctgcaacaaataagggattagagaaataaatgatcatacatcctcccaatagaatacgtacaagtattaaaaagaatgagagatatttacatgaaaaatctgaaagaatatatgccaggctattaatagtagctatatatcaggcaagagagcaagggatggcactgaggggaataagattatactggtcttcagattttttccatatttaaaaaaagtaacacacacataacttggtaaccagaataaatttcttttgcatagggaaagaattaggaccttccaaatgaaaacaagtagagttatagttttaaaggaaagtgcagcccaaggtaatacagaggaaaggcagtaaatgcgcatggggaatgggtgggcaggaggtgctggggggctgtcaggggctcatc

SEQ ID NO: 59673 - DNA, 535 bp, Homo Sapiens
  misc_feature (491)..(491): n is a, c, g, or t
ttgtttttaactttaaaacttattttttaatccacatttgaaatcttggaatgtagaggttgacaccatctttatataaacacagtttttatcaagagtcctctatatcacacacgggttcgatgggaccactccctggagattctgtatactctagggggtaggaatcagagttctcattttgtacattttcaaaagaatatgaggagcaactttagcaagggctcaagtattaaataaaccgagtaatattctggatttaaaaagcaacactattccaaggcattgctaatctctgtacttcagtaaacactgaaaagtcaacgtaactctataggtcgcatattcttgaatgacagggaaaggcaaacatctctacagaggtgtgatcgaaagcattttacattaggtacacagaaactttaaactcacactatgtaagcctctaatcagcctgagcaaaatccattgcctacacagtcatttaattnttccccgtcacttaggataaaatgcagaagaacaaatctagcag

SEQ ID NO: 59674 - DNA, 554 bp, Homo Sapiens
ttttcatttaggaagttaaagtagaaacactatttggaactcaaaagtcatttgaatggatcatcacattccctgacaatgccaaacaaaggagaatcactcctgagggtgaaatggttaaaggagaaaactggtttggaactcaaatgtcacttcaatgaatgatcacattatctgacaatgccaaaccgacaggcaggggagcctggcaggaggatgagagctacctggtgactcacctggctggaattaacatgtcataaaaaggcaactgccctctccttgcggtgggtaatcaaggcacccatttagaggcttgctggtcaaaatgaaccaactccagtgttccatgcttggagctcaacactaagtcagactgctctggccctggagccaaagccagtgaccgacccctgcccattacccatgtgactaggtgcctgccccgctcactttcggtaccgggtctctttcctgctctgttcccccaagcctgaatctcagccttggggccctgccctcaagcctcccccaggtggggcctggccagcctc

SEQ ID NO: 59675 - DNA, 465 bp, Homo Sapiens
  misc_feature (218)..(218): n is a, c, g, or t
  misc_feature (371)..(371): n is a, c, g, or t
  misc_feature (418)..(418): n is a, c, g, or t
  misc_feature (465)..(465): n is a, c, g, or t
aaagtgaaatggaagcacccttaaggaaatcagtactgggtctcctacctgcccttcccaacctgatgaaatgcattccagaatcaccaagaggtagaccagcacttctttgagaggccacagggaaataaggtgatggagaacttgtctcctgggatgaggggagagcctttgaagccaaccccaaaggccaatgtgaaggtgaatgttgccctggnatcaagggttatcttctatttcttgacagcaggacggccttaccggctctcagagtgaggatataactaactagctggcttctgctaagctcattgctcctcaaactatctgtggctaatgacaggttttttctttttaaacatttaatccantatggcctgttatttccagatacaatgaaaataaactagaaatatgntcacacacttgaatgtgtggcaatatcaaatggttctacaagtttcn

SEQ ID NO: 59676 - DNA, 1160 bp, Homo Sapiens
gtcagagtgaagagtttaatcaacagaagtagagtaacatattctttagtagaactcacattatctgcttgaagcacattttgctaatgttttattcagaatgtatcatagatataatgttttaactaataaaatagaatggtttttctctatgaatgaatcacattctttctgccaacatagttttatcctgtctcagtaggatactccataacacaatagcagtacaccactaggctcttaaacgatcaagaacaatttttttcatggtgaaatcaaataacgcagttttggaaacctataaccgcattttgtgcttgaattacgtgccccacactgtggcttaggatacttattggggtataatgaaaatcttactgaaagttaatttcacattcttacaccccaaaatctgcattgccattgatgcatatgcaccacattattatatttccacatcagtttcttgtgtgccaaataagacccatgctatgcctcttggtttccatgaagtgaaaatacatagtaagaatgcgagaaatataaatcaggccaggcacggtggctcacacctgtaatcccagtactttgggaggccaaggcaagcagatcacctgaagtcaggagagaccagcctggccagcatagtgaaaccccatctctactaaaaatacaaacttagctgggcttagtggtgcatgcctgtagtctcagctacttgggaggctgaggcaggagaattgcttgaatccaagaggcagaggttccattaatggagatcattccattacactccagcctgggcaccaggaacgaaactcgttctcaaaaaacaaaacaaaacaaaaaaaacgttggctgggcatggtggctcacgcctgtaatcccaacaatttgggaggctgaggcaggtggattacttaaggtcaggagttcaagaccagactggccaacatggtgaaaccctgtctctactaaaaatgcaaaaacattagctgggtgtggtggtgcatgcctgtaaatcccagctacttgggaggctgaggcaggagaatggcttgaacccaggtggtggaggctgcagtgagctgagatcacgccatcgcactccagcctgggcaacaagagcaaaactccatctcaaaaaaaaaaaaaaaaaa

SEQ ID NO: 59677 - DNA, 504 bp, Homo Sapiens
tcttttttttcaagtttcctttattatattacttttgtgattttaaaaatcggacactttaattttgtattaagaaagtaatacatactcattgtagaaattcaaaacacaatttacagaagagttcaaagtgaaaaataagacttccccctggccttaagctcagtagattttaaaaagtaacttgttataaacttaccaaaaagttggaggaatagtacaaagaactcccatgttcacttcatccagattgttcaattggtaacacttcacatttctgcagcatgcatgcgtgcatgtgtgtaccaccattatcatatggctttttcttaaccatttgagaccaagttgcagacatgttccatcagtcctaaacactccagtgtacaattctcaaaaacaaagacactcttgtacataactaccacattgtcaaaaaaaggccaagcccaagagtgattgatttggcttctaaagtaatgacatgtccttttaagattcagt

SEQ ID NO: 59678 - DNA, 427 bp, Homo Sapiens
tttgagacagggtcttgttctgtcacccaggctggagtgcagtggtgattatagatcactgcaaccttgaactcctaggctcaagcgatcctcttgcctcagctttccaagtagttggaactctaggcacacatcaccatttctggctaattttttatttttcatggagacaaggtcttgctatgttgctcaggctggttttgaacttctggcctcaagtgatcctcccacctaggcctacaaaagtgctgggattacaagagtaaaccactgagcctggccctgaaatgctttttttttttttttaatgaaaatacaaggcatggagatgtggaaagacaccttgctttattactgttattattagttctatagtataattcatatatcacaaaaatcaccatttttaagcatatatttcagtgtc

SEQ ID NO: 59679 - DNA, 5671 bp, Homo Sapiens
ggaggcggaggggagcggagcccggagcgtcgtggaaagcattggacacatttccaccatgctaatggcattttaaatatatttggcaattttcccaattttttactgaagaaaactgtaagtttatacttgaggactgaagtgtgactctgccgattatcaggctttcaagatgaatctggaaaaactcagcaagcctgaactcctgacactatttagtattcttgaaggagagcttgaagcaagggaccttgttatagaagccttaaaggcccaacacagagatactttcattgaagaacgctatggaaaatataacatcagtgatcctttaatggctctacagagagattttgaaacactgaaggagaaaaatgatggcgaaaagcagccagtctgcacaaacccactctctattcttaaggttgtgatgaagcagtgcaagaacatgcaggagcgcatgctgtcccagctggctgctgctgagagcaggcaccgaaaggtgatcctagaccttgaggaagaaaggcagcggcatgcacaggatacggctgaaggagatgatgtcacctacatgctagagaaggaaagagagaggctgactcaacagttggaatttgaaaaatcccaagtgaaaaagtttgaaaaagaacagaagaagctctctagtcagctggaagaggagcgctcccgccacaagcagctctcatccatgctagtgcttgagtgcaagaaagccaccaacaaggcagccgaggaaggacagaaggcaggagagctgagcctgaaattggagaaggagaagagccgggtgagtaaactggaagaagagttggcagctgagagaaagagaggcttgcagactgaggcccaggtagagaagcagttatcagagtttgacatcgaaagggaacaactgagagcaaaactgaaccgagaagagaaccggaccaaaaccctgaaagaagaaatggaaagtttaaagaagatagtgaaggacctagaggcttcccaccagcacagtagccctaatgagcaattgaagaaaccagtaaccgtgtccaaaggcacagcaactgagcctctcatgctaatgtctgtgttttgccaaacagagagttttccagcagaaagaacccatgggagcaacatagccaagatgacaaacactgggctgcctggtcctgccactcctgcttactcatatgcaaaaaccaatggccattgtgacccagagatacaaactaccagggagctgactgcaggcaacaatgtagaaaaccaagtgcctccacgggaaaaatctgtggcattggcccaagagaaaccagtggagaatggtgggtgtcctgtggggattgagactccagtcccaatgcccagtcccctctcttccagtgggagctcactgtctcccagcagcactgcctcctcctctctaacatcctctccttgctcttcgccggtactcactaagcgtttattggggtcatcagctagcagccctggctaccagtcatcgtaccaagtagggatcaaccaacggttccatgcagctcgccacaaatttcagtcccaagcagatcaggaccaacaagccagtggcctacagagccctccatccagggatttatcccccaccctcatagacaactctgccgccaagcagctggcccgaaacacagtcactcaggtgctctccagattcactagccaacaagggccaatcaagccagtctctcccaacagctctccctttggcacagactatcgaaatctagccaacactgccaatccaagaggtgacacaagccattcacctactccagggaaagtgtccagtcccctgagccccctgtctccaggaatcaagtccccaaccatccccagagctgagagaggaaaccctccacccatcccacccaagaaacctggcctcaccccttctccatctgctaccactccattgaccaaaactcattcccaggcagcctctttgaccactgcagaagaccttgccagcagctgctcttccaatactgttgtagcaaatggtaaggatgttgagttacttttgcctaccagcagctagtccctaggagggagtctccacgtttgacattccatcagatttcgtccaaaagctcagtcagacttctgagtcagattatgttatttattttgatagtagctgaaaccatctgtataatacatttagtatatttcaccatgttggccaggctggtcttgaactcctgacctcaagtggtctgcctacctcggcctcccaaagtgctggaattacaggcgtgagcatcacgtctggcctaatttttttaatcgaatttatttttgtaatgatagatgcttgtcttattcctagggaaatatttgaagtaattgagatgctgtcacctaaaataatcaaaaggctcctgattcagttaaaagaattcatttaagtacagagtgtaagcgagctacaccaaagaatggtgattagcgctcccagggtggggaaaaatgaggattgtttatataggcaaaatggaggtgccaaacagaattataacattttcggaactaaggctcatttaaagatacaaatttgattggctactattgattacacttgaagggatttgtttaacttccttttgtaaagaagtaacagtcataaggatctctcatctcccagtcatttagtctagttttgaataaagaatagggggtctggttaatatatacatctaaacacaaaagtcagaaagaataaaagtagtgatgttacacgagccagctgtcagtgcttaacttttccctttggcctaatgcatttggaaggtcctgaaattgtattttctttttacattgcctatgtatgtgtaagtcttcttcaggtcagttcacgctgttaaatatacgtgcgtatacatacatactatgtatgtgcgtttatgtgtgtctgtgttttttttttaacagacgaagcttcacaaaagatgtctaaggtaagatcatacttcatgtatctacagcataaggagaaattgctttatgttttcagactgttgacagtcgggacttatatgattcattatttttaatacaactgatacatttgattcattaacacaaagagttctaatttagttgtctttttttttttttttgagacgggagtcttgttctgtcaccaggctggagtgcagtggcatgatctcagctcactgcaacttctgcctcccacgttcaagcgattcccctggctcagcctccggagtagctgggactgcagacacgtgccaccacgctggctaattttttggattttagtaaattcggggtttcaccgtgttggccaggatggccttgatctgttgacctcgtgatccacccgctttggccccccgaagtgttgggattacaggtgtgagccaccgtgcctggcctaattgtcatcttaaaagcttggagctttctcttttttcaggcttctactttcttttctctacacacatcagtaacagtccttttggcccccttagttcattcccagcagaccagataatttagaattctgataatttattatgatgaaattgatggggctcttagacttgataaattggtttaaatcagcctttgcaagttagttcagagataaattagtgctaaagaacatattctgagaaaagcagaacttgtggttaacattgcaagattattatttctgtttttttttttatctttgaatcctgtgggtgttcattactgtccaatgcaaaatcatcataccagtttttgcattttataccagtgttagcatggaacacagataagcaaaaaaaaaaagtcattatttcaccactcaggaataaccactgttaatatgttacatatattctttttcacctgtgtgtgcatttgactatacatttacaaaatgtaatcctaaaggaaatactattttgtatcttgcctttttcaattaataaattgatttttaaaatttcttctcattttcagtatgccactgtctagattctggttacttctgctattcttgccttctcatatctctgtcctctctctcatcagatacccttctgtcaaggaatattgatgcttcagtgtagtcatctatgatcttctcattctgtcttttctttcttggtctttgacactagatactcaacatcccacccctaatttgcctgcctcacccttgatgaaactctgttctatagagctagaagcacagcaagagagatgcttttttcctcgatacttttcagaaatgcattgcacctaatacctgggagaagctattctttagccaagtttgttgaatgaaaccattcattcaaagtactgtcagctgtagcagtactttgtaagcttgactgattttcctggaactccatagtctctcaagtcgaaatttgaaattgcattaagatgtattaagcatgtatcttctatgtattgttaaattcctaaacagaatactgattaacaaaatgttaattttcagtcgcatacaactaaggagttatactagataagtttttctttttttaatgctcctagttgaatactactggttttctgatagaagtatgactttctggaagtgtttatactttttaaaaaatttgtgaaaactgataacctatgtttgtttcatgtctaactgattatatcttaaaagcaactactaaggtgtttattagtttgtttgttttttaatcttatttagcaacagccaactcagtttataaatccagaaacacctggctatgttggatttgcaaacctccccaatcaagttcaccgaaaatcagtgaaaaaaggttttgagttcacactgatggtggtcggtaagaaattaatctatagtctccaacttactaaataaatatctcccctttccaatctctggagtatgataacgtgacctataaagaaagaggaaaatttggcagagtcaaataacttgagaatttgaacaaatatatgtgtattcattagaaaatttttctcaggagcaaaattatttttctgtcactttcttatttatatgtagtgaaagtttactcattgtgtcagctaggctccaaaatggcccccagtgattcttatctcctggtattcacaactttcttgtcccttcctgcattgaatagggttttacctgtgtagccagtaggacattgtggagatgaaagtgttgtcattttctaagactaggtcataaaaggcattatggccccccaccttgactcttctcaaattactcactctggaggaagccagctgtcatgtcaagagaacactcaagcagccttacagggaagcccaccaagtaaggaaccaaggcctgccaatggctgtgtaagtgacccgtttcagaaatatcctccaggccgggcatggcggctcacacctgtaatcttagcactttgggaggccgaggcaggcaggagttgaagatcaggctgggcaacatggtgaaaccctgtctctacagaaaatatgaaaactagccaggcatggtggcatgtacctgtagttcctctcacctgagtccaggaggttggggctgcagtaggctgggatcatgccactgcactcaagcctcaagcctgggtgaatgaaaccttgtctc

SEQ ID NO: 59680 - DNA, 562 bp, Homo Sapiens
  misc_feature (305)..(305): n is a, c, g, or t
aatccataggatagatatcctgctaaaaaaaaaaaaaaagtcccctaagatatttatctcataacatcacgtctttgctcaaaaatgtcagtgcctgcttccatttgaaaatgcctaatttagaatagctagcatgatgtgcacatagttaacattcagtgtcaaaatatgagcgcccttactaacctgaacctgtcttctcagtctcccctacgctccctacaaaatctgtgtttcagcccttattctctaaacattctccctcctctttcattcttgtgctttcatcacaatgcttgatacangataagcatgcaataaatatttactcagagaatgaataagtgcccaatgttggctattaaattttaccaatccttcaagaagtgaagattttgtatatttctataaaagctttcttgatcctgctagtgaaggaatatgattcttcctctccttcccttgcaacactacagcattttaattgtacctccttacgaggagttaaccaacagagcagactattactagtgtattattttcatcctgagaatagggtcag

SEQ ID NO: 59681 - DNA, 403 bp, Homo Sapiens
taatttttgggagacagggtcttgctatgttgcccaggctgctctcaaacccctgggctcaagtgatcctcctgcctcggcctcccaaagtgctgggactataggcatgagccaccatgcccagcctgttatacaattttaaacctggtcaagtggtaatgttctgatgaatttgtttctctgcaagaacaaggaagaaaacattactttgaccaggtattcaacatgatttgatccaaagctacttttagatgctacatttacctgataaaaagagggataacattatgcccaaatggatgcattgtaaagaaaatccagaacagttaacaactacagaaacaaaagagatatcttccgcttactttatttacttgttttacaaaggcagtgaacaccaaag

SEQ ID NO: 59682 - DNA, 511 bp, Homo Sapiens
tggaaagaagcgggtcttgcaaagtagctttgttacttgtaacagacgtatacatagaacctttgtacaacctagagtgactttttccaaagactgttacctatttcaaggtagaatcgttggaacttactgaacaacagtggaaaagacaactacacagcctcattgaggggagatgggtactgtatacttactggtaactggacacgggtaaaaggacaaggtctgtcatctctttagggacctgttttatatgccccaaccctgtccccatcttattgtttttttttgaatgtacttaaaaaaggaacaacaaaaaactagggttgtagaattataaaactgcttcaaccttaaaaccttaagtaggagggccctcaaagggacttacgttagtccttagggagtcaatgtgtgtgttgctgcttatttaaatacagttcagttggagccccgagagtgccaatgttttccccacacctcttggatgccttcctcttcccaaatccca

SEQ ID NO: 59683 - DNA, 2812 bp, Homo Sapiens
  misc_feature (70)..(70): n is a, c, g, or t
  misc_feature (77)..(77): n is a, c, g, or t
ggtgtgactgaagaaatatcaaatgtttccctagtaagacagcaactcaggactctaggatggaagaagntgtctgnccgtaaattacacctgcagtgcaaccagcagactaatggggatgaggttctggtacaagatgatgaacaccagtatgtcagacaatgacttgggagctggaatcaaggacatgaccaagagcagcaagaacaaaagggagactgacacattgatcactttctcaacctttgatctcttgagaggatggttcacatttgagtaaagacaggggagtttgttttcagaatgacatactagtctgcaggatgaatttcataactgacattgcaccttggactgcaactaggactttcactggaatcagagaaagagttttgaagaaaactgggcataggctcagcaaaaccaaacagaagaggaacagaaaaagaaacaaaaagcagaacagtcagaatagaatcatggaggaaaactcattagaattcttaagtgatcttacaccgggagatcaggacccatctcagagtgaagaggaagacattgaaaagaccagaagagaatcagaatatcccttcattgatggtctacaaaatgaagtcggagattttgtgactggatataaagaaaaaagatggaaaaataaagatcctaaagacagtttccaaaacgttatgtctatagttgaattagacaacacaccaaagaattacctctctaaggaaggtgataacttgtttgtaagtttgttactgaggccaaatgaaatctccgttacttgtccaatactgactcaaaacctttcctgtgtaacaactgatgactgctctggcatgaaggtagaaaagcatattagaaataggcataccatagcattagacacccaggacctttctgcggaaacttcatgcttatttatgaagaagagagaaatagtagataaaaatctctcacatgaacccattctgtgccatcaacatggaatcagaatgtcagataaagttttaagagaggaacaagtgtatacaactaaaatcaatcactgggcttttttcacaaccaatttatctgatgaagatttacagctgggctctgacagacagccctattttggtagctggcctgcaggacctcataagtttatatgtgaacagagaccaaagaaagatagagcatgtaagttggctggtcctgacagcagggggcaatggattcaaatgatcttcacttcggtggcagcatcagaaccaggaaacaatccagaaatattgacagacaaactactgataggaaatgaagatttttcacctccacctgaaactatggattcattcatagaaacaaacctcttcagaagctgcttacctcaaccggatataccaaagaatgccttagaatcaacaaaaaataagaaaaggaggaagaaaaggattttcaatttggtaccaaattttgacttattaggacagagtcgtatcggtgtaaaagaaagggagaaatgtgacctgttaacaaaaaaccatggactaaaaattactttgggagaagaaaaagatagaatttcagaaaggaacagtgaagaggagaataaacaaaaacttatgacctttgatcatcatccattgtggttttaccttgatattatcaaagctacccctttaaatattgatggacagcgttattctcattgcctgtcatttaacagactaaggtgctctgcatctttatacaaaaattatattccttcttttgtgctacataatttatctagtatttggaagccatcttttacaaacaagaaactgtttttgactttcgaatctcagacaagagtaggtaataaactaaatgatgcagggtttatttctccagaaattttacatagtcatcctgatacttcgtgctctttgggagtcacttctgattttcactttttaaatgaaaggtttgatagaaagctgaaaagatgggaagaacctaaggaattaccagctgaggacagccaagacttaacaagcactgactaccgttcccttgagctaccattatcacaagggtttgcctttcaattagtaaagctttttggatctccaggcgttccaatggaatccttgttgcctgatgactatgtggttccccttgactggaagacactaaagatgatctacttgcaatggaagatgtcagtggagaaaagacagaagaagattggttgaaaaatgaaaattccttggaactttgagttctgctgtcttcatggtactgctgaagatcatgatcacggagaaaagtcagagtgctcagtgccaacccaagggattctttccagagacgtacccgttggaaaccaaaattagtttggataatctgttcaaccattcttgataagttatctgaataataaaaaaactccacagaggaggtaacaatttgagcatttcattgtctaatttgaagatgtatgccatactttgtttgatagaagaaagtaaggcacagaaaacttgagtaccttatttttaaaactkcattaggattaaaaggttagcccctatatccaagtattggtctgagatcccatttctagaattctgaaatccaaaaagctctgaaaatcaatagttatttttccaaatgtattcattgtggtaaaatacaccaatataaaatttaccatcttaaccacttttaagtgtgttataaatacattcatgctaccatcactagcatccatctctggaactcttttcatcttgcaaaactgcaattctatacccattaaacaatgacccatagc

SEQ ID NO: 59684 - DNA, 437 bp, Homo Sapiens
gtggagacagggtttccccttgttggccaggctggtcgtggaatgcctcggctcaggcaatccacctgcctcagcctcccaaggtgctgggatcacaggcgggacagttgtgccaggccccttagttttttgagcaaagaaacaaaatcttatggttctcaaatattttcataattctggtaaaatagttattatttaacactggcccctaacaatatttgggaacgctgggagtatcaactcatctgaattaaatacttacatatttaaatatttacacaataaaatttttaagatatacatacattgaaactacagtatgattccatggatgaattagaaacagtctttcaccttttattctgaaacaagacgagatactgcctgcaaagcacttagcatagttctcaaatctaagtggctgttttgtattttaa

SEQ ID NO: 59685 - DNA, 480 bp, Homo Sapiens
tcagctgtaacaactttatttcagaatgactgcaggaaggaatttcataggtaaacaactaatttatagctctatatcacaataacactgaatcagaaacacttcatcccacataaaaatttggcctgatcattttttgagttttaatcctcttaagtttcacattatagaactgaatacacaaaaacactaacacagctgggggagacaatggtttattgatcaagagaaattatttctagcaatatctcacttgccgcgagttcacaaatatgacaactgcagatgaggataaagaagtaagttaggggaagagagttgagccactgaaataatgtcaccaagtcaatgtagcaaagtacattcatttttattgctagaacagcctctcaaaacctcattcaaatcctctctactcttattcaacatatagtatgcagttacacaatttcccaaccccagggcaaattagagaaagct

SEQ ID NO: 59686 - DNA, 484 bp, Homo Sapiens
  misc_feature (410)..(410): n is a, c, g, or t
ttttttttttcatcgttaagtgatttttattaattacaaatgtcacacaatatttgggggaagcattaacaattagaaatcagataaacaaataattaagtacagcactaatagtagtgattgctatatggcaagggataaacatggacagtttgtaaacttctagaaagaagtactatatttctgcgggtaacttacactgtattctctgagctgtttattctgtacttttcacagaagtgttttgggcagggaatgtcatcttagggaagacacgggctgctgctacctgccaactcatgaggctgtacctaactggcctggtctgttttgcgaagttgttccaacactggttcaataaacccacagtagaattcaaataggtctgtatagggtatgtcttgtaaaanttctgagcaaatcactgcctgaacaagatgaatctcccttcctttccccaaccatctttggtaaagacaccaag

SEQ ID NO: 59687 - DNA, 383 bp, Homo Sapiens
tttttttttttttctcacttaaaaataaagttttattaatcaaaaggcacaaggaaacagtggacacatggaaagggagtcaaattttttatgttcaacattcattgcagggtaattagcaaaacttaaaagataaagtaggattctagcaaacaggactcttcatacagtcatctaatacagctaatatcaataatgctctattaaacagtatgtagagtttggattctagaacagaataagtaagcaaaaaataaaaactgttttagtgtctcattaaatgtcaggatcatttttctcaatataaatataaggcctgtcttttcagactgtcaaaaattacattctttaaaaaaaagtcttattctattcacctcatgcat

SEQ ID NO: 59688 - DNA, 562 bp, Homo Sapiens
gagaattgtttcgagttttattttttaaaaaattacacttgaggtaaggaaaaaaatacagtaaaattagattttagagattaaccaaaatccaaactatacaacttaattcatgactaattcaatcacagtttgtaacaaaaggaacagaacatttttaccttcaaattcagtgtaaacaataatttatcacatttaaaagaaggctgccaataagcagaactcagcaatttcttgacttaattgacaagcctaggaattctaaaaagtcattaaaaattttaaaacctgtaaaaattattttatctatttcaatccatattcatttcattcagaatattctttttgacaatcagtggaattcattacatactaaaaataacaccatatttatgcacaaataaattaatttttccagtaagagctaatcttcctttaagaagacttcccacatattcacaatacataatatcacagaacacccatatttggcctaaatgcctctgaattgtagcattacaagatggaagttcattgtgcctaataatttgattgagttttg

SEQ ID NO: 59689 - DNA, 419 bp, Homo Sapiens
tttatttatatatacattttgcatttaacgtgatgctggatggctcaacaagtagaatacattcattctggtcagctgagctattttttcaaaaaaaccaaatcgcaaatttctgttttttttaatggaacaaatgcaattcaacattccaaagtaaattaagtcctcaatttgtattggtgctattaggttcttttcttgactggactgaacttagtagattctctcaaatacaaaaaggatttttagattacttattaaagatatatctatgcataagtggtaaatcagcatgcatataccatacagcaatatagtattaacaacccataggcactgatctcagacatcccaagtgcctatgggttgttaatagtactattaacagtgtcatagtactagtactagtaatagcacca

SEQ ID NO: 59690 - DNA, 618 bp, Homo Sapiens
ttttttttttttaaagttttacttggaatatgtgtatttgctaaagttacaagggaaaatattgcaaattatacatcatttgaaaaattatctctctttagttaattttcagtcacaatattggatgtagcagctccaaatagaggttacctgattattgcttttataattgaattcttaaagagtttacatcataattatataattgtatttttaaacatcacagaaacccaacatgtacctatttgtaatcatcagagtatatacatctgattaggactcagctatgttcaaggcttcatcgagcccaacatacaattatcatttgcattttctgctacaatcaaagaaaacacattgtgtgctattagtggccattgcaagaaggaagatgctgttttcaataacaggaaatcaagaacaaacaaaataatcgtcttccatttaaaaaaaaaagaaagcctacagaaaagtgaaaaggacagggtcctaaaaacatctagtgatgccaataaaatggaatgttttttaaaaagtgatttgtctcactgaagctgcagaagggtatcccacacttatatattatgtgactgcactaaaaacagacgcttttggtgc

SEQ ID NO: 59691 - DNA, 653 bp, Homo Sapiens
tttttttttttttttttaagcactaataagtgtttattaatattaggaagtgattgataaactcttggaagtaaatgtgctcactgaaaaaatagtgaataagaaggtaaaggacaatgtctttggggaatctcacaattaagggtcaggaaatcaggaataactaatataagagacagaaggaccagcctaagaggtaggaaaaacagaaagtaacaccagaatcgttatactcaggcactggtcaaaatactgactactgaggtctgagaaacagtcactggagagagggatttcctactcccatcaagttcatgggtactccatacttgatgttttcttttcttatgtccagtaagatttgagctcactctaaaagcttttccacattcctcacattcataaggtttctccccagtatgaactcgcttatgtccaatcagagctgagccctgacggaaggacgtgccacactcactgcaggtcacttcctcagagccttctttctcttctctcagtttctcccttatagatgtttcccattgattctctaatttgacatcctgaacacaaacttctctaaccttaggatcccgggaatcaacttttaggagactgttaaatttcatccagtaggcttctccctcgtgccg

SEQ ID NO: 59692 - DNA, 4069 bp, Homo Sapiens
cgggagagaggccgctgaggatccggaagcaggaatgtctgctgtgggtgagcctctgttctcttttgaacaagagaggctaggccctctgagcagccgcactttctcagtggcagatcctggctctgcagagagaacagcccagaaaagaaagttccccagccctccacattcttccaatggccactcgccgcaggacacatcaacaagccccattaaaaagaaaaagaaacctggcttactgaacagtaacaataaggagcaggatggacggaatgatttctactgctgggtttgtcaccgggaaggccaagtcctttgctgtgagctctgtccccgggtttatcacgctaagtgtctgagactgacatcggaaccagagggggactggttttgtcctgaatgtgagaaaattacagtagcaggatgcatcgagacccagagtaaagccatgacaatgctcaccattgaacagtcatcctacctgctcaagtttgccattcagaaaatgaaacagccagggacagatgcattccagaagcccgttccattggaacagcaccctgactatgcggaatacatcttccatccaatggacctttgtacattggaaaagaatgcgaaaaagaaaatgtatggctgcacagaagccttcctggctgatgcaaagtggattttgcacaactgcatcatttataatgggggaaatcacaaattgacgcaaatagcgaaagtagtcatcaaaatctgtgaacatgagatgaatgaaatcgaagtatgtccagaatgttatctagctgcttgccaaaaacgagataactggttttgtgagccttgtagcaatccacatcctttggtctgggccaaactgaaggggtttccattctggcctgcaaaagctctaagggataaagacgggcaggtcgatgcccgattctttggacaacatgacagggcctgggttccaataaataattgctacctcatgtctaaagaaattcctttttctgtgaaaaagactaagagcatcttcaacagtgccatgcaagagatggaggtttacgtggagaacatccgcaggaagtttggggtttttaattactctccatttaggacaccctacacacccaacagccagtatcaaatgctgctcgatcccaccaacccagcgccggcactgccaagatagacaagcaggagaaggtcaagctcaactttgacatgacgtcatcccccaagatcctgatgagcaagcctgtgctgagtgggggcacaggccgccggatttccttgtcggatatgccgcgctcccccatgagcacaaactcttctgtgcacacgggctccgacgtggagcaggatgctgagaagaaggccacgtcgagccacttcagtgcgagcgaggagtccatggacttcctggataagagcacagcttcaccagcctccaccaagacgggacaagcagggagtttatccggcagcccaaagcccttctctcctcaactgtcagctcctatcacgacgaaaacggacaaaacctccaccaccggcagcatcctgaatcttaacctggatcgaagcaaagctgagatggatttgaaggagctgagcgagtcggtccagcaacagtccacccctgttcctctcatctctcccaagcgccagattcgtagcaggttccagctgaatcttgacaagaccatagagagttgcaaagcacaattaggcataaatgaaatctcggaagatgtctatacggccgtagagcacagcgattcggaggattctgagaagtcagatagtagcgatagtgagtatatcagtgatgatgagcagaagtctaagaacgagccagaagacacagaggacaaagaaggttgtcagatggacaaagagccatctgctgttaaaaaaaagcccaagcctacaaacccagtggagattaaagaggagctgaaaagcacgtcaccagccagcgagaaggcagaccctggagcagtcaaggacaaggccagccctgagcctgagaaggacttttccgaaaaggcaaaaccttcacctcaccccataaaggataaactgaagggaaaagatgagacggattccccaacagtccatttgggcctggactctgattcagagagcgaacttgtcatagatttaggagaagaccattctgggcgggagggtcgaaaaaataagaaggaacccaaagaaccatctcccaaacaggatgttgtaggtaaaactccaccatccacgacggtgggcagccattctcccccggaaacaccggtgctcacccgctcttccgcccaaacttccgcggctggcgccacagccaccaccagcacgtcctccacggtcaccgtcacggccccggcccccgccgccacaggaagcccagtgaaaaagcagaggccgcttttaccgaaggagactgccccggccgtgcagcgggtcgtgtggaactcatctagtaagtttcaaacgtcctcccaaaagtggcacatgcagaagatgcagcgtcagcagcagcagcagcagcagcaaaaccagcagcagcagcctcagtcttcccaggggacgagatatcagaccagacaggctgtgaaaggtaccgagcctccccttctgttctccgtggcgcccgctcccattttgccacatcgacaggagaaagtcattgctcttttattttttttttttagttctcgtttgtttccgggccattgtatcttgaaggccttgcacattccatttggcattatttttaaaaattgttttgctacttgcttttttactttcaaaaagttttttttgttcattttataaatgatacatgcatatattctccttaaaaagggggcagaaagttttacataaaagtctgttatcccgtttaccttccatttcattctcttcccttccacagtggccagtatcaaccgttgtaaaagcttttctatgcatgtatgcatgtatatgtatatatacatatctgtatgtatatatgtgcgcatcatgtatatgatgccataaaattagtcctttttcccccctttttttcttttttaaaacataaaaatggtaccatacttgcttttttcccccacccatcagcatgttttggaggtccatccacatcagcacatacagccctgccttgttcttttggactgctgcatagtatttcatagtttatttaaagcattcctctactaatgggcatttaggttgctttcagttttttttctactgtgagcagtgctgcaatgaatatctttgtataaatttccttgtgcacatgagggaacctcttggagttattttggaaaaagtacagtgcgagaagttgatagcgaaggttaccttagtaactggagattcgtcacacacacaagatgagccagcctcaagaaccacttgctgaagttgcagaatcagaactcccaccagtcctgcaggaggctccatctggagctgaaactaggccaaacacagtgctgatctgactggttggtaccagtttgcctggcttttgtgagcattgatgtagatctttctaccaggaaacctgcatctagatcctcaaaggctgggttcttcaactgaaactcatagtgaatgcgcccctgtgaggggggctcatgagcagcagaatgtgaggttgaaaggtggccaggtcttgaattggcccccagtgaaacccttcacagatggcgagggagtgggtcctgaagaattggccaggcgaaattgagagtacagttggattaatcttgctatttaaaaagttggtggggcaaagccgagtctaggatatttgagattgggattgcggcttcctgtcttctgtcttcatatctcataagcaggagacttccccaggggagtttaattgctaccaagaagagggtcgggcgtggtggctcacacctgtaatcccagcactttgggaggccaaggcaggcagatcacttgaggccaggagttcaagaccagcccagtcaacatggtgaaaccccatctctactaaaatggaaaaaaaaaaaaaaaaaaaaac

SEQ ID NO: 59693 - DNA, 460 bp, Homo Sapiens
  misc_feature (251)..(251): n is a, c, g, or t
  misc_feature (444)..(444): n is a, c, g, or t
cttctttaaccactcccttttcagtaatacagaatacatagggacccggggaatttgagaagttgcgatcagtaaggtcttccaagaacgatattcccagcttttttcctgcagctgcgagatcagtgactgtttcctgtctcttgacaacgactgtggaactgtagatataattaagtatttcagtaaacacttcagctttgagatcgtccagctccaggacgtggctggaaatacagattgtatggctncaaaagatatttttaaaatacaggcttgaagctgccagaacattgctatgggctttaaatttggtatcttccacaatgatagtgacatcgcataaaatgccccgaatgcgctgctcatttaagatggagagtaccgtgtcactgtgaaagtcgtccttgaggtccctggaaagggacatgactgtcatctcanttagaacagaccagct

SEQ ID NO: 59694 - DNA, 450 bp, Homo Sapiens
tttttttttttttttttaaacttttagtagagacagacagggttttgctgtgttggccaggctggcctcaagtgatctgcctgccttggccttgcaaagtgctgggattacaggcgtgagccaccatgcccagccctactctttatgtccaaaagccgaggccttcctgtaggccattcatgatggattgctgctcaccccacgtggccattaacacatggctgttggtttccaacctggccccttgtatgaaaaaccctaggtaaacacatcaaaataattatcccccggcatagcactttatttaaaagtccctcattttatgatgaggaaatggggcctccaggagggcaatgggcagagtgtgaccatcctacccactgcctctcaggagccccttgtatctgccacgagtggcctgcctcactgcaagctgtggcacagatacgt

SEQ ID NO: 59695 - DNA, 809 bp, Homo Sapiens
taaacattcacatactcctcctttgagaagcaatgtgtgaaaacactaccacccattaagtgtaggctaatgccatttcagtggctttctggataatggagtaacggaaacagatttgtactgagccagacactctctattccccttggtgcaaaccctaaaaaagacatgtatattctggccaggactggggcattctcttagggaagccaagcagactacacctgtaacaatacatacatgctccaaccacataggcaacctaactacagaaatgactggcagcaaaatactagcttcatgcccacttgtatctacttgatctttatggctcaaccccaggagtgacctctttagggaagccttctaattatcaccaacaccttctcatacacacagatacaccttcaaccatgctctctgatgaagttaagtgctctccaaaacacatactgcttaccagaattgctagttttgtttttctttctcctatgaaactgtaaactccttgaggccaaatacctgtattagtcatttctgtcaatctgccatctaacaccatgcctcatgcacagcagcattcaaaaaatactttgtgaaatacaatgatagaatgtgtgcataatttcaccatggtcacatgaaaatgcaaagcacacgacatgtcctaaatccacaacatttcaattacttggtggcaaagaattaaaaaggagtctagggtcaccggatggcatctatgacctgaaccagaaggccactcttcctagaaaagggtggcttgggaaacacgggcaggattaaacaag

SEQ ID NO: 59696 - DNA, 387 bp, Homo Sapiens
tttttttttttatttagagatggggttttgctctgttgcccaggctggagtgcagtggcatgatcatagctcacagcagcctctaactcatgggctcaagcaactcttacacttcagcctccaaagtagctggggcaggagaatcgcttgaacctgggaggcggaggttgcagtgagacgagatcacgccattgcactccagcctgggtaacaagagcagaactctatctcaaacaacaactaaaagaagttaataactctgcctaatagcacatttagatttttatttttttttccatgaatcatctccattcactcactcttaggtttatactttcccctaaaattcccccatgaaacttctaaaattagattcatgctatgtat

SEQ ID NO: 59697 - DNA, 573 bp, Homo Sapiens
  misc_feature (452)..(452): n is a, c, g, or t
  misc_feature (483)..(483): n is a, c, g, or t
  misc_feature (506)..(506): n is a, c, g, or t
  misc_feature (508)..(508): n is a, c, g, or t
  misc_feature (514)..(514): n is a, c, g, or t
  misc_feature (547)..(547): n is a, c, g, or t
  misc_feature (562)..(562): n is a, c, g, or t
atcaatacaaagtcatttttatttttaaattagcaataaaataatcaagtttacatcaatttatcaagttaattgtcacaatcccaggtgtggtgcagtgggctggggtaaaacattttgctgtatctttcatgatgttcctgatttctctcttttttttttttctttttgagacagggtctcactctgttgcccaggctggagtgcagtggtacgatctcagctcgctgcaacccctgcctcccgggctcaagcgattctcccacctcagcctcctgagtagctgggattacaggcatgtgccaccacgcctggctaatttttgtatttttagtagagatgggggtttcaccatgttggctaggctggtctcgaactcctgacctcaggtcatccacccgcctcagcctccctaagtgctgtgattacaagcgtgttcctggtctctttgnatctgcgatataactgggaactctgccttantcctgagcaaggctttctatcangnccccangccacttaattaccgggttggagaatttacctncaaaatatgcccaanggaacactttc

SEQ ID NO: 59698 - DNA, 607 bp, Homo Sapiens
  misc_feature (454)..(454): n is a, c, g, or t
  misc_feature (490)..(490): n is a, c, g, or t
  misc_feature (501)..(501): n is a, c, g, or t
  misc_feature (514)..(514): n is a, c, g, or t
  misc_feature (521)..(521): n is a, c, g, or t
  misc_feature (542)..(542): n is a, c, g, or t
  misc_feature (552)..(552): n is a, c, g, or t
  misc_feature (558)..(558): n is a, c, g, or t
  misc_feature (568)..(568): n is a, c, g, or t
  misc_feature (587)..(587): n is a, c, g, or t
gcatagccaatcttttcatttttattgctttaacacacattttaattttcagttgaacaaattcttaatgagctacagagtgacatgagttgaaattagaataaagtaaaataatactatataaccaaaacaaacccagtgttacatatcgtgaaataatgcaattaagagcacaactaaaaaaaatcattgattcagttaaacacaaaagacatgcagggtctcaaacaaggagtatttgggcttctatgtcaatgtcataggaaagagctttttctatttctggataaatatttcatttttattgatttggcaaaaatactttaaggataaatatgggaccagaaaggcctacagtatttttgccaaattttatctatagccaaagcacaaaactggctttgaactgggtcattaatataatggggcagttcattccatcatattccggtcnctgcagagccggggtgaaatggaaccagccaagatnggtccggaacnccctcaacggccnctaaccntaagttccccaggatattgcnggccataacntggccnattatggatngggacctttattccccccngaagtcctaggttaaccggc

SEQ ID NO: 59699 - DNA, 503 bp, Homo Sapiens
  misc_feature (362)..(362): n is a, c, g, or t
  misc_feature (402)..(402): n is a, c, g, or t
  misc_feature (423)..(423): n is a, c, g, or t
  misc_feature (442)..(442): n is a, c, g, or t
  misc_feature (452)..(452): n is a, c, g, or t
  misc_feature (463)..(463): n is a, c, g, or t
  misc_feature (485)..(485): n is a, c, g, or t
tttttttttatgagaattttgttggctttatttttgtttacttgttgagaagatgaacatgaaattaataagaaaatatagttatagcttctggcaagtatttagtaaggcaaagatttaacacatttcaggggatttctgccacttccttttagatcagcagtaatttcttatatttatcaactctcaatttttagttttcatagatacctggggtattataaggctgatttgtaattactgatttatacttggacttttgaaatcattatgtgtccttaaaaataaggttatacaagctaaccttcttaacagggatcacatgggctaattaggtgacctaaactgatgtttggggaccnctcagccccaggtgttcatttcaggcactgtcacttgggnttccccttatcttgccagggngggcctggaaaaaaacggnatttttcccnttttctacccngactctcagggatttctgaggnctggttaccctggggggc

SEQ ID NO: 59700 - DNA, 371 bp, Homo Sapiens
  misc_feature (316)..(316): n is a, c, g, or t
  misc_feature (349)..(349): n is a, c, g, or t
  misc_feature (363)..(363): n is a, c, g, or t
  misc_feature (370)..(370): n is a, c, g, or t
atataatatggaatactagcattaatgctgtttttttttttttagttcagaatttttttttaaaacatatggggtctcactatgttgcccaggctggcctcaaactcctgggctcaagtgatcctcctgccttagcctcccaaagtgctaggactacaggcgtgacacatgtgcccagcctgggaatgttttaacaagttaaatgttcaacacatttgaagtaaaaaataacatttcaggaacattaaaaactcataaacttataaaaatacaagtgttaaggcatacattgccattctaatataaattagggggnaaaaggtggaaaccttttaaaggggaacccttntaaaatgggggggnaattttna

SEQ ID NO: 59701 - DNA, 373 bp, Homo Sapiens
ttttttttttttaagagatattaaatgcttttattttcaatattaaaaatcagtatttttaatattaaaatggcgctaattttaacaaaacgacagaaaaaaaccccaaggtacaatctacagggaaactcatttgaccccccccaccccgccccccccccgccggacacacacacctgactaggccccagatgtgggtgcccagcagagctcccagtcacatccatgcccgcacacacacactcatgacaggctggggactggcccagaagcaggtaccaaaatagtttagttttagaaacaactgtccagcccaggcgctagaaaaatactctttgcagggctgggcatggtggctcacgcctgtaatccc

SEQ ID NO: 59702 - DNA, 1155 bp, Homo Sapiens
ggaagagccgtcaacttagcgagcgcaacaggctgccgctgaggagctggagctggtggggactgggccgcaatggacaagctgaagaaggtgctgagcgggcaggacacggaggaccggagcggcctgtccgaggttgttgaggcatcttcattaagctggagtaccaggataaaaggcttcattgcgtgttttgctataggaattctctgctcactgctgggtactgttctgctgtgggtgcccaggaagggactacacctcttcgcagtgttttatacctttggtaatatcgcatcaattgggagtaccatcttcctcatgggaccagtgaaacagctgaagcgaatgtttgagcctactcgtttgattgcaactatcatggtgctgttgtgttttgcacttaccctgtgttctgccttttggtggcataacaagggacttgcacttatcttctgcattttgcagtctttggcattgacgtggtacagcctttccttcataccatttgcaagggatgctgtgaagaagtgttttgccgtgtgtcttgcataattcatggccagttttatgaagctttggaaggcactatggacagaagctggtggacagttttgtaactatcttcgaaacctctgtcttacagacatgtgccttttatcttgcagcaatgtgttgcttgtgattcgaacatttgagggttacttttggaagcaacaatacattctcgaacctgaatgtcagtagcacaggatgagaagtgggttctgtatcttgtggagtggaatcttcctcatgtacctgtttcctctctggatgttgtcccactgaattcccatgaatacaaacctattcagcaacagcacataagccttgggtgcaagtgattcccaggtggcaaaaggcagccccatcagagatcacgggagcaacagtaagggacagagttttggggtccacttgtccctcagcatggaagccatcaccgtggtcctgcatagagtgagtctgcttctactctggcatctgagaacaagtgactctgctttagacaagcccctggagagcctggccatggagtgaggtagaaaagaagcactttttggtggtatatgctgtttctgaatttgaatctaagcattcttggtgttctga

SEQ ID NO: 59703 - DNA, 550 bp, Homo Sapiens
ttaaataaagtgtattgtgtatattaaggtacacaatatgacgttatgggatacatatagatagtaaaatagttactatgaaaaagcaaattaacatatccattatctcacataattacccattttgctgtttttgggacaagagcggctaaaatttactcattgagcaggaatcccaacatggtgcaattttattacctctagtcctcattttggataagcctacatgtgcaggtgaagagagacagggatacagagcatccacagggctcactctgtgccaggcccatatcaacccttcaacaggctgaggatctacagcacctcacggggtaggcgtacgagtgctattttgcagttgagaaagccacctttagagaaatgaagtaacctccaaaggatgcacggctaacaagtgaggagccaggagagtctaatgccaaggattgtcttcctcctacttcaccaccctgccctattcactcttcacccattccagtaatcaccactggagtttcagatactttatggtacttctacttactaatga

SEQ ID NO: 59704 - DNA, 550 bp, Homo Sapiens
ttttaatcttttttctttacctctacccactaaactcagaacgtaagcttccggagacacctgccagcctgtttactgccccatccacagtggaccgccaggcttctggtgggttctccccaaattcaggaataaatgactaaggttacaaaaagagaatatactttaaaaagaataataattaatctcttcctgacatttcaaaatcactacctattctagtactcactgattctattttgaagagactaacattttcttaccctcaggctccaacagcaaaacttctccaacctaacactttgtagtgactacaaatagtgagtatgaaaatcatacagtagcagagaaatgcttatgacataatgtgaaaacatcatttgtataggtgtgtgtatacggatacacaaaacacacatacgcagacatatatatttacatatatataatcataattacaactatgattaaaaatacagatggagagaaacaaaacataccaaaatgctaatggtaactctggtggtatctgaaatatcttattctgact

SEQ ID NO: 59705 - DNA, 1574 bp, Homo Sapiens
cgcccagtagagatgtgatattattcaagtaaataaaacctgaaacttggcacatttgcctatttaatgtgcatcagtcatctgaactaggttgatcctggaataatgaaaacacttcactagtattaactaatgttttctacatagtagttcccaatagattaaggaaaatttccaacctgagattctttgttttggaatttgaataatgtgtttgtaactattccttgattgtcccaaatccaggctttacgtctgcttttgtcaatgtaacatcctagtgccaggaaattggaaaatccaatgactttttgtgtgtaaagtactggaatttttttgttcgtttgtttttaagacggagtgtcaactctcgcccaggctggggtgcagtggcctgatctcggctcactgcaaccttctcctcccaggctgaagtgattctcctgcctcagcctcgcaagtagctgggactgcaggcatgtgccaccactcctggctaattatttgtatttttagtagagagagggtttcaccgtgttagccatgatggtctcattctcctgaccttgtgatccgcccacctcggcctcccaaagtgctgggattacaggcgtgagccactgtgcccaccctggtatgttttttttaaattggccacttaagagttgtccttcagaaagtggagcagcagtgtgattagtaaaaacgatgggctttcctgcagctctggcttatggtctttgtttttccagttaacagctgttacttcatgctgttatagggggtggggggagaaagagaaagaatatgtctagtggcttaattttggggctcaatttgtttattatgtttttcctgcaaaagagtcaccagtcttgtcatggctcaatgcatattttaaaatgagtcaaagccaatttggaagctgctatcttaggttatttgtagtcaggcttcaaatggagagtgaaactttgactttgaaaactggtgctctatgctcaatgatggtcttacacattcctctagggaaaggtcaagaaataaatttggcttgattgtattctctcatttaccatataggaaatactatggtagaactgaaaatatgtacaatagtaaagtggtggctgagactgggcacttggaaaatagacttggattcttttctaagtgtgaaactaattaaatacttttatgtgactggtagtagtcacagtctccttgattgattctagttccttttcaaagtggagagacctgaatatagattgtaacaggatgtccaaccttgccagacaagcaggcatatatgtctctgggatgcagaagcagttacaagttaatatatttaagcataatgttagccaatcctaggtgataccagagatgtgaatatttgatcatatttgagttcattccttgaaagtccaaacctaactggtcttaattgattacttcttagtattccgaattttagaatttaaaaccctatgaattttcagtttgtgcttacattttctaacattggatgtttgctttggcaaaaaaaaaaaaaaaaaaaaaaaaaaaaa

SEQ ID NO: 59706 - DNA, 1026 bp, Homo Sapiens
gggggcagtttttacattgtgatgtgtgggtggatggtcatatttagttaggttattaagaaatcatgaagtgttccctaacaagaaacttgcaaagctatttggcaggaagaaaatcattaacttctagtttatttattttttttctcatgctatacgcttaattaccaagtaaattcacttgcataccattaccttaattcaaaggagaagccagaatgtttatcattggtgggagtaaaatatacacagattctttaccatggtgaaatagaataatactgaattcccaatacagaaatactaatttcataagctaatattcctatcttttagctgacttctttctctcttcaggatatatttactatttattatttacctttgaatttttgatttgggggatttttacctattgccatcctactatcttaagtatcctgtacaatgaaatatcttagcaaggaaacacttttaaaacttcacaaatatccaatttcattcttaacatatgggggaagcagtaaaagaaaaagcacttcaccacgtagaagagaaagtgatcattttaattaagataatttcaattcattatcaacatttaatcctctgcaaacaagggaacacttactagcagtacttgaagacttgtgagttggaattgcatgttacttgaaagatctaattaagctaaattttggtgcacagcaggttgtacatgatttcatgtttatgtagcaaaatgcattgaaatgtattagtgttgaaacatacatgtaaaggtagttgtggaaattgttatattttccttgtgtgtcatttatttgagcataaaggttttttttattcagcctaactgaataaggctaaatgaatactgtaattgaaaatatattttaaatctttgtcatgagtttttttaaaaaaaactattgcaaattgtatcattcctgattacacagaactttgtgggtggttttaaataaattttatacttctattttgcaaaaaaaaaaaaaaaaaaac

SEQ ID NO: 59707 - DNA, 124048 bp, Homo Sapiens
aagcttgtcactcatccatggtgtggttcaaactttcccttgtctgtgatgttcctgcaactagttctagatttttagactgcaataatctcattataaggtacagagctcattcaagaaggataaggggcatattgatttcctaaggatgattaacaaaacagcacaaacgaggtggcttgaaacaagagaaatttattctctcacaattcttgagggaagaagtccaaaatcaaggggttcacagagctgtaccccgagcttctggggaagatcccatcctttcctttcctggcttctggtaaccataggcattcctgggcttgtagcagcttcacttcaatctctaccttgtgctcgcttcggcagcacgtacattaaaatggaacttcaatcgctatccccattgtcacaagggggtcttccctgtgggtctgtgtccaaatttcctacttcttctaaggacaatctcgtattagattaagggcccaccctactccagtatcacatcttcgtaattacatctgcaatgaccctgtttccaacagaggtcacattctggggtactgagatgttagggctttcaacatatctctttggagaacacagttcaacctattaaataaagcatcccacaaaaccaaagtcagaaagcacagcagggttttgggatagaaagatagcaggagtcaacacagcctgtctctgtctttctgggagctcccggtctgtccttcctaagtctgtattgtgttctcaatctcttctttctttctctctctctctctctctcactctctctcccccatcttctcgctccccatctccctctctccctctctgtctctccgcccccccatgtattagtctgttttcacaatgctaataaagacatacccaagactgagtaatttataaagaaaaagagcggtcacggactcccagttccacatggctttggagatctcacaattatggcagaagacgaatgaggagcaaagtcacgtcttacatggtggcaggcaagagagtgtgtgcaggggaactcccctttttaaagccatcagatctcatgagacctattcactatcacgagaacagcatgggaaaaacccgccccatgattcaattacctcccaccatgtccctccgatgacatgtggaaattatgggagctacagtttgagatttaggtggggacacagccaaaccatatcaccctgcatatcagttttttctattgcaattgtccacaggccaaacatgactatattgtcaccaactttctatccccctctagtttcaagcaccttccagagataagctcagagattttcaactccaaatttctgggagagagtccacatggcctggctgtaatcccatatccaaccccttggtacacagccatggccagagccaaaagaatcctatggggttctggatctcctagggctctgggaagggcaagtttccgaaggaggaatgggggtggacaaaaattattggctgagaaaatagctggtgaacgagacattatttctggtagggaatgaatgcaagaggccactatgttctggagcacagagaaaactcccactggattctcaggaccgtctgagaggagaggaatttgaaagcagctgaattatcacaggagaaacagaatggagtcagaaaaattctgctttgtggcacttagatcaattctacgtctcatatctttgggagcatgggtggtttcccccaccctccattttcctcttctctctgaacaaaagttttagtttgtgaagtcaaatctcatctttttttttttttttttttttttttttgagacagtctcactctgtcacccaggctggagtacaagtggtatgatctcggctcactgcaacttccgtctccaaggttcaagtgattctcctgcctcaacctccagagtactgggattacaggtgtgcaccaccacatcttgctaatttttatatttttagtaaagacagggtttcaccatgttggccaggctggtcttgaactcctggcctcaggtgatccacccaccttggcctcccaaagtgctgggattacaggaatgagccaccacaccctgcccaaaccttgtcatttctgaaatagagtgtcagggtagtgtcttagttagcttgagctgctataacaaattataatagactgtgaagcttaaacaacagcaatttatttctcacagttctgggggctgggaagtctgagatcagggtgctggcatggtcagggtctggtgaggactctctcctggcttgcagatggctgccttctcactgtgtcctcatgtggtggagagacgggtatcatctctctcatatctcttcttacaagggcactaatcctattcatgagggctccaccctcatgatctcattactttccaaaggcctcacctcctgataccatcacattgggggttagacttcagcctatgaatctgagggcaacacaaccaatgtctgttagttcacggcagacagtgaaatagtggaaaggagggtgtgattgattctgggaagggctggtgttgaactctgactgcaggataaagccctcattggttctctgggccccggtaactgcccatctccccaagagggttcccacatccatttcctcccactctgggagtgagcccagcccagcatttcatcaacaactgatctcaggagccaaaagacacagggagaatatggtgatcagggagctgaggaagagggtgaaaaaaggcaaggggtgccaagcaactcaaccagcacttcccctccatcttctgctggatttgctcctttgtctccccagcaggtaggagggattgtccaagacaaagcattggttaccatctttctgtgccaaggctctgggagacaagactggattgcggtcctccttccttattgtacttattgtctaaccttaaggtacttccttatggtaccattttcacacgctgataaagacatacccccacaccccagactgagtaatttataaggaaaaataggtttaatggattcacagttccacatggctggggaagccttacagtcatagcggaagacaaaaggcacatcttacatggcagcaggcaagagagaatgagagccaagcagaaggggaaaccccttataaaaccatcagctcttatcagacttatttactaccatgagaacagtatgggggaactgcccccatgattcaattatctcccactgggtccctcccatgacacatgggaattatgggagctagaattcaagatgagatttgggtggggacacagcaaaaccatatcacttattctgtaggaagaaatgacttccaaggcattctccacccctgtctacatctgacagatagaattatatttaactatatattagtatattactatgacaataataactcatttattcctcacaccaaccctgtgctatccccgtttaaagatgagaaaacagaggcacagaaggtttgagtattatgcccaagatcattcagctgataaatgccatatccatctaactccaaatcccttgtggttgtacagtcagctgagctggcttttggataaaattggttggaggtgaatagagagaatgggttgggggaaagtggtggatgcccccagcaggtgtctcagaaataatgtgttgtcattttcactgtgaatatctcaggctcaagaataaaatcacttttctatataatgatttgcaatagtcatgattctttatgatgaaaatataacccaaatcaaacttgcctaagcaaaaaaatatatatataacataaaattcaccttcaagggatggggctggagttacccccggaagcaagaagaaaaattatgcagagcgcctggtatatccatcagagaccaccaatgtgttcctgtcaccccaacaggaagcagagaacccaaggctgtgttggcaagtagaagaccctagggacccagagggcccagagagcccagggattcccagtgcaaaccctcagatgccttggtgccttaaggaaaaacacaccagcctcatgctgcctaacttcagcaagaaaaaaaaggaccattcccttaatacaagcctcaattgccctgatgccttatggctgttattttagagaattataatgccacctatgattaataccgcaatgtggtcacacagcaaacgctcataagtaacctcccagcataaataccaagaaaatccagacttaccacggcttcatatacattttagatttttgctaaattggcccttgataaagcgtgtggccaccttcatcacagaaatcagcttcctccccaggcctaaaattagaagccccaactgccagtcgttaggtacagagctcaatgcctgctgagattcccctctcatttatcttctgcggggagcatttcaagttatcgccagctctcgtatcagctggcccggggaagggcagcaggcagcgagaggggcagctaacataggaagaggtcagcaggtgaggggtggctctggaggcggtggaactggctggtccctggaaagcttcccgctgcaggtctagagtggagaactcggactccaacagggaagattgtggctgggaagaattacagaccagatccagggctggattctgaatttagatggggcccgtaacaatttgcctaaatgatttatttcaacaatcaacacatccatatgctcagccactcagaatgatgactgaaataaaaatgaaaggtaacaggctgggcatggtggctcacacctgtaatcccagcactttaggaggccgaggtgggaggattgcttgagcccaggaattcaagaccagccctggcaatatagtgagactgcatctctacaaaaaaaaaaaaaaaaaaaaaaaaagaagagcaatagaaagagagaattggatgcatgctataacagcctatgatggtagatccagctggtctggggaaaaaggagagtatccaactaggcttccccaaggtcatgaatttttttttttttgagacagtctcactctgtcacccaggatgaggtgcaatggtgcaattacagttcactgcagcctcgaccttccaggctcacatgattctcccacgtcaacatcctaagtagctgggactacaggcatgcagcaccacatgcagctaattttttgtttttttttttcttttggtagagatggggtctcacttcattgcccaggctggtctctaactcctgggctcaagcgaacctcccacctcggcctcccaaagtgctgggattacaggtgtcagccatcatgcctggccagatgatgacatttaagctaagactaggacaatgaggagttatccaggtgtcaagtgagaggaatgcatttatacagagatagtaacatgtgcaaaggccctggggtgagaaggagttccatgtgttgaaggaattggaatgttgggaggaatgaaaagggtgtggcaaaatatgtgggctggggagggaggcaggggctagctcaggcaggatgagataaactctggtaagggttgtatgtgctcacagaaactcattaacacttcactgaatgctaatatttatttatcaggtttcagagtctgtttgttcgtgaggggagggttttccatcttctccacttgaatataaactccttgaaggcaatgacctttggttcacagttctatcaccagcacctagaacaagaactagaacaaaggtaaataaagacacccttatcaggcacaatgttgcaaagacttagtggttatcttccaggagccagtgaagggccagacctttcttaggaatgtgcaggatttgaactccccagacctgctgagtcaactctactgcaggggaccatacagagatgagaaagatgcgacattctttcacttctgggtagcagagtcaacaaatggaaccagggtgcccccaacgcccattacctatgacatcttcctctgaaataagctcaacagaagatggtccctggctacagtgacttttgtcagggatctccaagaccgccctcaggcccattgatttgccagaaggacccacagaatcaggaaagccattgtcctcatgaacattgtttattgcactaaaaggatacagattaaaatcaaccaaggtacaagatgcataggtctctccaagagagaccaggggtaagtttccagtagttttctcccagtggagttagaaggatagctcctaatgctctgtattagtctgttttcatgctgctgataaagacacacccgagactgggtaatttatgaaaaaaaaaaagaggtttaatggactcgcagttccacgtgactagggaggcctcacaatcatggcagaagagcaagggagagcaaagggatgtcttacatggcggctggcaaagagagaatgagagccaagtgaaaggggttctccttataaaaccatcagatcttgtgagacttattcactgccatgaaaacagtatgggggaaaccactcctgtgattcaattacttcccactgggtccctctcacaacacgtaggaattgtgggggctacaattcaagatgagatttgggtggggacacagccaagctataagagacaattagcaatgtatacaaagtactgccagccacagcagctcccccaagccttggtgtccaggggttttatcagcatttcatcacccaggcatggagcacctgcatgggtgacttttgttactcagtctccagcccctctagaggtcaaactgacacatacaaaaacaggcactcaccataaattgcattgttagcatggactagctagctcagcctgaggccataggtaaacaaagacactcttatcaggcagaatgttccaaagacttggcggttatctcccaggagccagtcaagggccagagctttctttggaatgtgcaggatttgaactccccagaccggctgagtcaactccttactgcatggggaccatatagagatgagaaagatgccatattctttcacttctgggtagcagagtcaacaaatggacgaggctgaacgaagacagtcaggtagaaccagaaaccacctccacctgcacccctgcataggacctaaaaaaatgtcataggaccatgacaacttttttgagacagggtctcagtctgccacccaggatgaagagcagtggtgcaatcatagctcactgcagcctcaacctcctgggctaatgctatcctcccatctcagcctcccaagtagctgggggcatgcaccacatctggctaattttttgactttttttttttttttttttggagagatggggtctcacttcgttgcccaggccggtctctaactcctgggctcatcaggagttagatgatcacccagatgaacaacagggacctcatccctccccaggggtcctggggtaggaccctcagcagatgagaggagtagctctcctggcccatacccataccctgttgtggtgtttataagcctgtcataggtcaggtttctagagagacaagctgtgggatggagatctgggtgcagggggtttactgggaggagcacctgctggaaagcaaggaagcagcattgggcagagaggggagtggcactgtggaacagtccccaggacccctgagacaccccctgtgatggttaatactgagtgtcaacttaattggattgaaggatacaaagtattgtttctggatgtgtctgtgagggtgttgccaaaaaagattaatatttgagtcagtggactaggaaaagcagacccaccctcaatctgggtgggcaccatctaatcagctgccagcataggtagaatataagcaggcagagcagcatagaagggcttgactggctgagtcttccagccttcatctttctctcgtgctggatgcttcctgccctcgaacgtcggactctgagttcttcagctttgggactcttggacttttgaccacagactgaaggctgcactgttagcgtccctacttttgaggctttgggatttggactggcttccttgctcctcagcttggagatggcctactgtgtgacctcacctggtgatcgtgtgagtcaatactccttaataaactccgctttttatatacatctatcctattagttctgtccctctagagaacgctgactaatacactcccatacggaggggcaagggacagagcctttgtaaccctccaggattatgggatgcctaggaggggaggaggatttcccagcactaggtggcttcctgcaggtgccttcttgccagaggcaggactttgctatgagctgttagcagctaggtctcccagcagctggggggacagagggcctcggtggtcctgcacagaggtctgagtggtatagcacccacagcgaagccagtgaccaaagtggaaagataaagatatgaaaatctttcaactaattaagatttaaaactcagattgatgtgaggatcctgaattgactgtttaccaaagagactaggttttaaatgagaagggtctgggtttacattgacttggcaagactgagtgtcctatcactggagtgacaagggaggctggtggggatggatccagggaaaagaagcaaagtatggaacaaagaagtttagaataaagaaagtggccaaggctgggcgccacggttcacacctgtaatcccagggtggccaaggcaggaagattgcttgagcccagaagttcaaggctgcagtgagctatgatcatgccactgcactccagcctgggtaacaaagcaagaaaaaaaaaaagcaagaaaggaagggagggatggaggaaggaaggaagggagagagggaaagagagagagaaagaggaaagaaagaaaaagaaagaagaaggaaaaaagaaagaagaacgaaagaaagaaaggaaggaaggaaggaaggaaggaaggaagaaaagaaagaaagaaagaaagaaagaaagaaagaaaaaaagacagagagagacagaaagaaagaaagaaagaaagaaagaaagaaagaaagaaagaaagaaagaaagaaagaaagaggcatcaaacctcacaggttgaggtaactgtaaatacacggtagtttatccctgagcacaaaatctcaatggcacagtcaaagccccaaagaagtaagaaacaaacatcatttccaccttttgggcctgaagaagcaggtacattagagaagggcagccacaatatctgtgaacagtcattaagctctcagacacagcatcccaccttcaccaatctgatctccttgaggggggtgatgctccctccaagataacaaagaaaacctggccaggcacagtggcccacgtctgtaatcccagcattttggaaggctgaggcaggaggattgctagagcccaggagttcaagaccagcctgggcaacatagtgagacccctgtctcttaataaaataagaaaaaagaaaaggaaaccttccctttacatgaaggcatcataccttaaatgcacatcccatctgcccaggaggctcacctctagatttgtatcctactgatgaacacacaccaagatggacatactagcataaattgtggagaatgacagaaaatatcctgaatgtccaccatgagggaactgattaatttatacacatccgtatactggaatactacacagctgataaaaagaataaggaatgtctatatggactgctatgcaaaaacctcaaagatatattgttgaatgaagtcaagatgcagtgtaatatgtacaatgggctatcatttataaaaccgggaggagacatatatacatatgtttttctatataaagattgtatctctggaaagtttcaagagaagccagcaacacttttgaccttggagaagaagaactggtggttgggatggaaaacaaacttaattttcactgtatactttttctggtactgtttaatttttttttttttaccatatgcacacgtttcctattcaaaagagaatttttttgaataggaaacaatgaaaaatcttataggcatacaaactaaattaattagccatccctatagcttcaacatgcatttcaatttgcaagcaccctggcctccaagattgattgattggctgtaaattgagaacctcagcaatttcctttcacagggacagatgttgacattattcctgtgatttttcacagatgtttcccttccagcatctttaaaatcgagttttctgtcaatttggaaatcccaaatttctcatatcaaatcgagatgacaggaaaatcaaaaccgttatcacattttgaaagagtttatggatggcaaatgacactgggaagggagatgtttaaggagcagccgacgtctcttaaccctttctcatcacttcctgcctcagtttacctaagccagaaaaaggggaaatttgattcaatatacagacaagggctttagagtctgcgtagctgtgcgatctcactttggctccaactgtctagctgtgatactttgaaccagttcattaacttgcccagcctcctctctctcatctgtaaaatggggataatatccccagccttgcagtgtgattttacaattcactgatgcaaaaatggaaaatgcgtggcacttagcaccacctaaatgttttttcctttttttttccctttccctcctccttcaccaatcctccaagcagcttttcttccttcttcatgtccccattttgctcacgagattccaagatttacccactgaagctctcatgagattcccagatttacccattgttgagaaatcagaaacatcccccaccccctagaattctcctgacctgtgtcccctccccttaggactctgctctccctcagtgacaacaggcaggaatatgatctactcatacaaaccaaacctctgctgtttgtacatcttagctaataatgcccaacacgcagccaacatttactaagtcaggctcttgagagccacttcatctgcatgacgccacaaaatcctctcagcaacaaaaaggcactgttattatttctgttttagagatgtggaaatgagcaccagaggtagatgtaacttgacaaatatctgggtggtagatctggaaatcaaagaaccctgaaccccaaccacagacacatcttcagttcaggctgggtctctacgctttgttatttttaacggggcattacgctccctggatggctatgatgctgcagttaactctgctcttgtggatgaatgcaattatctggggagctcgcacttataagatgtacagctatgggcaacctaaggcacatcgtggagtcttaatttcctcatctgtcaaatgagaatagcaaggatggcagggagggattaaggagcatttttggaaaaggaagtgctatgaaatgaacgtttgtgcctccacccccaaactgatatgtcgaagctgacaccctaattaccagtgttacggtatttgggtatttgaagatgcggctttggtgattatgtttagatgagatcataagcctaaggtcctggagatgtgatgtgtccatattagaagagacaccagagatacctttctctctctctcactcttgcttgatctctccctctctctcttgcactctctctcatgcttgcgtgctctctctctcccctgtgaggatacaacaagaaggcttccaactgaaagccacaaagagggccctcactggagaaacaaatcacccagcaccttgatcttcgaattcccagcccccagaatagtgaacaataaatgtctcctgtttaagccacgtagtatgtggtattttgtatggcagcctgagcagactgccacagtagatggttggtctttcctccaaccaataatagatggcttgtcctttccatcgcccaccttgggcaaggcaaacaggacagtgaaggcaagcacatctcacagacaccagcattcatgtgctaatgaggctcactactagtattgcaaagatgggaagtcaaacagaattatgtccttgcgaacatacaataacttggaaaattttattgaaagacattaagtttgcatacacacaaaaatgagtgaagagttttttgttccattgaataatttagaggacatctaagagaacacaagtttgaaatcttattatattttgtataatgatacataataatttccatgataaagctgatgtgtattgaggagatcatatgtgccaagcactcactgtgtgttaagcatattctattcattgtatcatttaatcctcaaaatattatcaccgcctgtattgattggggttttccagagaaacagaaccaatgtctaaacagagagagagatttcacgcaattatggaggctaacaagtgctgtcatctgcagggtgaggcagcaaactggagaccccagagaactgatggtgttagttccagtcctaaggccagcaggctcgaaacccggaaagagcagtgtttcagtctgagtacaaaggcagaaaaaagccaatggtgcagtttaaaaaccttcaggcaggaggaattctctcttacttcggaaaggaccgacttttgctctattcaggtcttccgtggattggatgaagtccacccacattaggaggggcaactgctttcctcaatctgccaatttaaatgacaatcatcccaaaacgccctcacgaacacacccaaaatgatgtttaggcaaatagctgtgcacctgtatccctaagagttaacacataaaacctaccatcccatcactctttccaaatagaaaaagtgaggctcagagaggttaagtcacttccccaaagtcacagagcttcttataagtggtggagggtttgactgaggacccatgctctattgtaatcatagaaaatcctagtggaattttccaatagaataaaacgcctgcccagctgcagccaaacgttccatagacaatgtctctgggccttttgtggcagaaaaaccaacataaggaaaagaaggctggagatgccagttttatcaaactcccataaggtaaagggaaatatctttctggggaaaggagactaaaggagaaaattaacagccacttttcagggagagagaaagagcagggacccagcccctctgagactgtgggctgggtgtggcctgagctgattggcagctccattgtaactatactgtaaaggaatgactctacccaaactgacctaaaggagagtttgaagcatttttaaaaactctgcccaggccaggcgtggtggctcatgcctgtaatctcagcactttgggaagctgaggcaggcagatcatttgagatcaggagttcaagaccagcctggacaacatggtgaaacctcatctctactaaaaatacaaaaatcagctgggtgtggtggtgcacacctgtaatcccagctctttgggaggccaagacaggtgaatcacctgaggtcgggagtttgagaccagccaggccaacatggtgaagtcccatctctactaaaaacacaaaaattagctgaacatggtggtggacacctgtaatcccagctacttgggaggctgaggcaggagaatcacttgaacccaagaggcagaggttgcagtgagccaagactgcgccactgcactccagcctgggtgacagagcgagactctgtccaaaaaaaaaaaaaaaaaaattctcagacaaccagcagtgatacaagagataaaaggcatctggctttacgctgcaaacaaaagggaaacaggaagtgagagagcagttggcctctaagaagcatccatttgttttaccctgccaggtgcctacaaggtgatggttttgcctcccaaatataatcaggggcccaatctctgcattcagagaagtatatttcagcaacccataagtaatccaaaagcagttccccacacatcagctcaaacagtgttacaggacaggcattcttggtgccatcagatccaatgtcccatgttttaaccaacaattgaaaagccctcttttttttttgagacagggtcttactctatagtccaggctggagggcagtggtgggatcttggctcattgcaacctccacctcctgagttcaagcgattctcgtgcctcagcctcccgagtagctgggattacagatgcgtgccaccatgcccggtacattgttttttttgtatttttggtagagacagggtttcaccatgttggccaggctggtctcgaactcctgacctcaaatgatccaccagcctcagcctcccaaagtgctgggattataggcgtgagccaccatgcccagctgaaaagctctcttttctaccctgaaaaaaaaaaaaaaatgtgctgatcctataacccatctactcttctaaccaatcacaattgtgccctaattataataaaaaggagaaatgaaatgatgaggatttctaatgaaataatatatagagaaatgatatgggtttccaccaggaaagacggagcgaagcagtcaagtgctcacacacgtgtgtgtagaataaccagtgacagtcacaaacgcagacagcgtggtgtgttgtcgcatcagctttactgagagtgccatgttcttcaaaagagtggctctttcttgataaattcccataccaaacagagtcaaatcttctcttgatttacaccatagctgctacattcttggaaacatcagtgttcattcaacacttacatgtaaaatagaacatgtaaacatataaaatagaataggcagataaaatagaagaaggttggaccgggcgtggtggctcacacctgtaatcctagcactttgggaggccaaggtgggccgatcacaagatcaagagagcaagaccatcctggccaacagggtgaaaccccgtctctactaaaaatacaaaaattagctggacgtggtagtacccgcctgtagtcccagctactcgggaggctggggcaggagaatcgctggaaccagggaggcagaggttgcagtgagccgagatggcaccactgcactccagcctgggtgacagagtgagactctgtttcaaaaaaaaaaaaaaaaatagaacaaggttatagactctgataatcatggttcttctaacccatatgaatttgggatctacacatatatatattcaaaaaactaccccacaccgtaatgactcccccatccctatcattagggcaaccaaaagctctctgcagatttaaaacacacacacacaaacacacacacacacacacacacacacacacacaaacacacacacacacacacacacaaacacacacacacacaaacacacacacacgggacaattcagtccccagtgagaacctctgtaataaaaggtccaattcctaacccgcaataatattctttttttttttttttgagacagagtctcgctgtcgcccgggctggagtgcagtggtgcgacctcagctcactgcaagctccgcctcccaggttcacgccattctcctgcctcagcctcccgagtagctgggactacaggcatccgccaccatggccggctacttttttgtatttttagtagagacggggtttcactgcgttagccaggatggtctcgatctactgacctcgtgatctgcccgcctcagcctccaaagtgctgggattacaggcgtgagccaccacgcctggcccacaataatattcttaaagtcccctttcccgcctcctcagttctcccacaattcccagtttccccagaacaaaccccaagagatttctctgcccttccccccacccccaggcagagatgtcttccaactcttccccagcactgtaactctccactctggtcaagtggactccaccttggggaaagaatgtttgtaccgggcaccaaactagactttggagatacactagttcttagtatctgctagtgtgataattaaggtaattatttagaccaggaatctgcaaaatacagcctgaaggccaaatccgagctgcttgttttcctatggcctgaaagctaagaaagaatggttcttacattttatattattattattattattattattattattattattattattttgagatggagtctcgctctgtcgcccaggctggagtgcagtggcaccatctcagctcactgcaacatctgcctgccaggttcaagcgattctactgcctcagcctcctgagtagctggaattacaggcacctgccaccacacccggctaatttttgtatttttagtagagacagggctttaccatgttgtccaggctggtctcgaactcctgacctcaggtcatccgcccacctcggcctcccaaagtactgggattacaggcatgagccactgcgcccagctagttcttacattttaaatagttagtgggaaaaagacaaaaggaataatacgtcattacatgacaattatatgaaattccaatttcagagtttataaataaagtattgtctgtggctgcttttgcactacaatggcagggttgcatggttgcaagagagcacatggcccccaaagcctcaaataatccactatctgggcctttacagtaaggttgtcagcccctggcttaggcactaaacaagtgctttcaagcacctactatatgccagacactaaggtaatagagaggggagacaatcaacaagaagcattctttctcaaaagttttaggctgggcacagtggctaaagcctataatcccagtactttgggaggtcgcggcaggagggtcaattgaatgcaggagtccaagaccagcctagacaacatagtaagaccccgtctcctcaaaaaatgcaaaaaaaaaaaaaaaaattagttgagcatggcagtgtgtgcctgtagtcccaggtagttgggaggctgaggtgggaggatcacttgagcccaggaggtcaaggctgcagtgagccaagccatgatggtgcaatggcactgcagcctgggagacagagtgagaccctgtctcaaataaataaataagtaaattaattaattaattaaattaaaagcatgttattcagaatcacatagacttgggctcagctcttcagccataagcatgtttcttttctctttttctttttttttttttttgttgagacagagccttgctctgtcacccaggttggagtgcagtggcacaatcttggctgactgcaacctccacctcgtgaggtcaagcgattctcctacctcagcttcctgagtagctgggattacaggcacgtgccacgatgctcggctaatatttgttttcctttttttttttttttttttgagacggagtttcgctctttttgcccaggctggagtgcaatggtgcaatctcagctcactgcaacctcctgccttccgggttcattcgattctcctgtctcagcttcccgagtaactgggattacaggtgcatgccaccacacctggcctaatgtttgtatttttagtagagacagggtttcaccatgttggccaggctgatctcgaatgctgaacctcatgatctgcccacctcagcctcccaaagtgctgggattacaagcgtgagccaccgcgcccggcccatgagcatgtttcttgacctcagtttccccttctgtaaagcatggtgtggattgttcacctcgcatgggcatgtgaatatcaaatgagacatcctgtgcaatgtgcctcagacaaagaaaggagatcagcaaataatatttcctttctagttcatcctctcttcccatgtatgccaagaaagcaggcgagattgagtgagggaggtcatatcctctttgtctaaatgttttcttgttagagaacatctttcttcttaacatcccttcctacataaagaatctctgtcagaggaatattaaaaggccctaacctacagttagatggaaggcgagactccgatctcacagctgaatcactttagtctacctctctacccatctaatgctatccccttcaaaaataataataataatatgaaagttgggaagtggaaaaccatcctctggagttttcaaaaactaattccgttgtaatcatagaagactgaaggcaggattcatgacacatttctcttcctcctgggcagatgaatctacaatttgtatttgattttaaatgtgattctcctgcatcttcagtgggtttgattgatagagcacatggggccactcagtaaaatgatacagtggagatcaaagccggaaagataatttttgccaaaatgtctgcagccgacagtgagttataagcctttgtctcccactttacggaacacaattttatttaaagccgaaatctgtcactttggtattgtttattgaaatgcatcccataccacggtcccgtgaagaacaacgtcaagtcaaaaggtaaaaaaatccaatggttacaaacagcccaggaccaaataaaggagggagaatgcttccaatctgcgtaaatattacccaccagtgatgcatttggggcaagcaatgaagtcattcatctgcaaagtaaatatctggcattgtcagaggtgcctgacacagccccataaacccagtgagttctgttccattcagcagctcacacatctctatttgataactttgctttatttatgggtccacaatgggagtcataactgggtttttatctttgcacaacttttttactttattttttgagacagggtctcactctgtcacccaggctggaagtgcagtggtgtgatcacagctcactgcagcctcgacctcctgtgcccaagcaatcctcccacctcagcctcccaagtagatgggattacagaaatgcacttccacaccttgctaatttatattagtttttgtagagacgggctctccctaggttgctcaggctggtcttgaactcctgggctcaagtgatcctcccacctaggccttccaagtagctgggactacagatgcacaccaccatacccagctaatttttaaattttttatagaaaaggagtctcactatgttgcccaggctagtctcaaactcctggcctcaagacattctcccaccctggcctcccaaattgctgagattacaggtgtgagccactgtgcccagcttgcacagcttttttaaaccttttttttttttttgtattcattcacgcttttcatacatcatgattgaggatctaccctgcagactgtatggagttatctagaaggcaggaaggcagagaactaaaacctttggttaaaatatctggggttgagctcagtgtttcctgctctccagctatgtgaccttgatcgggtctcttcacctgtctgaacctcagtttccccactgcaaagtggagagcaaatgagaccatggacttggaaatgcttcatacatttctgagtgcctcacagatatgaagcccaaagatagcaccattctaggctctgtcaggacaatgaggccaaagttgtcactgatgccataaagttgtctctacagcgaaaggtccctggaattagcaggaggcttttgtggagcaaatgcctccttttctgcgtagaaagtgagatgcctcaatcactctgcctagatgcctctagatgcctcaattcctctgccaccaacagactctgtgacattgggtcacttttgagattcctgggtcctgcctacttcaccagaatgtcatgttctggaaccttctcagtctccaacctcatcactcacaagcttttcttatgctttgatagatgctacaattgcttgtcaaaaaaagagcctcatcttctccgttgctaagagaaccccaatttttaaagtattgaacagtcacatgctttaggagaagttgcccttctgagcctcaaggagtgaatcttgactgacctaaactaatcatagtaatactgaccccctgtctagtgattgctttcgaataggcacgtgacccattgtgaccaatgagagttgatggaaatttcctccttgctgtcaacaatggacacaaggaagacacattttctcctctgacctttggacattgaacgttattgtgttaggatgtgatgtaaggcactgtggcacccattttgtgctcattagaggaaaagactggaattaagcccttgctctgtaagtcagagcacaaagatggcaagagcccaggtctttgatgatacaactgaactactgaataaaccaaccctagactcacctacccccaaattccttttaatgtgagagaataatgtcccatcttgtttaagcaatttcaggtttccattacttactaatgaatatatttggattccaagttgttatttccttgcatggaatgcttctgacacaactcacccttgctagcctcaagggtggtggccgaactggggagggtccaagaggaattgcaaaaaacagagctgcaaggagcagccttatctctgaccgctgtggtgagccctccactttgtataccctcccccaaccgtgtgactctggatcagccaatcaggtgatctctcttggcaccttgactcatgatgcaagaacacaggccctattgggtttccatgaattctctgcagggagagcaggggtccccagatcagcctatccctaacgcatgcccttggaggagttgccactataaagctatctggagtcaccttgtatggggtgttttccaaggctgggccttcagcagtgccttcggcatgttctctttctttggtaagagtcagtttctggggtgaacaactgagaactcagggacatagacaagaaatcatgtctcattcttaaaagcctcagcacaagtcctggcatagagtaagtgttgatgggaggttggatgaatgaataaaggagtgagaaagttaattgcttcccttctctgggctgctgtatcaatcaaggttgtggcaggaaatacatagtaaactgaaatggggtaactaaaaagagtttagcaaagggctatatatagctgtataagtgggattaaaaaaaacaaaaacaaaaagggaggttgcagtagccctaactagcagcagtgaggagccatttctacccctagacctggaggggaaatagttatggaacccaaggagagtagccacagtcttcagggaaagacagctgcctggcaggagcttccaacctatggcaacccaacaggaaggagccacagaaataaatatccgaatccctctctcctcccaccttctagtattctatgatccccaccccattggccaaacccaagcagccacaagaggatgggagaccacatgtgatgtagtccatagaagtcagcctcctggggtacaaagcaggaaatgggggtggacagtggatgtaaaggagcaaatacaaaatatccggcacagatattgctatggtttgcatgtgttccccaaagttcgagtgctggaaacttaatccctgatgcaaccgtgttgagaggtgaggccttcaagaggtgtttggatcatggggacatcatctttctgaatggattaatgcctttatcatgggagcgggctggttttcacaggagtaggtgctctctctcaccctctctctcacccatgtgatgccttgggtcacaccatgatgcagcaagaaggccttcaccagatgtaagctctcaacctcggacttcccagcctccagaactgtgagccaagtaaatttctattcattgtaaattacctggtctgtggtattctgttatagcagcacaaaatggactaagacagatagtatctagtgataggatagactacaagaatctctttcacccagatcctgcagccacaaaagggccaacgctctttggagagtttatctctcacccaagcagccaccagcatcatcagaaaacagcaatgttcctctacacgcttgtgtgtttccttcattggtacaagtttccaccattgttttgctcataagagaaaccattctccaaagcccagagtaattatagagcccataagtcttggggctttctgaatttgaagcagattcagggctcaagagagccaagaagtcatatcaatgccaggaatctggaccccaggcagacagcgtggataacctaccccaacagaggtgcaggctctcttcctttcacccaaaaaatagcaaacacatttattgatcaccgtgggccttttccttccacctggaggttagcaggaactttcaaaggtttagtgtcatccatatcccattgtcttcttcatgcacagaaaagacaaacttcttcatctctggaaaggagacatggactcacactccccttattctgaatttttgcccactaagccatttcacaggaagttagccatggtttgtggatttttaaatgcttctgggaggagaaggatttactagtgataagaaataaaaatgcaaatgttttactgatgagatatgcatgtaaagtgcttgatataatgcctgacatggaaaaaacactcaataaacgttagtcatcagtatttatatcatcattccttttaatacacgccatcgactgggtgcagtggctcacgcctgttatcccagcactttgggaagcagaggcgggaggatcacttgagcccaggagtttgagacgagcctgggcaacataagaagaccccatctctataaaagaatctttaaaaattacctaggtatggtggcatgtgcatacagtcccagctactcaggaggctggggtgggaggatcaattgagcccaggaggtcaaaatgaggctgcagtgaaccatgatagtacaaaaaaatagttagaaagaatgaataaggccgggcgcggtggcttactcctgtaatcccaacactttgggaggccaaggtgggtggatcacgaggtcaggacttcgagaccagcccggtcaatatggtgaaaccccatctctactaaaaaatacaaaagttagccgggcgtggtgacaggcgcctgtagtcccagctacccaggaggctgaggcaggagaattcctggaacctgggaggcagaggttgcagtgagccaagatcgcaccactgcactccagcctgggcgacagagcaagactccatctcaaaaaaaaaaaaaaaaaaagaatgaataagacctactatttgctagcacaatggggtgactataatcaaaaacaatttaatcgtacattttagaataactaaaagagaataattagattgtaacacaaaggaaaacgcttgagatgatggataccccatttagcctgatgtgataattacacattgcatgcctataatatctcacgtaacccataaatatatacacctacgatgtagtcacaaaaactaaaactaaatataaaacaacaagcatttatcatctaattgtctggatttggaacccacaagccaactcagctaagtgctctggcttagggtctccaatgaggctgcaggtaagatgtcagccaggactgcagtcatctgagcgtttctggggctgaagactaggcttccaggctcactgtgtggttgtctctattccttactggctcttagacagaaacctcaattcctcaccacgtgggcctctccataaagtgccttagtgtcctcaaaacatggcagctggcttcctccaaagcgactgatccaagaaagagaaagaaagagccaacaatggaagctgcagtctttcatgacgtaatcgcggaagtgacataacatcacttctgcggcattggtcacacacgagccccaacatggatctttccagcgtgggaggggactaaacaaggtgtgaatggcagcaggcagggattgttgcgggccatcttgaaaactggttccctcagaggagagctggaaggctggggacaaggacacaagagaggcttttttatttttttatttttttgagaccgagtctcgctctcgctgcccaggctgaagtgcaatggcgcgatctcagctcactgcaacctccgcctcccgggttccaggaattctcctgcctcagcctcagcagagttccccaagggtacctgttggcctagtttgagactcttggctctgttagtgggagtctcaaactatgctccaggctgctgattgttctgagggatttctctctctttctttctaacactaagaaataggaacttggcctcccagagtgctgggattacaggcgtgagccaccacgcctggcctgtctgtaatctttaaaagtaatagcatattagctctgagggtcggttggattttcttttttaaacagttggcagtcatttgtagccaagtcaggtgaaaagggtaggtgatcaagctcattacaatttttattgaaataaaatttatctttagtaacgagattgattttttgtgtgtgactccggagggcagtttgcccagagcagtggttttcaaactcttaacaaactatccctgagaggaaaagagaatgaattcatactctgtggagtgtagcccaaaataacctctgcaaaggtgaaattttctttgaagtcttattttaccttaggtatttgtgaactctgcgttctattttgtgccacatgtgttttaagttactattactctactaaagtttattcatcctccaggaagatgatgatgtttgtactgtagttttttatgtcccagggatacagcagggttccccaagggtatctgttggcctagtttgagactcttggctctgttagtgggagtctcaaactatgctccaggctgctgattgttctgagggatttctctttctttctaacactaagaaataggaaacacagttttcagtttaaaaataacataattacaaagtgtagaaaagtctctcttggccgggcacggtggctcatgcctgtaataccagcactttggaaggccgaggcgggtggatcacgaggttaggagttcgagaccagcctcgccaacatggcaaaatcccatctctactaaaaatacaaaaattagctgggtgtggaggcaggcagctgtaatcccagctacttgggaggctgaggcaggagaatcccttgaacccaggaggtggaggttgcagtgagctgagaatgcactactgcactccagcctgggcgacagagcgagactgtctcaaaaaaaaaaaaaaaattacaggcaaaagaggttgcccatgttctcatcattggcagcagcagcatcaaaatatggcacccactccagtgatgcctttccagaaggagcaacactcatgtgaaaccaccagctttgctttgtttttgtttttgttgttgttgttttttcagagacagagtctcactctgttgctcaggctggagtgcagtggtgggatcatagctcactgcagccttgaactcctgggctcaagcgatcctcctgcttcagcctccccagtagctgtggctacaggtgcacaccagcacgccttgctaattcaaaaaaagaaaaaaaagaaaagaattgtagagatggggtctcgctatattgcccaggctggtctcaaacttctgacctcaattgatcctcctgccttggcctcccaaagtggcaggattacaggcataatccagccattgtccctggcctggcttttttttttttttttttttttaatgtagctcatgaccacaaacggagtttggtttccttgctctctctttttcccatttggtacttttctttctctcccatgcactcctcttcaaaccaaaagtgaatcttgttatttcttgaaaaatgtgtagatgttgaagggatgaaaaacctgaactctaacgtctgactatctgaacccaaattctagccgccccactcagttgctgtgtgactgtgagtaagttcttaccctctctgagcctgtttcttcacttggaaaataaaagtatacacatatacagctgttagccagaactcagcctagggtaacctttcaataaatattagcatcatcaaggaaatcgcttgacaaattaattttcattaagcaatgagggtctataacagtgatgacttctgaccaaccaaccagcccaatggctgacaaaggactgataacactttacatttttataatttccctagatttcaaattctccataaggagcaagtacagtttttataatcagacatagaactcgcgttcactctgctcatcctgaccctagccactggccaccaatttctgggttggctgctccaacctgagagcacagctactggaatcagaggcagaggagctcctcttgcgttcgttgttggtttcccttggttttgtaaaaataaataaataataaaatagggatacacccttcagacagcaggtaacttcctaagctaagatgaacaggaggaaatttaaatgtctttccccggttcaaatcccctaccctctcccatctgcctaccctgggctccaacactcgggagaaagaccataagtcgttcagatgatgctttggagctggacaatcaatcgtgatcaaaaacaggggcatgggagcctggctaacgtggagggatgggagaaaatcaggctgaattagagaagggtacattgtggagtgtgttttacaacgccattagttctaagcacataaggatttcaaatcaaggagcatccacacacacacaaactcttggattccttaagagataaggcggatccaaaattagcatatagatcagaggcatgcagttgagtgctgctaaagtgggctataaatgcttgggggaaaatagttgtttttctgaagaaactttacaacattccaaaatcttgtccaggaagtgtgaactctaagtccaatggactgaactgtgtcccctcaaaattgatatgttgaagccttaacttccattatgatggtattaggaggtgggcttttttggaagactattagtttagatgagatcatgaggatgaggtcttcgtgatggaattagcatccttacaagaaaagacaccagacggcttgctctcttgctctgtctctcctcttccctccctccctctctctctccctctctacctccgctccccccaccccccacttcctccgtcatgtgagaatgcagagagaaagcagctttctgcaagccaggaggagggtccgctgggagctacatcagccagattgtggcacttctcagcctccaaaactgtgagaaatagatttctgttgcttaagccatccagtttatactattttgttatttgcagcctgatatggttcggatttgtgtccccacccaaatctcgtgtcgaatcataatccccagtgttggaggaggggcctgggggaaggggattggatcacggggacagacttgccccttgctgttctcatgacagtgagtgagttctcacaagatctggttgtttaaaagtgtgtagcactttcccctttgctctcttcctcctactccagccatgtaggacatgccagcttccctttcaccttctgccatgattgtaagtttcctgaggcttcctcagctatgcttcctgtacagcctgcaaaactgtgagccaattaaacctcttttctttataaattacccagtctcaggtatttctttataacaatgcaagaagagactaatacacagcccaaactaactaagacaaacccactctgacccattctgacacccaaactaactaagtcctggtttgaacccttcactattgtgtcaccttggggcaagtcacccaacttctccaaatgtttgtttcccaccaggaagatggaaatgacagtacctctccttcctaccccgcaaacctatcaggaggatcgaaagggacatggcaagcaaatactttctaaactgtaaagtgctgtgcaaatgcaagacagcattactctctttttatggagttatttatactctacctggttacagcagaggatttatggtagatgtcagtaagactctttattttgaattttaagagagaaataagaatctttgttatctgtagagaaacaaatataatttccatggggcactaatataatataatataatataatataatataatataatataatataaatataccttaccgaataaaccctttgctcagacgtagtgaaaaggtaaattccccttcaacctaatgaagtttcagtcgctcacattttctgaatttgccgaacagaaatgcgatcaggtgcctactaagtgcagtacccagcacgatgtctaacattgaaacatacagtgtatacaccagcacctccaccaaacccatatccagcatgcaaaacatacccttttcaagtcggaagcacatagatagattttttggagttcaaaaggtcttaatgcaaactggctccaattccttttttttttttttttttaaatctttgaaacattggttaagtcttctcagagctatcattttgcacacatggaaactttagaccatccatccttcaagtgtcttggggtaattagagatactgaaggttaaggacctagcatactactaatagattttcaacaaatggtagctactgttatttctcatcattgcagatttaagagtgccaattctcagagcacttcagataaaaaccctacctttcttaaggcaaaaaacaacggcattaacttttttttttaattaacctaagttcccattatgtttagagaagagatcacaatgataaatgcttgccctgtctctcttttttaaaaatttactgttcttacatgtgacatatactgtggtacttagtgtcaccctacaaagaataaatttaaattgaagaaacagaaacacgggagagtccttgtttgggtttaatttgtatctgactacaataaaattctatcctggaagctagagtcataaaactaaaagtcaggaaggaaaagaatggctaattaagctccaaaactaaaagctctttctttattgctatttctttaagtcctaacaattggtcaggcacagggtcttagctgtgccattctagttaatggtcggttacaaatttccaccataaactcatcttccttctagcaacttaaatctcaggcactgggatgtaataaggagagaaagctcttaggcccagggcaatctctctctcaatcccaatctcccttccccccatccctatcccaccacagtaactgttagtaagagcttttggttgcatgcccagaaatctaactctggctaaattaatcaagaaacgaatatactggtttacccagctgaggtcatttacggaaagggaatgctaaggtttgaatgtgtctcctccaaaattcatgttgaaacttaatccttattgcagtggtattaagaggtggggccttttaggaagtgattcagtcaggagggcttggcccttaagcaatgaattcatgccttataaaggggtagagggaactaacttaggccctttcgcccttccaccttccacatatgaggatacagcattcatgccctccagaggacacaaggcaccaccttagaagtaaggaacagagccccttaccagacacaaaatgtgcctgtgccttgatcctggactcctcagcctccagaacggtgagaaataagtttctgtcctttataagttatctagtcttgggtattttgttacagcagcaaaaacagactaagacaggaagagaaaagaaccagagccccagggactagaaacaggactcactgcctcaaagtacatgtatactctctctctctctctctctcgctctctctctctctctctctctctctctgtctccatttctcttcactgtttgtctttgctcagccttattctccatctctctccatgtgggagggcaagtagaggctggcacctccagatatatatcctctctgttcaagaaccacaataagttaatccccagggaagattctgatgcctgtgccactccaaggtccaacactgctgggtggatagagcctgatgtttgaccagatatgtgccacttaccaaccatagcagacactggcaatggccacccatgtcccttggaccctccccatcccatacaagctgaaggcctccctctgcaagcacctgcaactccccacctgaaggccttttctcggcctcggcaagacaggccagaagttcaaggatgtcaaagtccctgagagaatcccttggtcaatgtcagatgagtgatgaaagataaatatctcagttttctcaacactcaggtgggacactttgaggtgtgttccatgccatcaaccaaagcccatcaaaaggaccaagccccggctgcccatagaagtaacttactcattaccttgctctattctggtttagatttccttgtctcattttgccctgtgatggttaattttatgtgtcaacctgactgggacgctgagtgcccagataattggtaaaacattattctgggtgttcccgtgaaggtgttttcagacgagattaacatttaaatcggtagacggaggaaagcaggttgcactccagatgtgcgtggtcctcatccaatcagttgaaggtctaaatagaacaaaaggccaacccttgcctgagtcagagagatctcctcctgcctgagggccttcaaactgaaacgtcaaaattttcctgcctttagactcaaactgaaacacggctctttctggatctcaagcctgctggttttcagactggaactacaccactgggtctcctgggtctccagcttactgactcattctgcagatcttaggacttgtcagcctccataattgcatacacacacacacatacacacacacacacacatatatataaaagtgcatatagatacatatatgtatgtgaatgtatgtatataaaagtgcatatagatacatatatgtatgtgtatatatatatacacacatacacacacatatatgtgtgtgtgtgtgtgtgtgtacatatacatgtgtgtatatatacacacacacacacacacacacacacatatatatatatatatatatggaccatagagaagtctctaagccaaagctggggacaggggaatcctgtgtctcctggggagaggtctgctttagtgtccctgccatgctcagtcattagccaggagcacctcatggaaggaagcttatggattccccatatgcttatatatgtgtgtgtgtgtgtgtgtgtgtatatgtatatgcatatgtgtgtgtgtatgtgtgtgtgctattctattggttctacttctctaaagaaccctgactaatacactcccattctcctactggtgcttcccagagtcaccctacaaataaaccattacatggaaatcctcatcacaggatctgcctctgggaaaacccagcctaagacatccatgactttcataggagaagaaagagctctagaattggcagccttactgaaccatgtggaagaggaaaggagagcacctaaacaaaagggtattaaccaattaaaataacctaaacccacacttgtccaaattgctgagcaagtgggatgggatgaaacaactttcaaccagtgtccaaatattgctgtgactcctagactggcttgacacaaaggcagtgtccaccagctctaaacatccatctcaactaagatttctccaggaaggctagaactgacaccctctgcttaggttctcagtgacttcacccagccagcaaaggagctcttaggaaggcagacaagccctgaagtctgtctgctcagactccagctacctgctctattcctgctttatcaacctctagcttagtcgctcaatctccagctttgctccttcccattagattctatggctgaacctgactgccatagtttgtttctcagatgaatttaaggcaagggttgcaaacttaaatgcacacatgggcagacaagtaacacaaatgagtgaagagtacagattagggcaactgggtctggtggagactgtggcaaactagagagcacacaacctatctaaggaggcagcgaggactcaattttgcaagatttgtggaatggactcccaatgttgccaaactgccactattttttaaagagaagcaggaaatccaggggtttttaaagatgtaaaatacacagtttgttgaatgctggcgactgatttttttttttttttttttgagacaagagtctcactctgttgcccaggctggagtgcagtggcatgatctcagctcactgcagcctcctcctcccacattcaagaaattctcctgcctcagcctcctaagtagctgggattacaggggtgcaccaccatacccagctaatttttgtatttttagtagagatgaggtttcccccttgttggccacgctggtctccagctcctaatctcaagtgatctgcctgccttggcctcccagaatgctggggttacaggtgtgagccacagcacccagccctgattttttttaatgtaaatactgtatgaacccagacaaatgttctgccaggccagtgctgcatggctcaccacgtggtggccctgagaatgggcctcatcgacctgcctctactgggagtgtaattaaccagggccccagctgctgcgctggggaatccatatgcttccttccatgaggtgctcctggctaatgactgagcatggcagggacactaaagcagacccctccccgggagacacaggattcccctgtccccggctttggcttagggacttccctatggtgttcgcaccctaacttttttctcctctctcttttactcagagtcagacttgcattactgtctcaggttctcccagctttatgtggcaccttctttgctttctctcaagggcatttcccttaataaaaatcacatatgtgtaatcctgtatgggagtttgtttctcagaactgggctgacacaccatcttgcaaactctgctttcggcattcagctcacacttacttacaccctccaaactccaactatttagggctaattccattccagctcccacccgttgaatcccttcccccctccccctgcttcctcctcccattctgctttcctggaaacagcatttccacttacttttgaacaatggtccttccttcactgttcattcatggagtttggatagcaccatcttctaaagctagggctgagcacatgatcaggactgactaatcaccctcttctacttccttagccacaataattcgttcagagatgggcacctgactcttacaatgcaatgagagtcagcttcttatgccagtgcttttggcaaaggtaagttcattttcccctgggattactaagctggtaggaggtaagtcagcagctgctgatggcataagaaaagggcctgataatgaagccaacatggatgaaaagagagctgagaagtagagatcagacagatttcaaagcatatcatttaagcatctggatccagccatacttgaagtccagtctatctgtgggctttgaagttgcatggaacaatagcaagatgtagctgagagagttttggctaatataccacctcacctctcattcagtttcatggaatataacagacattgccaactaaaatttacaaacagcattgatataaaagctccgccatttaaaaaaggaaactttctattctttcactgtgtggccttgggaaatttctaatccgttctgaacttcagcttttttccctctcaaatgtagcaaatacaacataacttgcttgccatggagggaaatcagatgcccttatctaggaaagtaaagatagaggtataaaacattgttatttcaaaaaaaaaaaaaaaaatccagcacataagtctaggagcattgaacaagggtcagattgcatggattcagattccagctccattactaactggctgtgtgaccttggacaactcaattgacctctctggccctcagtttccttatcagtaagacggaaactccaatcatatctattgcacgggatagttgtagaaattaatagatacataagtgcttagtgcaacatgtggcactcaaaatatgtgtggtatgattgttattgacacaatgtttgacccatgaatgattgtgatgccaaccccctcacagttggaaatccacctataacttttgactcccccaaaacgtagctactaatagcctattgttgaccagaagtcttaccaataacacaaacaatagacacatatgttgtattttagatgattatacactgtattcttacaataaaataagccagagaaaacaatatatgattaagaaaatcataaggaagagaaaatgtatttgttattcattaagtggaagtggatcatcataaacgtcttcatcctcattgtcttcacattgaggagactgaggaagaggaggaagaggaggaattggttttgccgtctcagaggtggcaaaaacagaaaaaaatccatgtataagtggacccatgtggttcaaatccatgttgttcaagggccaactgtatttatattacaataaatgctgttaatgttgtcactgttgacccttctattccattcccagcatcacttcctatgcccagtggaaaattccatcttaaaatcacccagcccaagccctcttcagtagactcagatagatggcttgtcaagggcatgacttaacttctccaaacacaaccagcccagtttcaactgccatttggggaactttcccaattaccacatttccgcacgtcaagtatgaattactttaattgccccagaagaacgcactgttgaaacatttgacttgcccagaactaattgtctgtcaaaaagatattttgcagccaagctgatctcttaattggacatctaatttaactgaaaacctttttccctgcttgttttatgctttcttctcctgtttttgccaaattctggatgctgggcactgctttcagaaataatttatcttgttattttctattataaaagtaatacatgttcattatagaaaaactgaaaaaaaaaattccacatgaagaaaaacagtggatcctagactcattgcccagaggaggactatgaacattccacatgaagaaaaacagtggctcctagactcattgcccagaggaagactatgaacattccaaatgaagaaaaacagtggctcctagactcattgcccagaggaagactatgaacattccaaatgaagaaaaacagtggctcctagactcattgcccagaggaagactattaacattccacatgaagaaaaacagtggctcctagactcattgcccagaggaggactatgaatattccacatgaagaaaaacagtggctcctagactcattgcccagaggaagactatgaacattccaaatgaagaaaaacagtggctcctagactcattgcccagaggaagactatgaacattccaaatgaagaaaaacagtggattctagactcattgcccagagaaagactatgaacattccaaatgaagaaaaacagtggatcctagactcactgcccagaggaggactatgaacattccaaatgaagaaaaacagtggatcctagactcattgcccagagaaagactatgaacattccaaatgaagaaaaacagtggatcctagactcactgcccagaggaggactatgaacatcttagcaagtctcccctcaggttgtcctagaatagatgtctctacgtagttaataaaaacatacattcaagttttgcagctttttgttccactttacattttaagttgaacgtttacacttcccattccaagatcttcagaaacatgtttagaaacagaagaatatcccaacaacagtctgtttaacctcttcccctaatgctgaactattgttgctttaagcatacattttctgtgtgtgtttcagatgtagtttccttaggaaagattctctatgctgtgcaacaattccccatgtgtctcttacatttctgcacatcttgtgtcagcatttgttctagaccgtctttataaggatgtttgtatagctaatagcattggaagatagggctaatatagtagaagacagatttatttgctgattaggattataataataatatctccggaccaggcgcagtggctcatgcctgtaatcccaccaatttgtgaggctgaggcaggcagatgacctgaggttgggagttcgagaccagcctggctaatatggtgaaacccccgtctctactacaaacacttaaaaaattagctgggtgtggtggtgggtgcctgtaatcccagctacttgggagacaggtgggagaattgcttgaacccaagaggcaggggttgcaatgagctaagatcataccactgcactccaacatgggtgtgacagagcaagactctacctcaaaaaaaacaaaaaacaaaaaaagaagaagaaaaagaaaaagaaaggattataatgacaatgtctccctccatccagggtaaaggttgaaaagaccaagattcctaaacttggggttcctcaggtgtgatgcaaatccactgcaggcacagattctacctggatccatccgtgtattactcatttctcacactgctaataaaaacatacccaaggctggatgtggtgtctcacacctgtaatcctaacaccttgggaggccgaggtgggcagattgcctgagctcaggagtttgagaccagcctgggcaacatggtgaaacctcatctctactaaaatacaaaaaattagccaggcattgtggtgcacacctataatcctagctactcaggaggctgaggtgggagaatcgcttgaacccgggaggtggaggttgcagtgagccaagaatgcgccactgcactccagcctgggcgacagagtgagattctgtctcaaaaaaagaaaaaaaaaaaggctaggcatggctgtaatctcagcactttgggatgctgaggtgggcagatcacctgaggtcaggagttcaagaccagcctgaccaacatggagaaatcccatctgtactaaatatacaaaattagctgggtgtggtggtacatgcctgtaatcccagctactcaggaggctgaggcaggacaattgcttgaacttgggaggcagaggttggggtgagctgagatcctgccattgcactccagcctgggcgacaagagtgaaactctgtctcaaaaaaaacaaaaaaacaaacaaacaaaaaacataccctagactgagtaatttataaaggaaagagatttaattgactcagggaggcctcgggaaacttacaatcatggcagaagggaaagcaaacatgtccttcttcacatggcggcagaaaggggaagaatgagcaaaagaagaaaaagccccgtataaaaccatcagattttgtgagaactcattcactatcataagaacagcatgaagataactgcccccatgattaaattacctcccactgggtcccttccatgacacatggggattgtgggaactacaattcaagatgagatttgggtggggacacagccaaaccatgtcaacctgtgtcacccttgagggacttgggggtcaaagggaactggtgcagacatgaagctcaagcttcctgttgtgccatgaaaaataaagtcctttatctctcaatccagagtctcatgtcttctgcccacatccataaaactcgctagcctccatgtaggataatatcttagaccagcacagttcttgacactctagaagtgaatttgttggatcaaaaagcatgaacaattgctaaaactcttaatatgtcttgtcaattagctctccaaacaaatatgagtcattgcctgaaatctcttttgtcctcaggaagggatagagctgcttgactcagatctctcaggtggccttagactgtaatgtcttcctttcgtgcagagctcttaccatcctaagccactacacctacctaatattctataaaaagctttttctccctacccagtgtctccaatgagctgactttcttttctggattactcttttatgtaataaaaagtagacatgagggtcaaacagaaagggaaaaaggggaatttgtttaatttctaccaagtgccaggcatagtacaaagaacatttagataaggcagaaggcattaattatttttatctacccagaacccactgccccacctaagcaccccagcccctgacctggccacgtgggtggctatgtgacctgagctgaaccaatcagagtccttccctgggatttttttcacatcataaccacatgagaaggtctcccattatgaaacagagaagcttgttggcagccatggttctagccaaggatggaaaaaacaaccaaaaaaagaaaagaaacaaaaaaaacccaccatggtaaaaaaatacatatataaaaataaaaaagatatgaaagacagacagacatggggaatggtctctttccagttgcccctgccactcaactgctctcctaccttcctggatttggttatgagagtcaataaattatccccttttattgcctaaatgacttccatatgagtttctgctccttgcaaccaacataatcttgacaattaatagtagctagcattttgtgagtgtttactgtgccatgcccattaatacacctaatcctctctacaattggacaggtaaggtgcttttagtaacctccaatgtacaaaaaggaaaacaagttgggtgaagtgaaatgacttgctcacagtcgctgggctaacaagggggcagagtcaaagtttaaagccagagcccatactcttccctattgtataacacagacatgctgtctctgttcccagtgctggggaatgcagagaactggggactgaaggaagagcaggcgttcaggtaagcattaatcaggggaccttccacaagggaaaagggagtactggcccagttgaagtccagccagcactcagcatggtcaaggatggggtggtgctctctccagccattcaaggtgctgagaaaagaacagaactttcatctgaggaatacaagccttttaaattattaggcccagagaggcaatagaacgagatagcaatcatgtcctacataccccctttgagctcggtattcatttcttaaaactgcttgccattgccacaagtagctataaattaatctaataatgccccactggatgctataacccacacctcatagcttaacaatgtatagccaatcactcgtcaatgttatttctgaaaaccagtgagaattcctggcaaccaactgtgtaccagcccactccatgtcccccttttttgcctttataaatccacttgtaactgctgctaattggagtgtatattcagggaaacttgaatctatgctccctggctacagtcctcaagcttggcccaaacagagtctttacttatattaattttgcctcagcttcttccttttaggttgacagtgctacaggctgaattatgtccccctaaaattcaaatttgaataaatgttcaaatatgaatttgaggccaggcacagtggctcatgcctgtaatcccagtactctgggaggccgaggtgggcagatcatcttaggtcagcagtttgagaccagcctggccaacatggcgaaaccccatctctactaaaaatacaaaaattagccaggtgtggtgacgcatgcctatcatcccagctacttgggaggccaggataggagaatcacttgaacctgggaggtggaagtggcagtgagccaagatcgcaccactgcactccagcctaggcgacagaacgagactgtctctctctctctctctctctctctctctctctctctctatatatatatatatatatatatatatatatgaatttgaagcccttcaaccatatggatcatatcttgaagccctaaccccctagcacctcagactgtcactgtatttggagataggggcttgaaataggtgattaagtttaaacctatttagctcatttagggtgagctctaatccaaccagactcatgttgttataggaagaggagattaggacacacagagagacaccagggatggacaggcacagaggaaagaccatctgaggacacaccagaatcgaccatctgcaagccaagaggaggtctttggaggaaccaaccctgctgacaccctgatctcagacttccagcctccagaattgtgagaaaattaatctctgtcatttaagccacccagtctgtagtactttgttatggcagctccagcaaactatatctacaggaatccatcaccacttatgacaggctctgccacatagtaggtgtgtgtgcacacaccacacacaaacatgtttagaatatgaaatccgtgaaccctactcccacactgataacagttcaggaacagttgattttccctcagggaatctggtttgttttcctagtttccatcccatcaagaccccttcccacctgctgggaaatacttgcctgaacccctcgttcctttcacaacacacacctgatggtaggaagaagcttccaactctgatattgacagggtgcttgtaacctagcaccctttctcctaccttgttatggaaaaataaatcctttatcctatttcaactacagtcttggcaaaggaaaaaacaaaacaaaaaaggaaaccagcctagaaatggaaaccaaagatcatgaacagtgctatgctgagttacagctaagggttggcctttctggagctggctgccttcagatggcagggctctgagtgtgtgtgtgtgtgtgtgtgtgtgtgtgtgtgccagaagcacaagatgacacaccctgtggtggggtcaggcaagctgattgtgggaaaggtgggaacagaatattttacaacaatgttggaaaaatgggtttacattctctgagaggaagatacccaaagcttcaagctcacctcaagggaaaattgagctaggtttccatgctctccacttggatctcacgcacatgaacacacatacaaccttctcctcaatattcacaagaggcctctgttgtctgcttctccagagagcggaggtgaatttacctgaagctaatgaggcttgggcttcagggtcttttccttgtacctgtctctttaaatgctggacttggggaaggctttaggtgagaagggaaagctgggtttcaataatgaagcacctctatgttcacatttctgattaattgcctacacagatcccagaagaatggaatggaaatagctaaaggctccagaattttctctttttatttttttgagacaacatctcactctgttacccccaggctggaggctggagtgtggtggcaagatcatcgctcactgcagcctctaactccctggctcaagcgatcctcccacctcggcctcctgagtagctgggactacaggcacacaccaccacacctggctaattttttgaattttttttttttgtagagatgggggtcttgccatgttgcttaggctggtcttgaactcctgggctcaagaaatcctcctaccttggcgtctcaaaaagctgggattacaggcatgagctaccatgtccaggcagctacaggaatattatacttaatttctcattccaaaataacattctcttttgtgcctaattttaaattcataattttgtattctttttcttaaacagagatccccatattataaaagcttcagtccccacaaaaactggatctggttctgccaaaatgatatatcctttatgatatttatagagacgttctgattatttctgaacatctcagactttctggaaccaagacaggttcgattatgaacatctgttgtctaattttaaagaccaagggggaagccgggtccttatgagggccataaaggctccaagctagatggatattgggggagtgggttagcagagatgtcctaaaacaatgaattacactaatgggaagaacaaaaggtaagtctaatcacagatgtcttggttttcaagctagtcagacttcagataactgtcaaatcttcagccataaatcgaaagtggaggagaattaaagatccatccttgtttgcttacagaatttacttaatttagccactctatccttaattgatagcaacaggttttttcaaaatagtcaaagtaatctatgctttgctacataatagcaaaagtaatagccaacattcatcaacacctactatgttatacccttgacagggtttcctattttagtagtcaaagcaatttcatggagtagcaattacagttgtaatttcactagtgagaatgcagagtgaggctcagagaggttaaggaacttacccaaggtcacacagctagtgagtggagagttggaatttcatctctctgattttaaagtctgggccctttcctctactgtctctctctgaactcaatgacacatcctaagtaagtaagggcttctacacaggatgtgttagactatgctgcagtaacaaacaacccctggatctcaggaacttaaaacaaaatttcaggctgggtgtggtgtctcacacctgtaatcccagcacattgggaggccaaggccagtggatcacttgaggtcaggagttcgacaccagcctggtcaacatggagaaaccccatctctactaaaaatacaaaaattagccaagcatggtggtgggtacctgtaatcccagctacttgggaggctgaggcatgagaatcacttgaacctgggaggcagaggttgcagtgagccgagatcacaccattgcactccagcctgggcgacagagcgagactctgtctcaaaaaaaaaaaaaaaaaaaaattctagaaataactccaaccttattttcttgaacacgactcatcctgaccctccagcactccattgatctgggctaaatatatggaatcctgcagatgaagacaccagcacccaaagctaatgggacacagaaaacagaggccactcaaataaatgtcagcactcctagttactgaatactctgtgtctggcaagtttcatcattagtcagttattcattcactcaatcaacaactacttactgagttaatatggcagcatggttatgagcacagactctggagcaagaggtcctaggttcaaatcccagttaccctgcttatcagctaaatgacttctcagtgccttggtttctccatccagaaaaatggggattataattaataattgcctacctcattgggttaagtggataaactaagaacagtggcatgcccatatgacatgctctataatttttattatcactgtgtgccaggcattattctatatgatggaggatgcagctatgaatagggcagacaaggtgcctgtctttacagagcttctattctagtgaaggagagaggctttattagcgagtaatccttgatcgagccatacctgaagctaatgccacatccttcaaccttccaatttccccaggcattaagttcttttttcttttctgcctaggctagcttgcactgagtttctctcccttgtgaaccaaagtgtcctgaccagtacagaggtctaaagcctaagctctttccagtctgccccttgcccctttccagctgaagccctattcatttgcacccaacatcatcattgcgtccagtgcctcaccacttggtgagacccttgaatattcaaaccagcgtgtaagcagagagttaggaactataaacagtaaattataacaagcatgaaatggaagcctgctgctgatcattcgcaagagagcaatcaaatctgtcttggtgcctacatgttttatggaaaacatgtctatgttttaaaagtgtttttgaaataaaaaataatttactaactaaattagatttccacatgttttatctagttaacccatcccttatcataagaaacgtaacttctttttttttttttttttttgcgatggagtctcactctatcacccaggctggagtacagtggtgtgatcccggctcactgcaacctctgcctcctgaattcaagtgatgctcctgcctcagcctctcaagtagctgtgattacaggtgtgcgtcaccatgcccagctaatttttataattgtagtagagatggggtttcaccatgttgaccaggctggtcttgaactcctgacctcaagtgatcctcctgccctggcctcccaatcatggtgggattataggcttgagcccctgtgcctggcctagaaagctaacttcttaattgcaagctactttcatcaatataatgcatttgtctcactccttaaaggactcctgtcacagtggattggcaaagaacaggtcagacacaagaggcagtggagtattagtaaaatacacgtggatttggagtcagaccttcctaggtttaaatgctggttttatcgcatactagttgtatgccttcattggggtttcccaagaatcagaccctgagacaagactccaagagtaagtcatctatgtgggaggtaaatgaaacatgacacaggaaatgaaataggtcagggaggcagccagtaaagggcatattataaaacaagttactacttgggacaataactggaaaacttgctggaaaacttgctggaaaactctaggatacagtgtagaacatctctagcaatgtgctggtagatgtttaacaaccaacactgcagaaaaatattaaaagcccagatttgtagtgtctgcccatatccatggtgtaaatcctcccaccatggctgatttcacactaccttgtccctgaacaaggacttggggaaagatgcacataccagctcttgcttcatagttatctgacctaaggggtgagggagatggggtacttatccacatacaccaactctcatcagttcctggtggagggatgctcccagggcaggtgttgattcctccaagacttccaagccatcatacgggtgggcaaagacagtacaaccagaaaaagacctcagaaagagggccaggcatggtggctcacgcctgtaatcccagcactttgggaggccgaggtgggcggatcaggaggtcaggagatcgagaccatcctggctaacacggtgaaaccccgtctctactaaaaatacaaaaaattagccgggcgtagtggcgggcgcctgtagtcccagctactcgggaggctgaggcaggagaatggcgtgaacccgggaggcggagcttgcagtgagccgagatcgcgccactgcactccagcctgggcgacagagcgagactccgtctcaaaaaaaaaaaaaaaaaaaatagctgggcatggtggtgcatgcctgtaattccagctactcaggaggctgaggcaggagaattgcttgaacctgggaggtgggagctgagatcaagccactgcacttcagcctgggcgacagagtgagactccatctcaaaaaaaaaaaagaaaagaaaaagaaaaagtcctcagaaagagaatgcaactacatttggatgggtcagtggatgcttaagaggtaaagggttagaagatacaagggaagcactgaaagcatctgttactctgtgcaattgtgaaaacgttatttcatttctctaggcttccaatattgcattggtaagatatgattcattgaatcttccaacaaatattcatggagcacttagtatatacccagcaatcttcaggccataggaaacagaatgttgagttaccatgacaaagtcactgtcacagagccagtggggaaagcagcctctaaacatgccacccagtaagtaacaaagatcatttcgggaatggtgaggactatgatgttagagagggtgatgggagggagaataatgtagcggagaggacatgaacgggaaaatctttctgaaagggtaacgtgtaaggtgaggctcaacagatgagaggaaatgtgttgtaaaaagatctgggagcagcattccaggtggaggaaactgcatgtgcaaaggcccagaggtgggaaggagcttggcttgttcatggaaaagaatggaagccagtgtgtctagatcaaaatgaatcaggcagaaggtaagcaggtaaccaggaaacagagtggaggggcaggcaggaatcagtgtctgcagtgcgtgctcagcatcataaagggtttgggtagtaacacaaccctgaagagttgttaaatgagctcccatgcatgtaactggcattactcatgttattaacctgggaaactgtcacgtctcttacttttccatttaatctcatgcccatcctctttgctcacaggagccaagaagtccagtatctcactccacatctgccttctcgtggtccaacactctgccgactcagttaatccaaagatcacttccaaacttcaggctgatggaaacctgaggagtcggatccattcataggcagccccattttcaccttcccttgtccccgaggctgccattaggttgaaaaccagtctggtactgtcagcgtgtctttgtctacagctatgaaaaagtccacatagtccagtctctacatagggcacaatgattctcctctacatctcagctaccaggtaccagcttgtcgaacacacatgcaaacattcaaacccttctcaggttcccctctagggccttcagggacttatccggcatacctgaggttggggccattgcaatctattcttagtctagtgttaagccgggtcaacagcggagatgctccttctccttgaactaattttatttccagagtttcattttccttccctgcaacattaggcatcatttggggatatttttatccatccatatggatttcaaaatctcataaagaaggagctgggagaagaatgaggaatcactgattttaatgactgtatttgttgatctcttactccattcctggacccatgttgaataacataaatatatatgcatgtacacatgctatacatggtatctggatgctatatgtgttatatataacatacatgttataatatatgttagatatgtatgtcatacatatcataatatataattatacattgtatattatatattatactattacatataatatataattatacattgtataattatactattacatagtataatatatacttatgtttatataataaaatataatgtatatgaaatatacataatacatatatgatatattatataattatatcatataatatataattatgtatatttcatataccatatattttatcatacataaatatataagttatatataatatataatgtcatatattatataaattataattattatatattatataaaacatatattatatataatacatggtttatatgttatataacatatataacaaattatatattatataacgtgttatataatataacatattatatattatataacgtgttatataacaagttatgtaatatacaatatgttattaaaaagatattacagaatatattaaataatgtatgttttatatattatattatatatgttttttatatattatataatatatatgttttatatatattatttttgttttttttgttttttgggggttttcttgagacagagtcttgctctattgtccaggctgcagtgcagtggtatgatcttggctcacagcaacctccgtctcccgggttcaagcaattctcctgtctcagcctcccaagtagctgggactacaggtgcccacaaccaggcctggctcatttttgtattttctttagaggcaaggtttcaccatgttggccggactggttctcaactcctgaccccaagtgccccgcccaccccatcctcctaaaatgccggaattacaggcatgagccactgcatccagcctatatatgttctttcatcatcaccacatcatctaattttacagatgagaacactgaggcttggggagatattaaatgtcttatccagattgcatgcatgtaagtgacataagcacgatttgaaactaagcaatccaacacgagagtcctaggtctagagcctctctgacctgctttctacctagaaattatctgagttctttatgcaaattgatgcactttttcatccctttggtctcttgaagtggcagcttttgctgcacccagttctcacaacaacttgcaaagaggatcaacacacacgactgatcacgagataaaggaagtctgaagcagtccccaccaaacatgcaaattcaatgaatgaagatccatttcttgcagctttctgctttgtataataacatttggctgtgatgatctattatgacactaatccttgcacagcccagagaagatgggcaatagttttctggatgtcagtgggactctggcacaagggccagccaattttggtgagcgcaacaggaaattctttgcaatgtccttgtgaatctgaggttacaaagactggctcaatctgtcacaggaagcatgctggaatgcctttgtccttctttctagtttttctttctttctttctaataattctcagtgtgggagaatattattctttctaataattctcggtgtgggcttacatcctttgctttgggaaaggtttctatcattagacctctcttttcccccaaccagccagctgtgaagcggttcactgcggacccaacctctggcatgactgtggatcagcagcaccaatgccatgaagactgcagacacactggagaaccaaggctaattcccttagccattgagcctccgctttccatccatgaaatgactctcaaaatgccagcttgggctattgcttgcttcagagcacctaagagcatctgaacaaaaggaatatctttttcacagatgtaaatgaggaaagcgaggattatacagtagaagaagtgctctataaggctgctgaagatcacaattttttttttttttgagacagtcttgctctgtgtcccaggctggagtgcagtggcgcgatctcggcttactgcaacctccgcctcccaggttcaaacgattctcctacctcagcctcccaagaagctgggataacaggtgtgtgccaccacacctggctaatttttgtattttttagtagaaacagaatttcatcatgttggccagacttgaggtcaggtcttgaactcctgacatcaagtgatccacccgccttggcctcccaaagtgctgggattataggtgtgagccaccgtgcccggcccgaagatcacaattcttatctaactctgctattcattggctgggccaccttgggcatgtccattagctttctggttcttaggaccctcatgtctaataacaaggtctttcctacctgccccacagggctgttgtgaggaccaaatgagatcaagaatgcaaaagctctctgtcaactgtgaaacactaccaggagtaaagattcacaaggcatgagttgccacaaggcagtatagcatggtggttaggaggttaagctcttaaaccagattacttggattccagtataaccccaggatacttaactttgttttgtggtgttgttgttttgttggtgttgttgcttggtattttgtctaattttcagaaacagggtcttgctctgttgcccaggctggagtgcagtgggcatgatcatagttcactgcagccttgaactcctgggcttaagctatcctcctgcctcagcctgtggagtagctgggactacaggtgtgcaccaccgcacctggctaatttatttaatttttgtggagacagggtcttgctttcttgcctcagcttgtctcgaactcctgacctcaagcaatcctcccatcttggcctccaaaagagctgggattataggtgtgagtcactgcgcccagccaatttaaattctttaagtctcagtttttccatttgtaaaatgggcatagtaatagtacatttgtcacagagttggtttgtgataggataaggtgatgcatgttcactagaaatgaagagagaagggttatgattcattgaaaagaaagaaaaacctaggctgggtgtagtggctcacacctgtaatcccagcactttgggaggctgaggcaggaggatgaattgaggacagaagttctagaccagactaggcaacatagtgagaccctgtttctactaaataaataaataaataagccaggcatggtggcatgaaccctgcagtccaagctactcagaaggctaaggcaggaggatcacctgagctcaggaacttgaggctgcagtgagttataattgtgccactacactccagtatgggtgacagactgagatcttgtctctataaagaaaaaaagaagaagaggaggtagaagaagaaagtctgaactactccctgcaggaagagtagacaaggtaaagagccctagaaaagattcgtccccgtgctttcctctagaatgaggactccagtaatttataccagtgctggagcacaggcttgacaatggctggagctcagcctccacagtatctgctgtgattagtgctcaaaagcataaagcataactggaactaagaagaaacaagatgctcaaggtctccccttcagccttccttccaagtaacagaatcatgatttgatgatttgaccccttcttctaccacctcaatattgaaatctgtttccaattcccattaccttagagaacaccatcagatgtccattgtatatctcagattcatttctgtccaaaaacgaatttaacttgccttccaaataattttactcctaatttttagctcactttctccatgaatatcatcgccattcacccagttacccaaaccaagagcccgaacaacatctttgagtccttctccatcacaccctacattcaaccaattgccaccttctcttttatatacctccttaagtcacggccttaatttgggaatgatcgtttctcatttggacttgacttcatggtcaaatatggcatccagagatctagccattgcatcctaattcaagaccaacaacaggaaaaatgggcaaagaaatatatggtcctcattctgagaaaatgtccatattactcttctctttgcattccttggccaaagctaattcacatggcttgggtagcttcatgagagactgggaaattagagggttttggttttgttgttgttgtttaaagcagagtctatgtcaccctaattaaaatcagtgtttcatcttttattcttcctcaaatattctgtgttaaagtcactaaagggcaccaaccaaagtaagcatcaatgagaggggataggacagagatctggcatggggtgttgaagcctagaattggtgcacgacctagttctagtcacgaaaaagcatcagacaatccccaattgagagctcttatacaacataaatggcctgtatcttcaaaagtatcaaggtcgagaaagtaacaaagagactgatgaatctgccggaataagacgtgacaattaaatgctatgataatcttgccctgcaagattataaaggacattattgggatggtcagtgaaacctgaatggggcctttggattagatggtggtaatgtatcaatgttataataatttcctgactttaatggtcgtattatgggcatataggagaaggtccttattgcaagaaacacacagtaaagtattgggaaatgattcgaggagagggaaaacttaattgtactgttcttccaactattgtctcagtttgaaatttttcccccgaaaataaggtgttatttcagagaagaaaagggaatgtagatgtttcaatatgtaaatagtagactccaccacagatggtatttaaataatgtatcagaagaggtcatcccaagggagtaatatttaaatccagagccaaagagagaaagccatccacgtgaagagcaaggagacaaagttttcaggcagaaggaacatgtgagaagtagctgaacttgttttcagagttataaccctagcaatatggtggaaaataacaaataactagcaatgtggttgaaataaacaaactgctattccttcagaaacatgagtaagcaccactgtgtgcaggaacttgcagcagtcagctagatgctgtaagacaaacaaccccaaatcccagaaagagcttatttctctgccatgcccatatagcttggctggagcagctctgctggaggttgcaggtctgaagacatgctggggcggctctgctctagatgcatctcatttttctaggaccagtgaccaactaagtcatgtttttctcatagagaaggcaaaagcacaagaaggcaaactcatcacacgagagcatttcaagcctttcataagggttatgtcctctcacatcccattagccaaagaaagttaagctcaactcaacagttgaagggtagggaagtacactatgccatctctcagggaaaaggaagtcacatagcctagctgaacatcaatgatgtaataggagagggaacaaatatttactaaacaatagtctcatctaccgtaaagctcaaatacttcacaaaagagccacccttagaaatagcttttatctcatctattttatgggtgagtggggaagaaggatgacaaagcccctttaagaattttatataccctagacacattcacttttggaggtctcaccagaaagcatttgaaacatgctacaaatttgcctgtatcctacattaaatggatttttggctctaaacattttttgagaaaattttaaaattctgctcctgaaattatctggcaataggtgatttatttaaatttagattggatgtgatttcttggtaattgtgcatattcaggaggtctagaaagtgggaaattctaactatccacatttttcagatgtaatgaaatccctaggaatgttaaatttaacaattagtgatattgacaaagcagcacaatttgtaggtaatttttttttttttttttttagaaggagtttcactcttgttgcccaggctggagtgcaatggcatgatctcggctcactgccacctccacctcccaggttcaagcaattctcctgtctcagcctcctgagtagctgggattacaggtttacaggcatgcaccaccataccaagctcattttcatatttttagtagagacagggtttcaccatgttggtcagcctggtctcgaactcctgacctcaggtgatctgcctgcctcagcctcccaaagtgctgggattacagtcgtgagccaccatgcccagcgtaggtaatttttaagatattcattaatttcaattttgtcattttctcttttgcatttttaagccaatgtgtgtgtgtgtatgtgtgtttgtgtggtgtgtttgtttgtttgtttgtttgtttgtttttggtctcaaacatttctgtagatcttgaaaaacgtataggtcccgggaagaccctatgcctaacggattaaaaatgcacatgttgcctggaatcaaagctaattattattggttgggaaatggataccctcccactccagactcctcagcacaggaaaataagagcagctaactccaacagaacccaattcatttaggaggctctctgcctctgcataagggtgaatggtttgggattgctgctcagcagagcccttcatctcattcacgaagccattcacactgtatccagtccatttgtaaggcaaataaaaatgtcgtcttccaatcttggctcatttcatcttataagaaaagtctcccgtccgatgcctagccaacatttccctgttgtgattaaagaaacagcaggtaataaaagctggactagcggttggtcctctaaggaccaaaatatggttgaagaagcaataacttaccccagtgcccccaaggcaagttgtctcaataatgtaacaaagctatacttaatggcaacagagcacgtttcactgatactacaccgtaaactgcccgctttcaattagttgcatatgtattaaagggagtcaacacatatttacagcaatcatttctatgtatacaagatgccacaaaaatgtagctttctgctccttctggtcatctggccacataggaataatcaccaaccatagatgcaattctggaaaagtcattaatgctcatctctatggttgcaagagattattgggcttctatttcatgccaaggcactttacatatgtaaataatggtgcatgctttgaatgaagtcatgtttttgtgacctacaatccccactggctgctgcagcacctggcacatattagccactcaagaaattctcgttgagtgaataaatgaaacattcaatggctctgagagcctacctttcagattatcagcaccatgaccctgcttttgagacccctactctctctcccttccctattatctcttggtgaatattggggaatggctcacctgaactgccccacgatttcatgcctctgttttcgccattacctgtcaccttacctggccacagtcattccttccaaagccactattcacatctctatcagatgctctgcagttctggggctcctgcctcttgggacaaggctagtactgtcataccaggtgtgatggttaatattgagtgtcaacttgattggatcgaagggggcaaagtattgatcctgggtgcgtctgtgaggatgttgctaaaggagatttacacttgagtcagtggactgggagaggcagacccaccctcaatctgggtgggtaccatctaatcagctgccagcatggctagaataaagcaggcagaagttggaaagaacagacttactgagtcttctggccttcatctttctcctgtgctgtatgcttcctgccctggaatattggactccaagttcttcagcttttggactcttggacttacaccagtggtttgccaggggctctcaagcctttggccacagaatgaacgctgcactgctggcttccctacttttgaggttttgggactcagactggtttccttgctcctcagcttgcagatggcctattgtgggacttcaccttgtgaccgtgtgagtcagtacccctgaataaactcccctttgtatatacatctatcctattagttctgtccctccacagaaccctgtgtaatacaccaggccagcagaagggagacatttgctttcctggacattttctgttcattttacatttgctcaatgaaaaaaatcaggttgcaatacatatataaatagaaaacacagaaagacataaatattttttaaaaagaatcagaaacatatgccccaaaatgctaatatgattacatccgggtggttaatatttattttctgtttctattctctttttgtttccccaaatttgcttgttgacagaacatgtgcattgcttttggccaataaatgtttggcttatttaaagagttatcttgatgatagccaggtgtggtggctcacacttgtaatcccagaactttgggatgccaaggtgagcagatcacctgaggtcaggagttcgagaccagcctggccaacatggtgaaaccccatctctattaaaaatacaaaaatcagtctatcttaaaaaaaaaattagctaggtgtggtggcacgtgcctgtaatcccagctactcaggaggctgagagatgagaattgcttgaacctgagtggcggaggttgcagtgagccaagatcatgccactgcactccagcctgagcaacagagcgagactctgtctcgattaaacacacaaacacacacacacacacacagttatcttgatggcagttcaggaacttgggagatgagggctgttctcctaaaaccctataagaaccctcaggtgggttatgccacccattcactaatatcccatttacgggtgaagggaaaggtggaggagaccaaccaacccaccagcagtggcctcagtctcaaataaaacttagtccctgagttagaagccaacttaaccatggagaggaaagagttcatcagatgggactaaacctgctcacttccttccaagaaccaccccaagggttcatttcccaggcaccaggagccacccagctccaacatgctgttttctgtcttctggtgacttatcacttgttgtttcttcaagaataagccttcgttgttccaagtaaacatctcaaatgcacacattcttaaagtagtaagtcatgtatccacctgtgcatccaacaaattattatgtagtgaacacccatgagggacgtgctgctgtgttcaatgctggggacaccacagggggccacccacggacttggttcctgccatcatggagctctcggtccagtggaggaattagacatgaaccaaataaaacacagtcatgaatgtaaaaccagaaactagagtaagtgctcttgaaactgccttagcaaaattatgactgagacagtgaaagagatttaacttgatcaattccatcttgcttctaacctccaagctgtccttattcattcttgggtgtaggctgacctaactttgggagaaactgagttcatggttcatagtttgtagtttaaagcaaagatgataacagccctttcccaaagcagacctccttcttgcctggggactagattgcctttgttaggactaaaatgagccacaagattagaaactatggtttaggagtcaggcggctggaggttacaagattctgaccctccctaaactgttcctaagatcagtgcttgagataatttgcagaccctgcacgtgacgggtcaggtggcaccacccagatcgatcaactggctcatctgatcttgtggccccaacccaggaactgactcagcgcaagaggacagcttcgactccctatgatttcttccctgaccaatctgcactcctggctcactggcttcaactaaccacccctaccaagctgttcttaaaaactctgctccccaaatgcttgtggagactgatttgagtgataatcaaactccagtctcccacaatgcccctctgcatgaattactctctctgtattccaatccccctgtcttgataaatcagctctgtctaggcagcgggcaaggtggacccaatgggcggtcacactctgtcgagaaggaacacagggagttgcggaaggcttccagaggaagtgcctgggctttgaagaatgagcaggcattaagtgggcaaaagagcatgtgcaagggtactgtgcaatgtgtcaccacccagggagagaggagaagtggactatgaggctggggacataaacacggtcctggccatggagggccttgtaaaccccatgaaggatgtttgctctttatcctaatatcaacatgaagtgattagaaggtagcaagcccttgattaaccaacaattctagatccttctccaaacttctcttttagggaaaggaaacctagaagtcaaaacataaggtggtgggatttcagttgaaaaggtgtccagggtcggcctcgggtcagtctatctttgggtctatcacaaacactatattaattgcccctattaatctttcattatgtgccaggcattgtgatgatgtatactttatatccattggcacatgtaagcctcaccacaagatttagggcctatcattatgcccatttcacagatgaggaaactgaggttcaggggggcttgtaacatgtcccaaatggtgtagctagtaagtggcaatgccgaggctcaaatccctccaaagattctctctccaaaggtcattttcctttccctaagccatgctggtgcatctggggtcctggaaactaggagatgattttcagaattataagacttaggtcgtgcaagcttcttaatcatcaaagaaagtctggaaagagaagaagatgtttgcaggaagctgccacagaagagaacattttagacagaggaacagcatgaagaaccgaacacacgtggcatcccctaggggccatgaatatagcagggaggcaaccacagagttgggaagatccagagagaggcgggacagatacagtgggtcctgaaagtatgttaaataaagtcacagtgacacggcaatcaggagtggcaagggagccacagacacacatgattagacacaaaaatcatgttttcaaggcacagcccacttagagatcacagcaagatgctttatccaacctccgccggcaatcagagcttgaaaaaggagcattgtcgtcaatcaacttccctttgggcaaaagacacaggcaaaggagaagatacttcacccaccttttaataaatgtgtcttgaggagagagttggcccacatagtacagtctccaagatctaagactccacatgggtagtggcaggggagacaatgggaaccaacaggacattggctggaatcacaagtcacaccttcagtaaaccagaggagtcatttctctctcccttattgactctgggccctggagaaatgccacagaaattcatgagaagaggagttgaaggtagacggcacctggacattatttctgccagcccatttgagttcatctggtaaacattttgcatttggaagttgacatcgtttaataataactgtcaatgtcaatgatcaatgccatcataatggcacaaatacccttgtgggcttggggttgggaggggtacggtggggactgacttctttgtctcctgtcctttcaatggttataaataatgatgataataatttctatttgtgtagctttgtgattgcagagagctttaggcttcctgagagctttcacctatattacctcagctgatccctctacaatgtgcagtatctattttggtcccctctgggaacctgaggcttgacaaggtcaggaaaggccacaccatggcctgttcctgaaacaggaaccacaaatgaaaatccttgcagagagtccaggcagataacataagtgaagaaagggaggaatgagaagcagtagggaatggtggggtctgtggtgaattggagtgcatgcctcattgaaagacgggggtagctgcctatcttgtatccaccaactgtctccacgtgggaacatgggcccaatgctgtcagagcttctaataaattaagaggagctaaaagccagatgctatgtcagtctcccagtttttaaatgatcgcaactgggagtcttgcaactctgtctcccaggctgtaaggcagtggcacaatcctagctcactgcagcctcgaaaccctaggctccaaagatcctcctgcctcagactaccgattagctcgaactacaggcatgtgtcaccatgcgtggctagttttcacaatgtttgtagaaatggggccatctcactatgttgcccaggctggtctcaaactcctgggctcaagcaatcctccctgctcagcttcccaattagctagaactacaggtgtgcaccaccacacctggctacaaactctccttgtcaccccctgttgataggtctctttccttcacaggctgagacaactccaattcaactctgaatccccaatacaggacctgcccagggaacagggctcagacatttatgctgggaaatactcagcttttggggctcagcgtccttttctgcaaaaagagttcccctcccaagaggaaatcccctaagcctaaggacaggaggtgatggaaagatggatggatgggcagatagatggatggaaaaaaaatggacagttggaaacagacaaacttggtggatgagcagaaataagcctcattctcgcctaacaacgggacagcctgggggaggggtgggacacaccaaggctcccagttgacccccagcaattggacaagagagtttataaaccagcattggggttttaggagcattgtaagctgcagagtgcatggggtcttcagtgggaagcatctccttccccatccctgttctctgtcctggggttgcccatcaagctaatcacatgtccacccctggggtccctctggcctctgccactcttcaccaaagtacagttaaactccaggggcaaatgatgtgttgggggtgtggcagacagggattgtgtctcagcagagagggcacagcactcacaaaatagcttcaatagttccagggtcagtagatgtgcccgaagaggaaccccacatcgcaagtggcctaagcctggggtagggtgagcactgctcactcctgcccagaggagtagctgaggggcctaagctctagctctgagcccaccagccattccatccaccacccacctgaaactgttctgttgacccacagcaattggtcctggtgccaggcacagaacagatgctcaaaagatatggttgattctgtctgggtgcagtggctcacgcctgtaaacccagcactttgcgaggctgggatgggaggattgctggaggccaggagttcaagaccagcctgggcaacatagtgagatccctatctctataaaaataaaaattagctgagcatgatggtgtgcgcctgtagttccagctactcgggagactgaggtggaaggatagtctgagccaggagttcgaggctgcagtgagctacgatcatgacactacactccagcctgggagacacagcaagaccctatttaaaaaaaaaaatggtatggttaatctgcctttactgattacaaatcaataaatttgtattatcgtaataaatctgtctttattgattacaaggcactttctcatcccccatcacctaagacaactgcataaagaccgcatgagctataaagaccatttccttgccccaggtcacacggaggaaaagagacagagccaggatttaaacccctgcccctggctttcattcctttgctgtgtccctgcagacccgaggcccacctgggtgaagaacaggtgggtggacattggcagtgttcaccaggggaagcatgccaggtgcaaggaaacatgtgagcacctgtccgtgcccaatgggtctctgtttgtctccctgcatcttcacccaaaccagcttctcacacccccacggccaccaccaccactccaggcctctacctgggccctttaatgccccttccccattcctcaagagcccactggggtcccttccctgatggcctgctggcctcctgcctccctccctgacctcagcctcctcggattttcaacagcctggggttgcaggctgagctcagcatctggcaggggcctggaagaaatgacctctagagggcccacactctctgggtgtcatattttggggctattatcacaaaataccttagactgggtaatttataaatgacagaagtgtgttgctcacagttctggaggctgggatgtcccagatcaaggcacctgcagattcagtgcctggtgaggagggctcactctgcatcataggtggtaccttgttgccgtgtccttatatggcaaaagaggcaaaggcgcttgctcaagccccttttataaaagggggcactaatcccattcatgaaggtggattcctcatgaattagtcacttcctaaggggcccctcttactactatcacattgggtattaagttccaacatatgaattcaaggggaacaatgacattcagaccatagcaccagacgtctatctggggaagcccccaaatatttgtctttttttttttttggaggcagggtctgcctctgtcattcaggctggagtgcaatggtacaatcacagctcactgcagctttgaactcctgggctcaagtgatcctcctatctcagcctccccagtagctaggaccacagatgtgcactaccacatccgactatttttttattttagtttttttgtagagacagagtctcaccatgttgcccaggctgatctcgaactcctgaccccaagcaatcctcccaccacctcagcctcccaaagtgctgggatcacgagtgtgagccatcatgcccagccagccccctcatatttgatccaggcattaagcctcctggcaagaccagcagctccctgcccctgaggcagggctgagtttcagaagctgcttttcattctcagactatgctgagcctggtactgtgcacacagcacatctgaactttgttcaacatatccctgcatcaacctggcaggacggcctcaggccagggaggaaccggggagatgatgtgggatgagaagagagatcagacagaggctgtctagacacagtttcctggcaaagtcaccaagagccctgcgagcagctgtccacacctcctggcactctctgtatctgtcccgtccctgccagctccccacccgcccagtgcttcaccagctcacccctcagacactgtccaggtgggaaccattcccctcaactccctccagaacaaccagatggcacctgccagcagccctgggagccagaatcccacccacctgacccaagggctctatctgatctcagcctaacccatgaatcaggccctttggagagccaaaggaaaattgggcttccctgccagctgactatgtgacagttcagatgtcccagagcacaggaaagaggcagagacagggtcgtgaggagcccttgcttctccttcaacatctcccataaacagctggagaggggctctcacagggtccatgggaagagaccaaggaggggcatggaggagaggggagggctgagaagaccagggtgaaatggatgaggagaaggaagcagatggcagggaccctcccatctcccacatgggcccccttaggtgctactggccttgtgcaaatttgcacactcacattcacacatttctgtctgcttctctccaatcgttcagatacctagcacacaccccagcctctagaatcaggtagtcagtctagcagagtctttagcatttgacttctgggtttaaatcctggctttagcacttcctagcttcacggccctgtttaggcagtttagatgcctccctgagcttcccaggttttggggaggaataaatggcatagcagatggggaacatctagcactgtcctgctatatcatagactgtgaaagatcactgtttttgtactattggccttgctttgtagtaattatcattaacttttttttgagataaggtctcactctgtctcccagcctagtgtgatcatagttcactgccacctcgatctcccgggcttaagtgatcctcccacctcagcctcccaagtagctgggactacaggcacacaccaccacacttggctaatctctctccttttttttttttttttttttttttttttagagaccgggtctcattatgttgcccaggctggcctcccaaagtgctagaattacaggtgtgagccactgcacacggcctactttgtaataataacaaacaatacagccgctactttttggtagtttcaaaccatgatcccagaattttttgattcatcaaaaggtagaacctatgtcatctaccgttgaatccagactgtgcgattgcttgaccaatagaatatagaagaaacgttatgcgacatccaaggctacatcataaaatgtgacagagcttccactgggttctccttgtcttagagctcagccaccatacgatgaggaagcccaagtagctgaagagaggagaggcccaaacaaaggaaccaagtcccctggaccacagcctagctgagctcccagccaaccagaaagcgccaacttagcaaccgctagaggagccatctcagaaatgaattctgcagccccctggtgagctccagctgatgccacgtggagcaggaacgaactgtcccctcaacatcctgcccaaattgtggatgtgtgagcaaaataaatgactgtcatgttttaagctactacatgttgggtggtttgttgcacagccatagacaactggatgacaaacacatatctgacgctttatccgtcattgccatgctaagctgcagatatttttgtaatctacacgtttagaccttttccagcttttagagctcacacttcccttcagtacacctgcaagctccctgaattcattttcatgtaatcctccacttttttccttcagccggttcatgttaggtttctctcatagcccctaaacacagtgctcaaataccaataacctggatcccatcttgcggctctgcaggaagctgtttttgcacaaggttcttccacatttctgggaaccaggagatgtctacttcagctacaatctctcctgctcgtcccctgtcccctcgggagggtctggctcagaacagatttcactgtgggacccaagccaacctgttagccactcctaccccaggacgggtgaaacacagtcttgcagtaacaagacttacttttgaaggatggaattacaatatggaaaaaatacaacttcacaaggtacacgttcagttcatagcagcagccaagactttgaaggaagagttcaagtcgccacaaaaacatagcagagggaatagtacggattttagagccagatagtactggagacttggagactgcagggctgggagggtcacagacagtcctgagttcaaatctccactccaccactcattgcccacgtgaacttgagcaagttatttaacctctctgagcctccatttcctcaaaggcaaattggggataataaacccagtgtttgtgaggatagataggatgcatattctgctcgtggttgtgccaaccaaggacacattcagagtaaattcaagactcttcttgaagagtcacgagcacagtggcccatggcagtaatcccagcactttgggagggtgaggcgggtggatcacttgaggtcaggagctcaagaccagcctggacaacatgttgaaaccttgtctctactaaaaatacaataaattagcagggcgtaggcatgcctgtagtcccagctactcagaagtttgaggcaggacaatcccttgaacctgagagatggaggttgcagccgctgcagtccagccagcctggatgacagagagagactgtctcaaaatacaaataaaataaaataaaaaaagaatgagactcttcctactgcaaaaactgacctctggggggtggaaacaaacaaacaaatgagcaaaaaccattgttcttgcctagctgttaaagaatattgcgttttctcataacttgacacgatacagaaacatacaatgaagaatctggtgggtattgaactgtcaattgcaaaataattattcatcactgcaggtccagcctgttctccgggaaggactgtttgaatgtcctgggcctccaagccaagctcccagagcccagaccgtctctttggctaatgctggctctatctcctgaagaaaatagtttgatgcaaggaagaactttcattatcttttgccctggagcaccagtaactgtctacaaagagcagagcaagggaagaagggcagtgagaaattaatctttgagtttcctccttggtgattcatccatttagaaatgggtagattcagagaagtgtttcttcatccggtccctctgttcccatgatctcaaaaatgaaaaggcagccaaccctgatcaccacccatcagtcagcctcttttcacaagtgggaggcatgggctgtgctggaccaagtgcaaatgcaagacatgtctctaacaggccttctggaaccaggggaagctggtggcttggatgcacccactgtgaggtagagtgttatactgcagcccccataaccctgcacttctccaagtctatgattatttgactctggaatctggtgtagcacatctgctcagttgctcagtcattacttactgagcacttacaatgtgccaggacaggcagggtataaaggattgagaattgaacaaggtagtcaaggtagtatgatccctgccctcaaagagcttgttttagtatatagggtttctcaactttggcaccattgtgggctgaataattctttgttgtggggctgtcctatgtactatatttttttttttttttgagacagagtctcgctctgtcgcccaggctggagtgcggtggcgctatctcagctcactgcaacctctgtctcccgggttcaagtgattttcctgcctcagcctcccgagtagctgagattacaggcaccaaccaccacgcctggctaatttttgtatttttagtagaaacgcggtttcaccgtgttggccagggtggtctcgaactcctgacctcaggtgatccacccacctcggcctcccaaaatattgggattatgggcatgagccaccacgcccggcccactataaaaactttagcagcatccatggcctctatccactagattccaatatcacaccctttctcccaattatgacaaccaaaaatgtctccaagcattttcaaatttcacccgagggtcaaaattcaccccaccccactcctaccattcacgattgagaacctctattccaatgaaagaagcaggcagcttagtggaaagagtgtgagcttcggagccaggtgggcctgggttctcccttccactttattagctgcgtgatctttggggaatcacttctctctcttacgcatacgtagattatttgaaaattatgggtagcaatcatatttttacaaggttgttgggtgagctaaagatcaaatgtgtaaagaactgtggcaggctgggcacggtggctcacacgtgtaatcccagcactttaggaggccaaggcgggtggatcacctgaggtcaggagttcgagaccagcctggccaacatggtgaaatcccgtctctactaaaaatacaaaaatcagccaggtgtggtgccacacgcctgtaatcccagctacccgggaggctgaggcaggagaatcgcttgaactcaggaggcagaggttgcagtgagctgagatcacgccactgcactccagcctgggtgacagagcgagacaccatctcaaaaaaacaaacaaacaaacaaacaaacaaaaaacaggggcagacactgtcaacaccaaaagtcatcctcttgtcttaattcttcttgctaacagaaccccagttctttcaagggtccctatctcagaagttgggctcagtccctagagggggtgggcatgcaaaccaggtctagttaatgagctatttgagggagggggccctctgggggtagaaggttaataaaaagtttggttattttatttttatgcttttatttttttagagacaggaccttgctctgttgcccaggctagagtacagtgccacaatcatagctcactgcagcctcgaactcctgggctaaaggaaggtggggactagaagatggataagcactccacacttgttagctatctattattgctgttagcactgtcattatcagtatttttttttttttttttgacggagtctcgctctgtcacccaggctggagtacagtggtgcactctcggctcactgcaacctccgcctcccaggttcaagcaattctcctgcctcagcctcccaagtagctgggagtacaggcgcctgccaccacgcccggctaatttttgtatttttagtagagacagggtttcaccatattggccaggctggtctcaaactcctgaccttgtgatccgcccgcctcggcctcccaaagtgctgggattacaggcatgagccaccacgcccagccctttttgctttttttttttttgaaacagggtcttgctctgtcacccaggctggagtgcagtggtgcaatcttggctcactgcaacctccacctcccaggttcaagcaattctcctgcctcagcctcttgagtagctgggagtacaggcatgtgccaccacgcccagctaatttttgcatttttagtagagatggggtttctccatgttggccaggctggtctcgaactcctgacctcaggtgatcttcccgcctcggcctcccaaagtgctggaattacaggtgtaagccaccacgcacggccctttatcagtattattattattaacttttactaaggaaagagggaggcccttggccaggccgtaggattgctggccttccagggagtgtgttacccagggaagtggcataaaattacagaattgggaagctaagaggtagctctagacatcacacctctaaactttttgatattctgttgctccatctacaaatggcatttagaatttttgttcttaaagagtcacaaatcacgtgcaggaagcttgaaaccagtcctgttaccttcctatgctctgatgccacctgggaatttgagctggtgtttcgggtaagagaacagcttataaccaggcttttcaggacaatgaagactgcctttcagtgggaagatgaacaatctgcctaagtcataagaatgatacaatggactttggggacttgggggaaagagtggaagggggtcgagggacaaaaggctacaaatatggggcagcgtatagtgttcagatgatgggtgcaccaatatctcacaaatcaccactaaagaacttactcatgtaaccaaataccacttgtaccccaataacttatgggaaaaaaatctacccaaggaataaaactaaattgagactttaaaagcgagacattaaggaagttgactcttagctgacctggacacaggcctatcatggtaagtgctgcaggtgaacaaacagcagcaatttgacccttcttccttatacatcaaattcctttttttaaaaaattatttttgagacagagtctcgctctgttgcccaggctggagtgcagtggcacgatctcggctcactgcaacctctgcctcccaggttcaagccattctcctgcctcagcctcccgagcagctgggattataggcacccaccagcacgtccggctaatttttgtatttttagtagagatggggtttcgccatgttggccaggctggtcttgaactcctgacttcaggtgatccacccactttggcctcccaaagtgctgggattagagacatgagccaccgcgcctggcccaatttcattttttttttttttagacagagacagtgtcttgctctgtcacccaggctgcaatcagtggcgtgatcatagctcactgcagcctcaaactcctgggctcaagagatcctcctgcctcagcctcctgagtagctgggactacaggtacatgccaccacgtccgactattatttttattttttgtaaagatggggtctcattatgttgcccaggctggcctcaaattcctgggctcaagccatcctcccacctcagcctcccaaagtgctgggattacagatgtgagccaccacacccagcccaaattccaattttctaaagaatctggggctctctgtgttttaagactattaggctctccccagtttcaggggatgaatcttgagcagtctgatggagggctggcaagccattgcctaaacccggcccaccacctgcttttgtacggctcaggagctggaaatggcttttacatttttaagtagttagaaaagatcaaaagtgtaataatatctcctaacacataaaaattagatgaaattcaaatctcagtctccataaataaacccattcacttatttattatcatctatagctgctttcacactgcaacagcagaacagagtggttgctacagaaactgtgtggccacaagcctgaaatatttattctctggctcttcagaggaaaagatcttaggaagccagaggttctcaaactcagtgtccatcagaaacccccggagggcacgtttaaacatagactatgggccgggcgcagtggctcacgcctgtaattctaacactttgggaggccgagagtttgagaccagagcattgtttaagccaagagtttgagaccagactggacaacatagcaagaccctgtctctacaaaaaataaaaaaaatagctgggtgtgggggtgcacacctgtagtcctggctacatgggaggctgaggcaggaggatcgctcaagcccaggagttggaggctgcaatgcgctatgatagtgtcactgtactcctgcctgggcaacagagaccccgattctagtaaataaataaataaaaacatagatcccaccccagagtttctgatttagtaggtctgaactggggtctgagaatttgcagttcttaaaattgcctagacatggcagatgctgctggcctggggatctcactttaagaagcactggtctaaggcaaccttgggaattccattcccttgccagcaactggcttagaaaagggcacgtgatacatttctgaccaatgagatgaaggagaagtcagctggcagcttctgagaaaatgagaaaatgatcataaaaagggacagatgggctgggcgtggtggctcacatctgtaaccctagtgctttgggaggttgaggcaagaggatcacttgaggcccagagttcgagaccagcctgggcaacagagggagacctcatctctagaaaaaactctaaagttagctgggtatggtagcatgcacctatagtcccagctactcaggaaactgaaggaggatcacttgagcctagaagttcaaggctgcagcgagctatgattgcaccactacactccagtctgggtgacagagcgagaccctgtctcaaaaacaagcggggaacaagtggaagaaggctctcttctctcttgtccatattatcttgagaccatgatggggtgtggctgagggcaagagccagctgctaagaatggaatagtggaaaagtggaaggaaacaaggcccaccattccacaatggagccactgaatcaattaaccacatggccccctgcagagaaacaataacttccattagcatctacaccacttccagttgggttctcagtgatttgaagccaaacacaacctacctggcaaccctacaacttcacccctcaccactgtttggacactaccaaacttaggccatgatgattaaggccaggcatgagctccaccctccctgccaccctatgaggaataaagcagatatggggaaggtgaaagggcatgatttagggatccataaagccccagattggagccttagttctacaactcaataatggtgggctagagctctatgcaccccatactctaggatggggactcatacctgcatggttgactagtgcagtcatgtctgtgcatctgagcagttattttcttctctggaccattattaaccattagagctagcatttgtccccaggtcccgggcactgtgcaagtcttcacctacattatcctactacctcataagatagtttggatgtgtgtcccctccaaacctcatgttgaaatgtgatccccaatgttggaggcggggcttggcgagaggtatttgggtggtgggagcagatccctcatgaatagcttggtgccctccctgagtaatgagtgagttctcactcttttagttcacggcgaggtctgattgttaaaaaagtgtttggcacccttcctgtctctctctcacccctcttctcaccatgtgacacacctgctcccctttcaccctccacagtgaagaaaagcttcctgaggtctcaccagaagcagatgctggcatcatgcttcttgtacagtctgcagaaccgtgagctaaacaaacctcttttcttataaattacccaccctcaagtattcctttatggcaacgcaaaacaggctaagacacctcaatggactaatacataacagccccataaggtgagtgccaccatctcccccaccttacagatcaggaaacaggggctctgaaaaactgtggctcactcaaggtcataccgcttgttaagtgcagagataggattccaactcagaggcatctggctcaagaacccacgtgtctgtgtttcaggttgcaatgctgaggttaaacaagaggatgtgtgctaggagccccagcacaccacaggggctgggaaacgttattgcatcgagtttgagtccaacacacggtctcattcctccacccaccactcagcctagaaaaagggtcggaaggttgactccactttcagaagcttgccagctccagccagtcagccagagtgaagctgacaagagcaatgagggaaatacggaaagataaatccagatgtggacaatgagaccgtgtcccctgagaactgtggtggcagagggactcaaaggtccaggcctgctcggcgtggctgcggcttgggttcctgggccacagggctgccttacctgccagtttccatgcctggctgactcccctcactgcccctctggcttccacaccagcccactgatgccaccccagagaactcggctgtttgccttgctcctctagagggcaggtggatgcggtgaaacgggcagcgattccagggccatcacaactcctggctgaaaccaaacatgacagatttaccattgggcaggctgctccatttattatttaacgctcgcaataaatatttgcatgacccagtgctggagggaacgctctgtgataactcactgcattttcctgccaaacaccagcacagtcggattccgaagctgcagcagagaatattttatgctattctaaaaatccaggtgatggccccttgttagaaaaccttttctcatccatttccatagaggaaaaaaggagcagggagaccttagctctgagaagcaactagaggaggaggaagaggaggaggaagatgctgacaggtgacatttacttagcacctactgagtgccaggccctaagctaaggacttcacactcattcattcaacacctctctctagagggtagggttgccagacttaacaagtaaaaatatacgacacccaattccattttaaatccagtgaaataaggaatgattttttaaatacaagttatgtatctgatgtaatactggaaaattattcaatgtttatctaagcttcaaatttgggtgcagtggcacgcacttatattcccagctacttggaaggctgaggcagggaaatcacttgaacccgggaggcagaagttgcagtgagccaagatcatgccactgcactccagcctgggcgacagagcgagactctgtctcaaaaaaaaaaaaaaaaaaaaaatagaacaaactgggctacaaagttttgccaggcatggtggctcacgcctgtcaccccaggactttgggaggccaaggtgggcagatcacctgagatcaggagttcgagaccaacctggccaacagggcaaaaacccatctctactaaaaatacaaacattagccaggcctggtggtgcacgtctgtaattccagctactcgggaggctgaggcatcagcatcacttgaacctgggaggcagaggttgcagtgagccaagatcatgccactgcactccagcctgggggatagagtgagactctgtctcaaaaaaaaaaaaaaaaaaaaaatgtaactgggcatcctgtttgtatctggtaacactccttaaggttggactaactatgcgaagacactgaatttaaaaggcttttcttttcatttattttttaagagacgtatctgtgtaactcaggctgcagtgcaatggctattcacagggatgatcagggctcactgcagcctcaaactcccaggcttaagagatggtcccacctcagcctcccaagcagccgggactacaagtacatgacactgcgtctggtgttcagtggtgcaatcacggctcactgcagcctcgaactcctgggctcaagcaatcctcttgcctcagccaccagagtagctagaactatgggtatacagcaccacgcctcgctatttttttttttttttttttttttttgtagagatggggtctcaatgtgttgcccaggctgatctcaaactcccggtctcaagtgatcctcctacctcagtctcccaaagcactggaattacaggcatgagccaccacgtccagcctctttttttctttaaggaggcttattttttagtgtgggttagggaagagccatgtgtgaagttgactctggagcagagatgtcaaagatgagaaagagctacccataacaaaaaaatggggaacaggattcctggcaaagaccccacaaagaccctggggctggaaaccatgcggggcattggaggagtcaagggaggtgacacttttggagctgagtaatggagaggagagtgacaggagcagactgcacagggccttggtcacaatgaaggatttggatgctattctaagttaaagggaaggcatgggaaagcttttcagctggaagtggccaaactggggaccgactctggctgtacggatttctgagcctggagatggcacaaaggacctgacattggcaggaaaagaaaagaggaggaacaagaacacaagaaattgccttaaaagggagctggtcaggtctcaccagaaaaattcacgcaataacaaaccagccgcccacaacagacatctccacattttcccagagctgtcccccagccaggcggccggagtgaggggatgccgacggtgacaatgctatcaatttccattttgcttttgccaaatacggaaaaggacacttcaaagacttttaaaaataacttccaaacaactcaagggtgaaaaaaaagaaagaggtaaaaaattacagtctgcctgcttgagaatagcgataatgaaaataagtgatagaaataagaacagctgcttttgcacacgttatgtcatctgctccttagcactctatgaagcaggcagaacaggtcatggtatccccatttcatagataaggaaactgagacccagaaacataggatacaacagagaggaaatgatcaggtgggtgagaagctatgtttgtctggccccaaagcctgggttccccaaagccctctgcaggctgatatgagcctaaccccagcccggctcctggctctcagccatctcatcctcccagcccagctatggggagcaagatacctcctaccatgtcccttgcagccttcctccctcgcctgcaggggcttcctgcctggaaagcctgttcctttgcccttcttctccagaggattcacgtacctcagcacatgttcgacgacaaagtcacagcactgcagggacacctcccctggagaggaacacgatggtagagtggaaggggcacagctttgccattagaatgcctgagttcaaatcccagctcaatcaccaactggttgggtatccttaagctcttccaaggagtgggggataatccaatccatccccacaggatcctggtggggattaaatgagatgctgtatgtaaaacatcaacacagggccaggtgccatggctcacacctgtaacaccagcacattgggaggtggaggcaggagaatcgcttgaagccaggagtttgagactaacctgggcaacatagccagacccctatctatacaataaaatgtctttttaattagctgggtgtgatagcccatgcctgtaatcccagctacttgggaagctgagacaggaagattgcttaagcccaggagttcaaagctgtagtgagctatgatcatgccactgaactccagccatggtgacagaactagaccccaactctaaaaaaataaaaaacattaaaaaaaaatcagcacagtgcctggcatacagtcagcacctaataagtagtagctgttttttgttttttgtttttttttccatctctgaaaaaaaaatcagccattttttaaaattagctgagtgtaatggtatatctctgtaatcccagctacttgggaagctgaagcagggggactgcttgaccccaggagtttgaagcttcagcgagctatgattgtgccactgaactccagccatggtgacagaacaagacccaatccctgaaaataaataaatcaattggcacagtgcctggcatatagtcagcacctaataagtagtagctgttagaataattacaaaaggccaggcgtggtggctcacacctgtaatcccaacactttcagaggccaaggagggtggatggcctgaggtcaggagtttaagaccagcatggccaacacagtgaaaccccatctctgctaaaaatacacacacacgcaaaacaaattactgggcatggtggcacatgcctgtagttagtctcagcttcttgagaggctgaggcaagaaaatcacttgaacccaggatgcagagattgcagtgagccaagatagtaccactgcactccagcctgggtgatagagcaagactttgtctcaaaacaaacaaacaaacaaaaacaaaaaaaacactcaaatcatgggattgagtgttcaatcattcaatcaatttttattgaatgcctactacatgctaggtacttagggatataacaggaaataagacatacgtgattctaccttaatgaaacttagaagaaggaatatacttatggtatagtgaaagaaacatatttattagaaatcaaacataaaaagcataaaaagtgttgaagagtgctctaaaagaacagaggtttctgtgaatcatctactttatttatttatttatttatttatttatttatttatttattttgagacagagttttgctctgtcacccaggctggagtgcagtggcgtgatctcagctcactgcaacctccgcctcccaggttcaagcgattctcctgcctcagcctcccaagtagctgggattacaggcacccgccaacatgcctggcttatttttgtatttttagtagacacggggttttactatgttggccaggctggacttgaactcctgatgtcaggtgatctgcctgcctcagcctcccaaagtgctgggattacaggcgtgagccactgcacccagcccggaatcatctactttagactgaggcatctgagacgcgctcaaaggacatttcagtggagaaccatgggtgtgaaggagggagtcacacggagactgggaagggacggacctttgtaggacagacggcaacacgtgcaaagcttgtgctgggaggtgaagggagaacaactcgctggaggaagcaaggaagaggagatttagttagagcagacagccaggatcagagcatgcagggtctgatcatttatttccaagttattctgaaatcaaagagaagcaggcttttaagctaagaatgcagcacatcggctggcatagaataagagttcaaaaaaagtgtaagctcccttccctatcctgaaacaaccaaagtaaataaaaatggcccctctgttttgaattatttatttatttgtgctttcaaactgttttcttaaaaaaaaaaaaaactacagagtagtgagtgggggcgggggggtaaggggtggaatactcaaaacgtgttcaaaatcaaacgagccagaaactcctcgctggaaattttctctctagatctctgcaggaatcagtggaaccatgagagacagagtcgaaagcagcagagcctggaattatttctctaagcaagacccagacgccacgcaggtagtgaaattgctcctgccccacctccatccttgctgcctatctgagaacagagtctgccaacccctcctgatgagagactgacccctcatagccactgcaggctggaagccataagcttaaaccacttccataccatgaaagcaaaatgtatggttggcaaaaagcaaaaaaaaaaaaaaaaaacaaaaaactggttactggcgagtgcagaatcacagtctgggtcgatgacaaattatccagcatgaatcttggtgtgacttaggcccttcttagtcctctaaaattcatcacattttgtttattcgttcactacccacttacagtagatgccaagaaatatatataacaagattatagatataaatttaaaattaggactaaagaaagataatctagaataagaggtaaaagcagaacagagcaggatggaaggtagaataaagatatacaggccagaaggccagttactaaactggatttgagaacatggcgctgagttccctggtggccaagtcaaaaagggcagttggagatgttctcatggtccacaaaaagaaacacacttaactttgcagaacaagcactgtcctgccgtgtgacctcagataagtgatttaacctacttagactcagctgcctcattgccaaaaagttagtgaaaactattgaatgtttaggtaaaaagttgtaataaaaaacaagaatgggaaaggattccctatttaaaatggtgttgggaaaactggctagccatatgcagaaaactgaaactgggccccttccttacacctgatacaaaaattaactcaagattgattaaagtcttaaatgttagacctaaaaccataaaaacccaagaagaaaacctaggcaataccattcaggacataggcatgggcaaaggcttcatgactgaaacaccaaaagcaatggcaacaaaagccaaaattgacaaatgggatctaattaaactaaagagcttctgcacagcaaaacaaactatcatcagagtgaacaggcaacttacagaatgggagaaaagttttgcaatctatccatcgggctaatatccagaatccacaaggaacttaaacatatttacaagaaaaaaacaaccccatccaaaagtggccggaggatatgaacagacacttctcaaaagaagacatttatgtggccaacaaacatgtgaagaaaagctcatcatcactggtcattagagaaatgcaaatcattgtcagagtgctcagagagggcatgttccctgggtcttggtggatttagaggtcaagggaccatttctggaagctcactgtgtgccagggcagcttatatcagagctccgctctttttctttctttttttttttttaagacagagtctcactgttgcccaggctggagtgcagtggcaccatttcggctcactgcaacctccacctcccgggtccaagagattctcctgcctcagcctcctgagtagctgggactacaggcatgcaccaccaccacacccggctaatttttgtatttttagtagagacggggtttcaccatgttagcaaggctggtctcgaactcctgacctcaggtgatccacctgccttggcctctgaaagtgctgagattacaggcatgagccactgcgcttggccagagatctgctctggaagaccccccaggccggagggcactgccacaagcagacagtatggcgagggtccctatggccacctggcaggcgaggtggattctggagggaggtggcctgggagcaggctgaggatggggtgagggcatttgagcagcagagtgtctgcgtgaccgggcataactggagggacagtaaatgactcttgtgtgagaggatgagggaggggtgagaggggctgactacccccaggacttggggtgcagtgagactccttagctttatccagactcatgggagccatggaggtttgaggcagaggcgtgggctgctgggagagtgaggactcaccatccagagaggaaggtgaagctttcaactctaaatgccgttttattttcgtgtgttttttttttttttttttttgagacagagtttcactcttattgcccaggctggagtgtgatagcacgagctcggctcactgcaacctctgcctcccgggttcaagcgattctcctgcctcaccctcccaagtagctgggattacaggcatgcgccaccatgcgtggctaattttatatttttagtagaaacagggtttctccgtgttggtcaggctggtctggaactcctgacttcaggtgatccgcccgccttggcctcccaaagtgctgggattacaggcatgagccactgtgcccggccccaaatgtgttttacattttcttcctatttgattcatctttgtcgtgcaacataaatatgctacttttccactgataaaaagacaaaatgaaatttaaaattggcctggacttctcaaaaaagtcagtgtgatgaaaacatgttctagataaaacagaaatgagactgcgcatggtggctcatgcctggaatcccagtgccttgggaggccaaggaaggagaatcacttgaggccaggagtttgtgaccagcctgggcaacatagtgagaccgcagatctactaaaaatttaaaaattagctgggcatggtggtgcgtgcccgtatgtctggaggctgaggcaggaggatcacttgagcccaggatttggaggctgcagtgagctatgattgtgccactgcactccagtgtgggtgacagagtgagaccctgtctctatttaaaaaaagagagacaagatgatcaggatgagcgcagtggctcacgcctataatcccagcactttgggaggccaaagcaggtggatcacatgaggtcaggagtttgagaccggcccagcctagatggtgaaaccccgtttctactagaaatacaaaaatcagctgggtgtggtggggcacgcctgtgatcccagctactcgggagactgaggctggacaattgcttgaacctgggaggcagaagttgctgtgagcaagatgacaccactgtgctccagcctgggcaacaggaatgagacactgtctcaaaaaaaaaaaaaaaaaaaaaagggatgatcaaacacaatgcatcaacctcccggagccgtataaaccctaaacctaaaccaggaagcaggcaagcctgtgtgtgagtttccactctattgctggtaccactcggctctggcaacccggaaggccaccttcccctgttgttactgtgtaaggaggaaggagcactggtttgcaagtcagaagcctgggttgaagcctctgcttgagttcctgctggctgtgggaatgtggggttacctttcccggctggcctcgtttcctacatgtccaatgcaggggttccagtcacatgcattgggcaccattacatgtccaagctgtgccaggatctagaaaaatggctgggctcaggccaaggggccttcctgtctggcagtgaaaataagaggagataccaagggccctgagcctgagtctggaggaaaagtcatgagcacagggcagtgccagggcctgggagctgccacagaggagcccaccttggtgacagacacctgtaggctcatatgatgccgagtgcccaacacagggaactggacaaaggtttcatgcacgactcttttccctccttggctaccttgaggaccttgattataatagttagccttttttttttttctttttttgagactcttgctctgtcgcccaggttggaatgcagtggcaaaatcttggctcactgcaatcttcgcctctcaggttcaagtgactctccttcctcagcctccctagtagctgggattacaggcgtgcaccactatgctcggctaatttttgtatttttactacagatggggtttcaccatgttggccaggctgatcttgaactgctgacctcaggtgatctgcccgcctgggcctcccaaaatcttgggattacaggtgtaagccactgagcccagccggattataatagccttttcatgcaccaggggctttatactcattatctcatttcattcatatgagttgaagtcagcttatcccccatttcacagatgaggaaaccaaggcccagagaggttaggaatttgtccaaggtcacacagccaggaagtaggattcaaacccagacagccaggctgtaatacctaggctcttctcaggctcatgcccttcccaggggtctgggaagccctgacctgcagcctgtcacctttgtttaccccccagcctccaggatattacgtgtgcaccggcgtgggatcctggaactggcaggaattgtgggttgtgttggtccctgaactcccatcgcctatgtgaaatatggttgcttttgtggcttgggaggccatggccagccccgcgatgccattgactggtgagtgcatgcctgggaccaggccacaaaatccctcacactctggggtagtcaaggcttatgaggaagtacccaaaactgaagctggggtttggtccagggagatcccagtgtgcagtactactttgcaggcaggcagaggcctcttggataacatggccagtgaagccagatcttggtactagctgtgccttaccctggccatgggctgaaaacgttgccttaaaaaattggccaggagcgctggctcactcctgtaatcccagcactttgggaggccgaggcgggcagatcacttgaggtcaggagttcaagaccagcctggccaatatggtgaaaccccatctctactaaaaatgcaaaaattagctgtgtgtggtggcaggcatctgtaatctcagctactcgggagactgaggcaggagaattgcttgaacccgggaggcagagtttgcagtgagttgagattgcaccgctgtattccaacctggacaacagtgccaaaccctgtctcaaaagaaaaaaaaaaataatataaagtgaccaggtgtgttgactcatgcctgtaatcccaccactttgggtcgaggcaggaggatcactggagcccaggagtttgaaacgagcctaggcaacagagtgagaccctgtctctatattaaacacacacacacacgcacacacacacacacacacacatacaaaggcagccagactatgcactaggaactgccctgggaatccctttgtgttctcacaacaatcccatttcacatgaagaaacctaggcacagaaatattcagtaacgtgtccaggtgcggtggctcacgcctgtaatcccagtactttgggaggctgaggcaggcagatcacgaggtcaggagttcgagaccatcctggccaacatggtgaaaccccgtctctactaaaaatacaaaaattagctgtgtgtggtggcaggtgcctgtaattccagctactcaggaagctgaggcaggagaattgcttgaacccgggaggcagaggttgcaatgagccgagatcacaccactgcactccaacctgggtgacagagcaaaactccgtctgaaaaaaaaaaaaaagaaatattaagtaacttgtctgaggccacatagttaccaagacgtgggagctgggacttgaacccaggcagtctggctggattcatgcctgcagcctctgcactcctgctacttactgtgtgagaagcgtctgttctgtggaaggttgtgggctgagatctttccatgacttccactcatttacccccaaggctgttcttaaagacgggcatgacagttatgcccattttacagatggggccctgaggctcacaagggcacgccactcacccatttccacaaagctatagttagttagcagagggcagaattcggccgcctctcccctagcttgtaggctgtgattgacacagaggtttttttgttgtcgttgctgttgtttgttcctttttcttttttttgagacagggtcttgctctgtcatcccggctggagcgcagtggtgcgatgtcagctcactgcaaattctgcctccaagatgcaaatgattctcgtgcctcagcctcccaagtagctagaattacaggtgtgcactaccacgcccagctgttttttgtagagatggggttagtagagatttgtttaatagagacgggtttcaccatggtctctactaaaccctgtctctactaaaaatacaaaaattacccaggcgtggtggcacatgcctgtagtcccaggtactcaagaggctgaggcaggggaatcacttgaacctgggaggtggaggttgcagtgacccaaaatcatgcactctagcctggggtctcgcttttgcccaggttagagtgcagtggcacaatcatagtggctcactgcagcctcaaactcctgggctgaagggaatcctcccacctcagcctcccaagtagctaggactataggcatgtgccatcatggcgagttaattttttgtgtgtttttattgtctcgagacagagtcttgctctgttgctcaggctggactgcaatggcgtgatcctggctcaccgcaacctccacctcctgggttcaagcaattctcctacctcagcctcccgagtagctgggattacaggtgcgtgccaccatgcctggctaatcttgtatttttagtagagacagggtttcgccatgttggtcaggctgctctcgaactcctgacctcgtgatccacctgcctcggcctctcaaagtgttgggattacaggcatgagccactgagcctggcctggtgagctaatttttaaatttgttatagagacaagagtctctcttatgttgcccaggctggtctcgaccccctggcctcaagtgatcctcccacctcagcctcccaaagtgctgggattacagatgggtgtcaccgcacctggcctctgaggaggatttcattataaacctgccctgaagggagggaatccaattttacgagagggtgtagcctggtgaggcctggatgacctccggaggcaggggcttgtgcctgggctgaggcctaagggacaatgggcagacatgaagttgccccaggcagagggtacagtgtgggcaaagtcaggaagtggcagggcttggatcactccaggaagagagaggagtcatgtgtcacaggagctcaagacccagagagggaggcaggcaggcaggcagggaccaagcttgggcacagccaggaaggcagagggcatggtggggccaatggaatcattacccaagacggggattttcagggaaacagcttagataaggccaggcgtacagtagctcccacctgtaatcccagcatttgtggaggctgaggtaggaggactgcttgagcctgggagttcgagaccagcctaggcaacatagtgagaccccatatccataaaaaatttaaaaaaggagtctgtgttcctgtagtagcagacttgggaggttgaggtggcagtatcacttgagcccgggagttcaaggctaaagtgagctgattgagccactgcactccagcctgagcaacagagagatacgctgtctcaaaggaaatacaaattaaaaaaccagccaggcatgctggcgtgtgcctgtagtctcagctacttgggacactgaagtgggaggatcgcttgagcccaggagttcaaggctgccgtgagctatgattgtgcctctgcagtccagcctgggcgacagagaaagaccctgtctcttaaaaaaaaaaaaaaaaaaatcttagataagaggatgctgtgcctccctgggggtcttcagtcacccatagtcctggcaagagaggagggccaggagagagcttcacccacctgctgtcctgcccatgtgacatccgcaggtgctgccatggccacgactgttgttacactcgagctgaggaggccggctgcagccccaagacagagcgctactcctggcagtgcgtcaatcagagcgtcctgtgcggtgagtccccagcagcaccatgccacccaccccgagtatcccctgggcaccctggcatagccagatgacttccgtgcccctgttgcaataaccactgcttccaagtctctatagaccaccccttgggtatatctaatgtaagtgatatttattttatttattttttgagtcagtctcgctctgtcacccaggctagagtgtgctgatgtgatctcggctcactacaacctctgcctcctgggttcaagcgattctcatgcctcagcctcccaagtggctgggactacaggcatgcaccatcacgcccagctaatttttgtattttttcagtagaggtggggtttcaccaagttggccgggctggtctcaaactccccacctcaagtgctctgcccgcctcggcctcccaaagtgctgggattacaggcatgagccgtggtgtctggccctaatgtgagtgatctttaacactgagcacttgaaaaagaaaaccctgaagaaacctaattctttgatgtctggatgacaaggaagaagatagaaatggcatcagataataaacagtgtaaatgtttatcagaaagaggctggtggtcgggacaagtaggaggattgcttgagtccaggagtgcatctctacaaaaaagttaaaggattttttaacattggccaggcgtggtggcacacatctgtgatcccagctacttgggaggctggggcaggaggattgcttgaagcccaggaggttgaggctgcagtgagctgtgatcgagccactgcactccagcctgggtgacagagcaaactccagtctcaaaaaaaaaacaaataataatattttacataaccaaccacttctaaagattaaaaaaacccctatgattaaaaacctcaggtccctcaggcaatcataccagatattgaaacaaagcaataacataaggactgcagtattcattttatttttatattatttatttattcttccttagtttcttgagattatcatccgctgagggtggaaggggagtgagcagacacacttgggaggtgtcttgagattatcatccgctgagggtggagctgagggtggaaggggagtgagcagacactcgggaggtgtcttgagattatcatccgctgagggtggaaggggatagagcagacactccgcaggtgtcttgagattatcatccgctgagggtagagctgagggtggaaggggagtgagcagacactcgggaggtgtcttgaggctcagggagttatcaattatagaatgttgttgagttggaggaggtggctggtggcccatcctgttttttaaagtttcagctgtgaggtagggccagtagggcaatcctgaagaatgacgatgctccgctgccgccattctgacctgtagggccaaaggagggaatgttttcacacatattcatttgatggacaaaattaccgccaccaacacagtctgcaccttctgttgctggtgatagatttttgcacctttccatcctccaggtttcaaaatagcagtgtcagtgtcataatatcacccttccactgagtactgccgacagctggggggtaaagaaaagtcattgggacacactgttgtctccacatgccactgtgtctgtctgcaaatgtaggcaggctggggtcctgccccagggaagacagagtcataacagagtaataaagaagcatgtttgagacacaggagtgtctatgtctatcctcattcctccctcacagccatcaccagagcatgtttcttgcaccaggtcaatagacagtaagagacagtaagagaggcatgaaaagcccattgtccacacatgttgcagcttctttttggagaatgttttccaggccttttatgttctgtctctgattctcagaactctgcaaggtcagtgtgaccaccctgctccaaatctaagaaaacagaggtttccagaggaaggagaaattgtgcccagggtcacacagcttgcaagaggcagagtggaagttgattccagctctgcctgcaggaccctctcatttcccctctgtttcccttcttgacaaaggatcttcttcactctggaggtgccacccatgagaacaaagagctctggagagatgtggattcctgaagagctgcaggggaactgggagagggttttctgacagaacaatcttacctcaagaagtcagttaggcatggctgtaatatttcttttcactcccaggtaataccaaattgtaagtgcactaggacctaaagaatacttttgtccatggaaaaatgaggtgggaattctaaacaaagcaagttttaaaactgtgtttcacttcaagtgtacaagtcccatcgcgtgtaatcataggactcggcagcttttgaaggtacagaggccacacaagaaccagcttagctgagcatcatttaaggccttcatttggaattgtccctgtgggtaataagttacattcactcttcactaatttacagtcagggcccatttgctattacaaatacggaacctctgacacttagaatattagatgggggccccactgggtggggatgaaggtgtttttgcgcaacacggttaccaacagggatgggactgtgatgcttgtaggcagccttcctctctgccatctccctctgcagggcttgagcacagagccgtagggagaaaaatgtatccatgtcctgacctggcagactatgtccaaaagcaaggaaaacaagcaaacttacccggttgcaaagaggctttcttgcagaaggggtgatctgaaaaagccaacacatgagaaattgaatgttgagagagtctaagggccgtggcatcatctgcatcagcactgaactatcctgcaactgcggggaggaagctccttactttgcatctgtagtagtcctctgcccgccgccgcaacgcttgcgcacgttgaaacatttccctatggattacaatcactttcatcagataaagcaccactttcaggatgattttaaataatctgccatgtttctgttatcctcacaactgtacccttacacaatctatctctacctagaaaacgtatttcagatggctgtaagagtacagtctgagccggtcacggtggctgacgcctgtaatcccagcactctgggagggcgaggcggatggatcacgaggtcaggagattgagaccatcctggctaatacggtgaaaccccgtctctactaaaaatacaaaaaattaggcgggggtggtggcaggcacctgtaatcccagctactcaggaggctgaggcaggggaatcacttgaacctgggaggcagaggttgcaatgagccaagatcacgtcattgcactccagcctgggtgacacagcgagactccatctcagaaaaacaaaaacaaaaacaaaaacaaaaaaaactgtacagtctgatccaaactgttgctgtattgattcctcctcttgcttactgcctgctgacttctgagatgatagcttccttccccattctcagtatatccctaattcatccttcattgagcatcttttatcataaagctgtattctctttgtattaatatctttaccgtgtttcacagggcagaaacagctgggcttataaacaggcatagtccttttgaaggatgtggttgatcctacaacaacacactttcctaaggatgacaacaactcaccccacccctagaatggctggtatgaaccgagtttccacacagtctagctggcaatggggtcaggagccgttttgctacttcacatcttttggtcactggtaaatattaaggtactttgttttctgttttgtgaactctctctctctctcacgatatgtcttctgaccatttgtttctatttctgcatttactgggtctaaacattgtacaaaggttaaaaacaacactccaatgggcgtttcccaagagggtggggttcagtttctgaactcacatgtaggtgtgtatttctttcatatccaatttcccgttttcctctgcctctgacacctgcctctccttttctccgtgctcacgttctttcatgcttagtttcctcagactagaagggagagaaatgcacacacatgatccaccagcccgtgtgggattccctctgcccttctggcatctgaaggctgattcaaagatcccccctgcaaccttcccacaaatgaaccaactgattctcacaagcaaagggagaatggacacctcccattgagggacaaaaaaaaaatcacactctggcctgctggcaagtcacctgtcatttccagctcatcttcatagttccatagttagtcctattctttagtaaatataaagactattaaaagcttctatgaggtgcactatgtgtgtctctggggtcagtcttgtgcttgacacagcgaaagctcattttagttcagtgtgaaaaaccagacctcaccaattcatcacaactaactccatcggaggcagaggattgctcctcatctgactcctcctgtgtgagacctgattctcagtcagaggctgatgccggaactgagaccatcagccatagagagatccttccagaatatggtgtcattaaccccgcagttcactactgcactttgccatgattcaggactggaactcttgtcatcgactttaaagatcctgaaaaggcaatctgaatgctgggcgcatctattgaattagaaatgatcggaatggctcctaagtcagggtgttatgtcctgaaaataggtgacaactgcaaaccatccaccctggtgttgactgactttaacaaggttcagttcacagagattgagggcagaaaaaggaaacggcctcaaaagggtaagtttgctgtgttgccctcacaccacttgattcatggtcctgatcctaaggatctcacctgatacttggttttataggaaggatgtgtaaaattcccagaatgctaggaaacagggatgaaaacacttcaaagagaaagttaatgaacttgtttctgaccacagggcatccttcagcacatgctgtctggagtggcctcaaacaaggtgtgtgtggtgaggtgctgacaatgcaatgggagcagggtcctgtccccacgctaaagaagctcacagtttaatgcaaatgagaagccagtgaggacagcactactcctgctgtgcacttgggaactagaaacacaaaacctgactctggagggaagctaaggaagcattctactcttgagttgacataagtgcatctgaagcttctgatctccgatgagaacaatgggggacaccaaacagaatataaaacccatgactgaatacatcaaattgctcacatggcagtaaacagacatgaggtgaagatggagaagaaggaaacccaggacgaaagtcagcctcgcatttggaacccatttccctgagtttcattgctgaattccagaaggaactactgagatgcaaagaagcacagcagcttttgcacacatgtgtggggttagatggaaaacaagtggattgagggtctgccaatgaaagcgacccatactgaagtccactggctctggttgagacccagaagagtcatgcatcagaatagaggtggacaggaaataccctggcctttgtagggactgagcctgcactgacgacctcaattgcagcctgtatggaggacccctgaccatcccccagaagtagactcccatctcttctgcagcaagataacatgctactaggcctcaattcattgctaaatattttttaacaagtatctcacatttaacaaaaaaagatcagtcatatggcagcaaaatacaatgtaatatgaccaaaacatgaaagactgtgaaaatgaatctggaggtgacccgagcattgaattcaacaatccaggctgggtgcggtggctcacaccgggaggctgaggtaggcagatcacctgaggtcaggagttcaagactagcctggccaacatggtgaacccgtctctactaaaaatacaaaaattgggctgggcacggtggctcacgcctgtaatcccagcacattgggaggccgaggtgtgcggatcatgatgtcaggagttctagaccagcttggccaatatggtgaaaccccgcctctactaaaaacacaaaaattatccgggcatggtggcatatgcctgtagtcccagctactcaagaggctgagggataagaatcgtttgaacctgggaggcggaagttgcagtgagccaagatcttgccactgcactctagcctgggtgacagagtgagactctgtctcaaaaaaaaaaaaaaaaaaaaaaaaaaaattggccaaatgtggtggcacactcctgtaatccaagctactcgggaagctgaggcagaattgcttcaaactgggaggcagaggttgcagtgagccaagattgcaccacagcactccagcctgggcgacagagcgagactctatctcaaaatttaaaaaaaaaaaaaaaaggctgggtgtggtggctcacgcctctaatcccagcactttgggaggctgaggcgggtggattacctgaggtcagaagttcgagaccagcctggacaacatggtgaaaccccatctctagtaaaaatacaaaaattagctgggcgtggtggtgggcacctgtaatcccagctacttgggaggctgaggcaggagaattgcttgaacccaaaaggcagtgagctgagattgtgccattgcactacagcctgggcaacaagagcaaagccccatctcaggaaaaaaaaaaaaaaaaaaaagagagagaaaggaaaaccaatgccagtactagcaactcctcttcccctgaaaaaatgacaaacaagaatgtaggaagggaaaggaattatacagcttaaactaatgaagcagaaaggacaaactcaattttgaacccactgaatttgccacaaatattgtagaaaatattctcaaggactttacagttgtctactttgattggcacatggttcatacaacagtatttgtgtcaaggcacatcttactgttctttggcggtcttcctctttccattgattttgtcatgacggttgacttttgttgtcaccttcatcttacagattttagctcgaactttggtttccacctgtctccataaagtaaagatgtcttccaggacaattttaattcctggaaaggaagaaactcttttctttgtgtgcatacaaacggacctcagcccttggtgagagtgaggagaggagaaggtgagaaacctgagggcaagaagctgttctttccctttccagggcaaactcatttccacactatggggactccaacagagccataccttcctgtctacggcggttggacctcctggctctctgctgtacatccgtggatccatcatgtccattttgagacgggaagatagtcttcaggaaagacacctaggaaataataatataagaatgacggctgggcacggtggctcatgcgtataatcccagtactttgggaggccgaggcagggtggatcacggggtcaggagttcaagaccagcctggccaagatggtgaaaccccgtctctactaaaaatacaaaaattagccgggcatggcagtgggcgcctgtaatccgagctactcgggaggctgaggcagagaaccatttgaagctgggaggcagagtttgcagtgagccgagatcacaccactgcactccagcctgagcgacagaatgagactctgtcacacacacacacacacacacacacacacacacacacacacacacacacacaaagaatgacatgaggctggcacggtggctcactcctgtaatcccagcactttgggaggccgaggcaggcggatcacctgaggtcgggagtttgagaccagcctcaccaacatggagaaacgctgtctctgctaaaaatacaaaattagccaggcatggtggtgcatgcctgtaatcccagctagtcgggaggctggggcaggagaatcacttgaacccagcaggaaaagattgtggtgagctgagattgtgccattgcactccaacctgggcaacaaaattgaaactctgtctcaaaaaaaaaaaaaaaaaaaataggccaggtgcggtagctcacgcctgtaatcccagcactttgggaggccgaggcgggtgaatcacaaggtcaagagatggagaccatcctgggcaacatggtgaaaccccgtctctactaaaaatacaaaaattagctgagcatggtggcgcacgcctgtagtcccagctactcgggaggctgaggcaggagaactgcttgaacccaggaggcagagggtgcagtgagccaagatcccaccactgcactccagcctggtgacagagtgagactccgtctcaaaaaaaaaaaaaaaaaaaaaaatgacatgaatatacttcacacaactgaactgtacacttcaacacggttagatggtaattatcatcttgtaagtattttaccacaggttaacatgtttcacaacttgaaaaggaagtaattaattaccttcagctctctgagttctagaatttgtaacatttcaccccctgctccttcctgatctgcactggagcatctttcttctgtccctgctctactcagagttcactttcccttccctcacatcagcttcgttgaggctggtttgaacttaacgcaaaacattctcactaatgactgaattcccgccaagatttccatattatcacagtatgcttttaatcttctaagatattaaatatttgttctcatcatagctaaaatgcaatgcaaatcccatctcagatgtgggtcagatacctatgaatctcctgaggtagtcattgaaatgacttttttcttgagacggagtgtcactcaaccatgctgaagtgcagtggcgctaccttggctcacggcaacctccacctcccagattcaagcgattcttgtgcctcggcctcccaagtagctgggattacaggtgcctgctaccatgcctggctaatttttgtctttttagtagagatggggtttcactatgttggcccatctggtcttgaactcctgacctcaagtgatccacctgcctcagcctcccaaagtgctgggattacaggcatgagccaccacacctggcctgaaataatatctttcaaattctttgtagaatttgttttttcctgatttctgcacataggatgaaaaaaaaatcatgtactaggatttcgagagaagcaatgggtaatctaaaaagatgaaaagagaaaccacgtctatcccacagctactgctagatttcataggaaaggtagctggcccagtttggagctaggagaaatgtcaaacacatgaagaaatgagaagcaaagaaatgccatcacacatgaatgcttcatggcacccatgatgtccctgcttaggaggtaatggtatagatgactagatgacaaggacaaagatgagaggtgcaaagttgtccaagtccaatagctcaactgaactttcctaatggaattgttaaaaagtggtaaatttaaaaacttcccctggctcacgtggtggctcacgcttgtaatcccagcactttgggaggctgaggcgggtggatcatttgaggtcgggttttgagactagcctggccaacatggtaaaaccccgactctactaaaaatacacaaattagctgggcatggtggtgggcacctgtaatcccagctacttgagaggctgaggcaggggaatcacttgaagccaggaggtggaggttgcagtgagccgagatcacaccattatactccagcctgggcaacagagggagactcgtcttgggggtgagaaaagaaaaaaaaaaagcttcctccaatttataccgaaaattctctgttcaggactaagtggcatagagaatgttaaatgtgcctagatatcttcataactcatatattttctgttttctacatatcttgaaaggcagtgccaaatgacgtgtaattatctaggcggtaaaactgaaacatacttcctcttcccttgaatatcaaaaagcattgtggtattagtacttttatcttggatcattgttcagaaggaggttcagcccccagacaaccacatttttactgtcatgaatggcaagacaaaatgtagagctcaacttacccaaaggataaaaggctcaaaagacaaattatggcacaacttagcagccaaattcttaccaagtacagacttttgacatactgatctctctccagttgcaagtgggaacatgcactttgaatgatgtcattcaaaattaccctgcccagacacacttttcattgattctcttggagggcagttctaagagattctctggggctttctctgcatcatgagacgcagtgcagttctgcccttcaccttccggcagtttgtcacctcgtccctatgacctccgaggaactttgtctcaggccaactgtttgttccttgggctctttcatttcccctaaaaatcatttgctgcccctctaaatggcctacatctccatctatctccctctcccctcagaagagggtgctctttaagcatcaaccatccagcccttctagcagtctcatttttcagctggttcccatgtttatgtctgttctatgtttttcttttcctgttaagctgtctgttgtcagctcatttctgcagtgaatcttcagagaggagattggaagctttccttccacccatacgatagaactataaagcagaagagtttagaaagactttcccatttaagtgacgaaacctcatactccatttgtgacaaatagcacaaaggttaaaaaaacttatttttgaccaaaagctctgttgacattctattaaacaccgacctatttaattttcataatgtaaatggcagatattttcataattcttatgctaataaatcatttccctgattttttgggtaaaaccacatattcacaatgaagtccagaaacgtgaattgtttcatataatttactcttatttgtgattacaagtatacctctacagaaagttagtatactcacacaaaggtaacttgtgcagagggagatggcaaatttataacttctcagaaacacagtaatgataagtaaccaaggacttccaccaaagtcagtcccacgatgacgatggtcagccagagtattgataacctggaataataatagttgaaataatgaaaaggtcaatgacactgacaatatttcactcagaaagaatcatccttagaaaccgtcaacctcctccaaaaggtaaccacatccctcagatatcaccatgggattccactgctacaaaaaagaacagaagttagagaagtctcatgtttttcagatggctggtagtgtttttaggcattgcaaatgtggggtgttgtcattcttggtataaagcagggatatccaatcttttgacttccctgcctatattaaaagaagcaaagttgtcttgagccacacataacatacactaacaatagctgatgatctaaaaaaaaaaactttttttcttttttttttttgagacagagttccgctccactcagtcgcccaggctggagtgcagtggtgcaatcttggctcactgcaacctccagctcctgggctcaagccattctcctgcctcagcctcccgagcagctgagattaccggtctctgccaccatgcccgactaatttttgtatttttagtagagatgaggtttcaccatgttggccagtctggccttgaactcctgacaggagatctgcctgcctcggcctcccaaagtgctgggattacaggtgtgagccaccgtgcccggccattttttttgtttttgtttgttgtttgtttttgagatggggtctcactctgtcacccaggctggagtgcagtggtgtgctctcggctcactgcaacctctgcctctcaggttcaagtgattctcctgcctcagcctcctgagtagctgggagtacaggtgcctgacagtgcactcagcaaatttttgtattttttgtggagatggggttttgccatgttggccagggtggtctcgaactcctgacctcaggtaatctgcccgcctcagcctcccaaagtgctgggattacaggcatgagccactgtacctggccaaaatctcctaatgttttaagaaagtttacaaatttgtgttgaactgcattcaaaactgtcctgggccacatgcagcccgtcactcatgggtaagacaagctaagtataaagtaattatcttttcttttctttttgttttgagacaaagtcttgctctgtcgcccaggctagattgcagtggcatgatctcagctcactgcaacctccgcctcccgggttcaagcgattctcctgcctcagctactgagtaactgggattacaggcgcctgccaccacgctcggctaatttttgtctttttagtagaaacagggtttcaccatcttggccaggctggtctccaactcctgacctcatgatccacctgcctcggcctcccaaagtgctgggaatacaggtgtgagccactgcacttggccagtagttatcttttctttaattatttgttttttaaattgatgtataacattggatgcatttattacatatcacatggtaaaagaatccctctaaataatacttctctcttggattacatgaatctttgtcatttaaagctcagtataagtaaaaaaaaaaaaatacaatgaagagattacttcattcacaaataagtatcgaattttagtgcttaaaaattaacaaggtgggccgggcgtggtggcttacgcctgcaatcccagcactttgggaagccaaggtgggtggaccgtgagatcaggagattgagaccatcctagctaacacggtgaaacccatctctactaaaaatacaaaaaattagcagggcatggtggcacgcgcctatagttccagctacttgggaggctgaggcagaagaatcacttgaacccgtgaggcagaggttgcagtgagccgagatcgcaccactgcacttcagcctgggtgacagagtgagactctgtctgaaaaaaaaaaaaaaaattaccaaggtggagatcatgaaaatggcatgaatagtgtgggatttctctaagattgttgatattaattccattagactcttatgtgagtgaagacgaagacttcccctgagtaagttcagacagcttgtgataacatttctacatcaattcctcaggatttaactatatattcttgaaaacatctcaattttaagtgtttctttcaagatggtgaattaaacagagatagcccttcaacaggttgaactcagcatatgctgagtctgaaatggaaatgatggagttagagaaccatacaacaatggtaatgatttcagaaacatggtgttgagcagaacaaagcagacacaaaagagtacctatggcatggcatgcatctgtatacgcgaaattccagaataagcaagctaacctatgataagaaagagactggctgggaagagtgagagttcactttctggggtgacataatagtgtagatcttggctgggcacggtggttcacgcctgtaatcccaacactttgggaggccgaggcgggcggatcacctgaggtcgggagttcaaaaccagcctgaccaacatggagaaaccctatctctactaaaaatacaaaattagctgggagtggtggcacatgtctgtaatcccagccactcgggaggctgaggcaggagaatcgctcgaacctgggaagcagaggttgcggtgagctgatattgccccattgcactccagcctcagcaacaagggagaaactgtctcaaataaataaataaataaataaataaaataatgtagatcttgaacgggggttggtttatgctggtgtatgtactttccaaagttagtaaacttacacttgaggttatatattttggccaggcgcggtggctcacgcctgtaattccagcactgggaggccgaggcaggcggatcacgaggtcaagagatggagactatcctggcgaacatggtgaaacccagtgtctactaaaaatacaaaaattagccaggcgttgtaatctgagctactcaggaggctgaggcaggacaattgcttgaaccccggaagcggaggttgcagtgagccgagatcttgccactgcactccagcctgggcgacagagtgagactctgtctaaaaaacaaacaaacaaaaaaaagtcatcaaaccagatgacacaaatcaaatgacatttcactttgttttggtccgttttgtctgttggagacaagagtgcagcggggccatctcggctcactgcaacgtccagctcctgggcccaagcgatcctcccacctcagcctctccagtaactgggataacaggtacgcaccaccaggcccgactaatcttttttggaattttttgtagagatggggtttcgctatgatgccctggctagtcttcaactcctggactcaagtgatctgcccacctcggccccctaaagtgctgggattacaggcctgagctgtgtaatttcatgccgcgtgacacagcccagtaaaaaggaagaaaccccgcgggtccagcgtctactcacacaggtggactgatggctgataaatcccagcaggagccaaaagagcagccacagcacccatctactcacacaggtggactgatggctgataaatcccagcaggagccaaaagaggagccaaaagagtagccaccgcacccgcatgtcctggtcctttcagggctccctgaggcggccaggacagaggtggaggtggcttagggcaggggggagggaaggggacggggaccggggccggatctgagttggggagggggaggggagggggaggggaaggggaggggaaggggggaagtaagggaagggaaaggaggagaagggggctgttggggaggaggaggaggagaagaagaaaggggtctgggaaaggatccggttcaaattaagttctcaagcgctggtggaaggtttagctacaggtcacggagaagatcagggaagcaacaggacaggcagggcaagggagcgtgaggcttaggagcaattagagggagacaaaggttctgctttccaccaaaccttcttcggtctgggccctcccttagcaaccctggggctttagactctctctccaccaatccctgatgaccccggtggtgcctcacaatggacattccaagtagcgcccgcatcatcccaatgacccctcccccatctcagtcccccacgctcctcccaaggccaggtcctctctggaaccttcacaaacctgacttctggtcctccccaaccagctccctgtccctgcttctgggcgctccttccttcctgagctcccagggttcctcaaggtcacttttggcgacaaaacataaaaaacaaatgatggcaggatggcaggaagaacctcatacccaagcagagtgccaggttttacagcctccgctcagccattcatatcctaagcaacaaaacatcagcaggatgcggaaggtcccgatagtaaaccatctccatcacatccatgtagccatccgtccatcaacctgtatctcaggaacaaatgtacatacattcattttaagcatgcatggtacatttacaaaaattaacctgacttattttgttccagcaaatctcaatatatttgagagcaatcaaatcacacagcatgtttctgatcataaaactgtgctagaagtcaatgattaaaagctaattcaaaattattatttgcttggaaattcaaagtgcccttataagacataaacataagaaagaatccaaaatgaaacaagattgcctttcaactcaatgatgagatcataacatggcaataaaatgtctccctctggccggggaattcctctttgtggcacaacgttgtgtgatctcaaatcacccctaacccacctagacattttaacatccaaaaccgagtgatgatgtccttatctatatcatcttactgcccgtgtgtgtggactttaaattctgaacccaaatgagggggagaaaaccaagctgactttcatgactgagctctcagggacgtccaaggaatctgtgcatttcaagaaacaaagttcatcagcttctctcctaaggtatttgcccacaatagccagagggcttggccgcatcatgtgtgatgggtggggagctccaagcaggtgggcaggacccaggggcctggtgaccaggacagacccccactgtccatcacctttcctggccctgtcctcagctaaacttcccacaggccttctgcccgatcacacagagtgtgcccaaactcactcaggcctctggcagctgaaaaccactgctttaaatccctttaccatttactatgacataaggttattgtaaacaggaaatattctattgatgctacaaatggaaagccaatgcctttaccataaatagaaaaacaaccctaagaaacaagcaaaacaggggctgggggtggtggctcacgcctgtaatcccagcactttgggaggctgaggcgggcggatcacaaggtcaggagttccagaccagcctggccaatatggtgaaaccctgtctctaataaaatacaaaaattagctgggtgtggtggtgggcgcctgtagtcccacctacttggaaggctgaggcaggagaatagtttgaacccgggaggcagagtctgcagtgagccgagattgcaccactgcactccagcctaggtgacagagcgagactctgtctcaaaaacagcaacaactacaaacaaacaaaaaacagggttaacaaaagtatggaattcaattctttttatatgctgcagccatgttccagccctagatttggctgggcatggtggctcacgcctgtaatcccagcactttgggaggctgaggcaggcggatcacgaggttaggggttgacacgagcctggccaatatggtgaaaccccatctctgctaagaatacaaaaattagctgggcatggtggtgcacacctgtagtcccagctactcagaggctgaggcagaggaattgcttgaacccgggagacggaggttgcagtgagccaagattgtgccattgcactccagcctgggggacagagtgaaactctgtctcaaaaaaaaaaaaaaaaaatatatatatatatatatgtgtgtgtgtgtgtgtctgtctgtgtgtgtgtgtgtatctatataaatctcaaaaataaaagatcatttttgagattatcattttaaaagacaagataatgttcaacttaatgaataatttaattattactactggactttttgtagactgcacagagcattcaaaacaaatgaaggagaataaaaaatatgtattacatgttgtaaaataaatatgatgtggttaattcttttattcaaaattatagaacatatatatgtactgtagaatgtatttcttattatgagtcatgttaaaaagtagtttagaagctgttgatttgaatttccttttcaaattttgcaggataatttttttttttttttgacagagtctcgctctgtcgcccagtctggagtgcaatggcgtgatctcggcccactaaaacctccacctcctgaatctcagcaattctcctgtctcagcctcctgagtagctgggactacaggctgacaccaccatgcccggctaatttttgtatttttaatagggacgaggttttgccatattggtcaggctggtctcgaagtcctggcctctggtgatccaccagcctcagcctcccaaaatgctgggattacaggcatgagtcaccatgcccagcctaaacttggcaagataataaataaccttttaaagtgtcgttgggcacttgtctggttgtttttctttaggttaccatgccagcaatgattccttttgagtttctgacagaagatagtggttttcatccaaataagtcaactactctaccccatccctaagccacttgtatggaaagaaaaagaggaagaagccagtactgagactgcgtaagcttcccccagcatcacccgctatgagatgtgtggcagctgagacccgggaactgctcaagggcaccaggccccatctgtctgcactcactcaccttcctcaggtactcgcatgggcatgtcactgactttacgtgctgctgcagctccttggtgagctggccctggtcatgggacaggaaccgtggggtcaggacaatagagagcttcaccatttgcagaatgagaacaggggctcatgatgagtgccaacctattagacaattaaaaaaaaaagtgttgaatgagtggaaaaacaaggtgatgtttgagtctatagtggtcaagggcttcagaaaaggacagaaccaagttcaaattcctgtactttgaatttctacttcatgccatgcaaaattactttaccccttttaacctcagttttcttctgtgtgaaacaggaacaatagtttcattcgtcattcagtttctctcaaggtttcacgagatcatacctataaaacatccaagtcatttaaatgtatcatcatttcggtcataattagtgggatccatttcactattattggatatacagttctgtgcctgaaacctacaaagaaagaaaatgttaagtctaaaaagcattagtgatttctcatttttatattactaattataaccctatttaatcacacaaggccttgtccgcggcaggtgctcaataaacacttgtcgaatcaatgcatgtgggctccggagccacactgtttagattctattctgcctccaccacttatcagctgtgtgatctgggtaagataattcacctctttatgtctgcacttccctctccataaactatatataacgagaatccttagctcatttggttgtggtgaggggtgaatgatttggcacacaggaggggcttgttaacattagctgtgatgatctccttccaaatcttcattttcagagccacagatgaggccatagggcaaccaggtgaccttagagtgtaagtacacatgatcgccagctatgctctatctccaccataggtccaagactgggtagttctggcctggaggcttctgctgcatctgccttctcagtgttcacctaatgacttttgtattttcctcctcacatccccacagatggggttcaggctgccgaacacagctgggtgatgccagggcagtggccacctgtgccagccctgtgaggtagctggaggatcattgttccttccttctcgggctctgggcagatgccagggctggggtgacccatgacctcaagtttcttgctttggagggccacattttcccttggcaaagagggtaaaggtcacaggatgccggagagctgtgacttctctgtgccctgggcccaaactatgaagacctgacacactatgctaaaagtccaaggctggatgctccccagagcttcttgcctcaccgcttctgctgagggaggaatgaatactatgtcctcccagagctttgggagcttgtagcaagcagcctccccagcgcaaaatctcttggaaacctctaactgtgtcggaaacattagtgcaaatgttgcatcctatttcccatatgtccgcgtgttttaggaaaaaaccctcaatttcctaaatatgcaagaaaaattggtattgtaggacaatgtgactttttaaaaaatgttatttaaacatcttccccacctccttttctgccctccaagactgccaaatacttgttgaacaaatattattaaatgcctactacgtgccagccatgattcatggtcttggggacacagcagagaacgaactgacaggattcctcccttatgtaattcacattcttatatgataatgataagggttaacattaattaagctgtcactacgtgttagtcacggtgcagtcattcccacacattattacacttaaacctgctagcaagcttgcaaggtagttagttgtttttcctttaaaaactgagtctcagaatgatgaagcactttgtccaatgtcacacagctagtaagtgtggagaccttgcatccaatcaatgcccgtctcattctaaacaccacattatgtgttctccagcccatggagaataattttaacacagtcaatgaaatttctacacaacaatgttcttgtctcaagtccaagaatgcctcctacacctcccataatactggctttctggtgagtaaagatgccattctcatgtgtaatcaggtggcaaatggagatatgaccaaagtaaccatttgcctacactcgtaaccctgtacacactcttcctgtgtcgattcaattcaagtaccccttttgatcacttagcaaatctgacctttaaaagggttaaggtttttatatccatgtaagtttctgtattgctttggaagtctctggttaaatgaataccctttttaatagtgacctgtgattctgttttgatcaagtgtttacaaacttgacatctttgatgggtttctccagtgtcaaaatcctaaatcaggtctttttggcttaaaattaactttgggatttttcagctgcatcccttcgggagtctaaagaatgcatctctcatcttgtagaggtattaagtgattcgatttatttggtagattatatgggcgggcattgtcaaatgtggtgatactgcatgggagggcactgtcaagtgaggtgacattagatctcatctcagttatatttatgggtatgttgttgatatacgtgttccaaaaattacatacatttatacaaatttaatatgttatgatttgtaattttgattgttatgctaaatatttgctaaagtttagctttagcaatattatgctaaatatatgctaaatatttgctaaagttatatttgcataaacatgttatgaatggctgggcaccatcactcatgcctataatcccagcactttgggagaccaaggcaggtggatcacctgaggtcaggagttcaagaccagcctgaccaatagggtgaaaattacacgaaaatactgtctccatgaaaaatacaaaaattagccaggcttggtagcacaggcctgtcatctcagcaactcgggaggctgagataggagaattgcttgaacccaggaggcggaggttgcagtgagccgagattgcaccactgcactccagcctgggcgacagagctggaatctatctaaaaaaaaaaaaaaaagttattaattatttctgaagatgatatgaaatttataaaacactggtggtcctgatgtaatgctgtcagtcatgattctgatcactgtcttaaaatgctgcacataagataagtaattggctgggcacagtggctcacacctgtaatcccagcactctgggaggccgaggcgggtggatcacgaggtcaggaaatcgagaccatcctggctaacacggtgaaacctcgtctctactaaaaacacacaaaaaaaaaattagccgggcatggtggcgggtacctgtagtcccagctacttgggaggctgagaggctgaggcaggagaatggcatgaccctaggaggtggagcatgcagtgagcggagatcacgtcactgcactccagcctgggtgacacagtgagactccgtctcaaaaaaaaaaaaaaaaaaagtaattaaatttccttgtgaactgggaagtttcatcagacttttatcataactattgttttcatcatccacagttagttttgaattcttctctaaaaatatttgtaattggcagtagtccaaattttcttttgttttctttcctgtttttgagacacagtctggctctgtcgcctaagctggagtacagtggtgccatcttggctctctgcaacctctgcctcctgggttcaagcgattctcctgcctcagcctcccaagtagctgggactacagtcgcccgccaccacgcccagctaactggtggtggtacagacggggttttaccatattggcccggctggtcttcaactcctgacctcgtgatccgcccgcctcagcctcccaaagcgctgggattacagccgtggagccaccgcgcccggcccccaaatttgctttgcatggagaaaactctaacaaatcctcttgaacatggttttctgataacccagatcaatgaactacccaggcttcaccactataggcatgtgagaaactcgcacttataccccctcaatacattaaaactaaatatttttttaaaaatcaatgggccaggcgcagtggctcacgcctgtaatctcagcactttgggaggccaaggcaggcggatcacttgcggttaggagttccagaccagcctggccagcccatcttactaaaaatacaaaaattagccaggcatggtggtgcatgtctgtaatcccagctactcgggaggctgaggcatgagaatcgcttgaacctgggaggcagaggttgcagtgaaccaaaattgtgccactgcactccagcctgggcgacagactgagactctgtctcagaaataaaaaaaataaaaaccaatgaactaaaaaccaatttctagtggcttctaataaggaaacaatggttcaaaaaactgctaagcaagatcaagcaaaacaaaaaaatctattaagataatgtttttataattcgtatttaaaacattgttgtttgttgattcttgattcattctttttttttttttttgagacggagtctcactctgtcacccaggctggagtgcagtggcgggatttctgctcagtgcaacctccgcctcctgagttcaagccattctcctgcctcagccccccgagtagctgggattaccggcgcccgccaccacgcccagctagtttttgtatttgtagtggagaccgggtttcaccatgttggccaggctggtctccaactgctgatttcaggtgatcacccccccgcctgggcctcccaaagtgctgggattgcaggcgtgagccgccgcgccgggcccttgttttgttttctagattgaagaaaattttttctcagaagttatctagaatttacaccgatttggtaaagcacacttttgtgaacaaaggtgggtggaagcgtttgtttttccttcctacttgatccttccaaagtttggaaactattcataaatattcttactttgatgtacacatgttctccttataagcaggctgtaatcagaatgattggttatattatcaaggctttgactgaaacatcctatttaagaatacgcagaaaatgcctggcttcgagtttgcagccttacgttccagtcagggggaaactgtcactccctgcaggcctgagaacctgagagcttttccgggagcaacttggcagggagggtcccggcagctgctccgtgggcaggaaccatggggcgcagccccgggcgaccctcgggccggcggggaccttccgcttcctggcgtctttctccatcgccccgccggctgctggggaagcggcgggtgcccagtgcctggaggtcgctctctccccacctctggctgcgggaacggagaggccgcggcggccggagcagggtgggcggcctgaggcgagagcccagccggcctccgcggggaatatggcgacctgcggcgagctgagcgtcaactgctgcgccgccgacttctcggagcagcgaaggcgactcgagagaagacgccgccaagtggaacccgggccccgcggccctgggatggggcagcagccactgcagccaggaagccctgggcggggcgctgggcgccaacgagcgtcacggcaacctccatgcggcgccctcaccagcctacaggcggcaccgcagcagcctccaggcagcgcccacaccagcctacaggggtcgccgctcgcactgcacctgcctccgccgccccggggtgtgaactgcgctgtctgtcggcctggctacgctgacccgggcagcccaggcccgcagcagccggacgaggagcccagggccactgcccggggttacgagaaggagcaggacggtgccccagaaaaatgcaagagctcagagctagggcccccgtgccaggaaaggctaggagcagaagatggagagatggagatggagaagcggcaggtgggaaggagcggcgctccaccggtggggtcagcatgcgctggcggggcttagagtatgaagaggaagaagctgggcagaaagagcggaaacgagaaggtgcaatgacacaacagagcacaatgcagaatccagccctaggactccaataaaggctgggtttaattgcaactcacacaccccacccctaatcagagaggatcaggggagagagaggacccaaggaacactggaacctgaagggcgggaatctgaggccaagactgattgttggaaattgtgggcatcaggaaaggagaaagtgagtcagaatgggtggaccgagggtggtgttggggcggggggggcagtgaactgggttaggaaggattagaaatcagaaccttaggaaggatccagaaaggaactgtccttaaaaaggtgcatgctgcggctgggtactgtggctcacgcctgtaatcccagcactttgggaggctgaggcgggcagatcacgaggtcaggagatggagatcatcctggctaacacagtgaaaccccgtctgtactaaaaatacaaaaaattagccaggcgcggtggcaggtgcctgtagtcccagctacttgggaggctgaggcaggagaatggcgtgaacccgggaggtggagcttgcagtgagctgagatcacaccactgcgctccagcctgggtgacagagcgagactccatctccgaaaaaacaaaaacaaaaattagccgggcatggtggcacatgcctgcagtcccagctactcgcgaggctgaggcaagagaatcgcttgaaccagggggaaggaggttgcagtgagccgagactgcgctactgcacttcagcctgggagacagagtgagactcctcagaaaaactgctttcttccaacttacaaaagccggaagaagaaaatgtcatttattttcatggtaggagatttatgccaagattgtacaccaggtggagacctgtaccagctccctctgctcccatctcccagagttctaggaatttactcttgcacactggctctttcatgtctcttcgactttgcctacggaggtctctctgcctagcatgccttctctccatgtctcaccattatcctccggctttatttatttatttatttatttatttatttatttttattgtttgagaaagtgtctgactttaccttccaggctggagtgcagtggcgtggtcactgttgactgcagcctcaaattcctgggctcaagaaatcctcccgtctcagcctcccaagtaggtatgcatcgccacacccaactagttttttaatttgtgtgtgtgtgtttggtagagatggtagagatgttgcccaggctggtctcaaactcctgggccccactgatcctcccacctaagcctcccaaagtgcagagattacaggtatgagccaccacacacacccagcctctccatctgttttatttatttatttatttatttatttttgagacagagtctccccctatgccccacactggtgtgcagtggcgcaatcttgggttcaccgcaacatttgactcccgggttcaagtgattctcctgcctcagcttccagggtagctgggattacaggcgtgcaccatcatgcccagctaatttttctgtttttagtagagacggggttttgccatgttggccaggctggtctcaaactcctgacctcaagggatgcacctgcctcagcctcccaaagtgctgagattacaggcctgagccaccatgccctgctactgcacccagctactcaaggcacatatggagccaacatacttgaccatctgcaggggtccacccagggtaggggagctatgagcactggcgtcggagggagcccagcttattggcccaaccccgagatagacccatttcccagtgggcatagcactccaaggcttgtcactcacagcctctgcaactccaagtcttggtatgcctgaaacccatactccacatgagcacaccttcactgagcacctagtgtgggacagataggccagggctgagcacacaagaggaaggagacgcagactttgccttgaggagatcacgttcaggcagggacagaattactccagagtgtcgcaggcaaagggaccaaagcctcggattttcttttcttttttttttttttaatttttttgagatggagtttcactcttgtttcccaggctggagtgcaatggcatgatctcggctcactgaaacctctgcctcctgggttcaagcgattctcctgcctcagcctcctgtgtagctgggattacaggcacccaccaccacacccagctaattttttgcatttttactagagacagggtttcaccatactggccaggctggtctcaaattcctgacctcaggtgatccacctacctaggcctcctaaagtgctgggatctcaggtgtgagccaccgtgcccagccgtctccaatagaaggaggcagagagaggtttggcacccaacagaaatgagtttaaatcttggttcccctggttcttggctcaagcttctctggtgcccagtgccttcctatgaaagggaatgagaggggtctggggttgtgacaaaatcatgtttctagtgctgggcaaggtgatatgcacctgtaatatcagcaactcaggagcctgaggagggaggattgcttgaggtcagaaattcaagcccaggccgggtgtagtggcacacaactgtaatcctagcactttgggaggccgaggtgggcagatcacctaaggtcaggagtttgagaccagcctggccaacgtggtgaaatcgcagctctactaaacatacaaaaagtagctgggcatagtggcgggcagctgtagtcccagctactcccaacctgggaggcagaggttgcagtgagccaagatcgtgccactgcactgcagcctgggcgacaagagcaaaactccatctcaaaaaataaaaaaataataataaataaaataaatgaataaataaataaaataaaaataaaaataaattcaagcttagcctgggcaacaggctcaaccccatctcaaaaaaaaaaaaaaaaaaaaaaaaaggccaggcatggtggctcacacctgtaatctcagcactttgggaggccaaggcaggtggatcacctgaggtcaggagttcaagacgagcctggccaacatgttaaaatcctatctctactaaaaatacaaaaactagctgggcgtggtagcacatgcctatagtcctagctacttgggaggctgaggcaggagaatcactggaacctggaggcagaggttgcaatgagctgagatcacaccactgcactccaggctggacatcagagtgagactctatctccaaaaaaaaaaaaaaaaaaagtagtcaggaagagacatcaacaaaaattggtgatgaatggggtagcagtggcactggggaccaaaagggaacagatattttgcactacaattgtcatctcgtttcttttcttttttttttgagatggagtctccctctgttgccaggctggaatacagtggtgcgaactcggctcactgcaacctccgcctcccgggttcaagcaattctcctgcctcagcctcccgaatagctgagactacaggcacatgccaccatgcccagctaatttttttatttttagtagagacagggtttcaccattttgattaggattgttttgatctcttgaccttctgatctgtccacttcgtcctcccaaagtgctgggattacaggtgtgagccatcacgcctggccaattgtcatctcttttcacttttgagcacatatgggtatgctgtaaaggaaattttaaaatctcaggatcccagccccccatcttcttatgcaaaagagaaagtcattgtgacacccttttccaaatgaatagctgttcctaagatcatgtaacagccagatagatgtccattcagcaagaaaaggcctcaggcatctgggaagggctgcgccccgtagatcattcataaataaattatttgctggcctcctataatcaagtacatgccaatgttaactttaggtctacaatcttttttttttctttgagatggagtctccctctgtcaccgaggctggagtgtacttgtgcagtctgggctcactgcaacctctgcctctcaggctcaagcaattctcttgcctcagccacccgagtagctgggattatgggcgtgtgcctccgcactgggctaatttttgtatttttagtacagatggggttttgtcatgttggccaggctgttttcaaactcctgacctcaggtgatccacccgccttggcctcccgaagtgctggaattacaggtgtgagccactgcacccagctgagtaaatttcttgattgcacagaatgtatggtgatattggtggacttaaggacattgaattgtttatcaggaataaagtattatgtgtgttttctggggtcctggataatgctgtagcattcagggtagattgagtaaaaaaaatgtagagatggtttcctagttacttgtttttgcttctaattttcattcatttgctatttattctcttctggctttgcttgtgtatgcatatatatataaccattattattattattatttttagtttctagtggaaggcttttatttggttctgtgaatagtcattttgtttcctatgtatttctagcaagttgtattcattccattgatctagaattcctaggctgccttcgttgggcctgcaggaattaatggagcatagcagctttttattttttatatttattttttgagacagagtctcacactgtcgcccaggctggagtgcaatggtacgatatcagctcactgcaacctccacctcagaggttcaagtgattctcctgcctcagcctctggaatagctgtgactacaggcacccactaccacacctggctaactttttgtatttttagtggagatggggtttcatcatgttggccaagctggtctcaaactcctgacctcaggtgatccatctgcctcggcctcccaaagtgctgggagtacaggcttgagccacaccgtccagcgagtatactttcataaatagaatttgagtcatatttctgtctctgcctaatttctccaaaatttgtaaactatttgtgaatattcttaattcatgacaatgtgtttgttggcatacagtccaacagggtcaccagggccgatcagggagagagagcctagaaacttgacatgttggcactactgtaactgctcaaggggttcaccttgcccactgcctagacagagccgattcatgaagacaggggaattgtaattgaccaacatggtataatcctgtctctactaaaaaaatacaaaattagctgggaatggtggtgggcatctctaatcccagctacttgggagcctgaggcaggagaaccggttgaactcgggaggcggagattgcagtgagccatgatcgtgccattgcacttcagcctgggtgacagaaagaaagaaagaaagaaagaaggaagggaggaagggaggaaggaagggaagaaagagagagagaaagaaagaaagctgctaacccaagcagaacaaaaaattaattgaataccaaaaaaacactttgctaaattttcatgttaaaacagccgataccaaaattgtttagataaacagtttggtttttgttgttgttgtttgtttttgttttttgctttttgcttttttgagacggagtctcaatctgtcacccaggctggagtgcaatggcgtgattttggctcactgcaacctctgcctcccaggttcaagtgattcttgtacctcagccttctgagtagctgggattacaggtgcccaccactatgcctggctaatttttttgaatttttagtagagacggggtttcaccatgttggtcaggctggtcttgaactcccaacctcaggtgatccacccgccttggcatcccaaagtgctgggattacaggcatgagccaccaccccttttttgttgtttttgaaacagggtctcactctgtcgcccaggctggagtgcagtggagcaatctcccctcactgaaacctccttctcctgggttcaagggattctcccatctcctcccaagtagctgggattacaggcttctgccaccatgcccagctaattttttgtgggctcgcccagcctaggtatacaatttgaatgaactccaaggtctaagtcaaattacctatgataacccattaggtatcagtgctatgcacgtaaactggagaaacaactgatattcagagcacgcaagtccgatgttaaccatggactcatggagaatcaagatggtcaccttgtccttcctgactccttaaagtgtttgttattaaaggttctgcagttgggcgtggtagctcacacctgtaatcccagcactttgggaggccgaggtgggcaaatcacctgaggtcgggagttcaatatcagcctcaccaacatggagaaaccccatctctactaaaaatacaaaaaattatccgggcgtggtggctcatgcctgtaatcccagctactcaggaggctgaggcagaagagtcgcttgaacccaggaggcggaggttgcggtgagccgagatagcgccattgcactccaacctgggcaacaagaatgaaactctgtctaaaaatgaaaaataaaagactctgcattccatgactcatcatggaaaagataaaatgatctaaattaaatatgtattggtgtgctgaattataaattgctaaaatagttcataaccaatgtttcgtttgtcaaattcatgttcctgggaagacaatcaaagcttcaggtgcatttggctacctcatgggccatttgaacatttcagttgtcaattatcattttcaatgcatgttttctggttgctttcccatgcaagagggctgatattacaacagtagatcattatggtacagtgtattttcaccaggtactgaaagctttttatggctcactgactggggacaatcaattccttcacaatctagaaccaaagattggatcttctgagaacatcagagaaagaatgtccttgccatccacaatacagcaaaacttcaggaccttgaactttgggttcataatctcacaagagggaagtttttcgccagaaaaagatggcatccttgatgtgaacagcttttcccaagatcacagatcaagacttctagtttttttttttgagacagagtcatttttttttttttttgagacatagtctcggtcttgttgctcaggttggagtggaatagcgcgatcttggctcactgcaacctccgcctcctgggttcaagtaattctcctgactcagcctccagagtagctgggattacaggcgcccaccaccatgcccggctaatttttttgtatttttagtggagacagggtttcaccatgttggccaggctggtctcgaactcctgacctcaggtgatccgcctacctcggcctcccaaagcgctgggattacaggcatcagtcaccgtgcccggccttgtgatagtgtcttactctggcacccaggctggagtgcagtggtgcaatcttggttcactgcaaccttcgcctcccagattcaagcgattcttgtacatcagcctcccgagccgctgagactacaggcacgtgccaccatgcctggttaattttgtgtgtgtgtgtgtgtgtatgtttgtgtgtgatggagttttgctcttgttgcccaggctggagtgcagtggtgcgatcttcgctcactgcaacgtctgcctcccgggttcaagcgattctcctgcctcgggctcctgagtagttgggattataggcgctcaacaccatacccggggaattttttgtatttttagtagagacggggtttcatcatgttggccaggttggtctccaactcctgacctcaggtgatccacccgcctcggtgtcccaaagtgctgggattacaggcgtgagccctgtgcccagcctcagtgtctctctctctctcgactagagagactgaccagggacaatcaactctctccagactgacagagagagagacagagagagcgagaaagagacagagtctggctctcacccaggctggagtgcagtggtgtgatcttggctcactgcaacctctgccttccgtgttcaagcgattcctgtgcctcagcctcccaagtagctgggattataggtccacaccaccacgcccggctaatttttgtgtttttagtagagacagcctcaccatgttggccaggctggttttgaactcctgacctcaggtgatccgccagcctcggccttccaaagtgctgggattacaggcgtgagtcaccgcgcccggccaaataaaataaaatgttaaagcaaattcaggactacccctcctccaagtcttctgttccctttgggcgcccaggtgagcgggggaggggctgggggagtaataacatcaaaagagcgccttttcctcccttattccgaggagacttccctgggcctgactcccggtcctgtccccagcgccccgcggcctctggagccccttcagtgaccaagatacagagatcaggacgcctttgcgccgccccaggtgcccgcccctagctggctctgcttgggccgcgagggaaggtgaggtcgggggcggagccggggcgtgacagccggggtgtgtgtccgccgggcttggtgcctccggtggccctgcagcaccgtcccacctctgccaccctccgatggggccgctacctgtgtgcctgccaatcatgctgctcctgctactgccgtcgctgctgctgctgctgcttctacctggccccgggtccggcgagggtgagtgaggaaggggctttcccggaactcaggcgttccggtattcctccagcccttcctagggacccagcagccctgcctcccatccctctccaagttcctagttgccctagagcccccagctcgctcttctaatgctcacccacacgatgcgccccagccttctgcagggccccccactcactcctcccagggacccagaactagcccagtccttccccaggggcgcagagtcctctcctggctccctcccctaaccggctgtgaccctctccggcagcccggaagcctcccggttgtcctgatctggggtccgcgaacttacccttcattccacctgtccctgagatgtgagacaccagagggtgggaggagcaggggcagaaagggccggcttgggggtgggagaagaatatattgtgcccctgtacaacaaaccccggtgaccaaaaacaaaacaaaacaaaacaaacaaacaaaaaaacaaaaaatagaacatactgtccctatctcactatccatcctttggggtcactgtagagaggtcccgtgggtgactgcccatttctggggtgcacagatacatgtacccgcagagtactatgcagacaccgccagcacacagatgcgcaggcacaggaccagccccagactcacctggccctcaggtgtgcggctcccacagggaaaaatactgacataccgctagggggacacacgcacacacagctcaaggatacccgagacagcactcaggacaattcagatgcaccgtgtacacacacacacacacacacacacacacacacacacacacacacacacacagagcagcacagacacacatatgtgcgcatagaccctggggtcacaggatggacagacagccctggccctcccccgaggaggctgcagcgggcagacagggcaaacagaccccagcgtgacctgccacacctatgttggcacagagggagtgttttgcttggttataagcacagtgctcatgcctgccccacgcctagaaccctccctctataaggctgttgctagggctctgagataccagagagtggtcagggacggtggcaggggaacctttggggacagcttcagggtacggtgttgggactgggacattgtcagggtgctcagacagggcgtgttccctgggtcttggtgcatttagaggtcaagggaccatttctggaagctcactgtgtgccagggcagcttatatcagagctcagctcttttttttttttttttttgagacagagtctcactgttgcccaggctggagtgcagtggtacgagctcggctcactgcaacctccacctcccgggttcaagcgattctcctgcctcagcctcccaagtagctgggattacaggcgtgcaccaccatgcccagctaattatgtatttttcgtagaaacagctttctccatgttggtcaggctggtctggaactgctcacttcaggtgatctgcccgcctcggactcccaaagtgctgggattacaggcgtgagccaccgcgcccggccccaaatgcgttttacattttcttcctctttgattcatctttgtcctccaacataaatatgctactttttccactgataaaaagacaaaatggaatttcaatctggcctggacttctcaaaaaagtcagtgtgatgaaaactgttctagataaaacagaaatgagactgggcatggtggctcatgcctggaatcccagcgccttcggaggccaaggcaggagaatcacttgaggccaggagtttgtgaacagcctgggcaacatagtgagaccccatatctactaaaaatttaaaaattagctgggcatggtggtgcatgcccgtatgtctggagactgaggcaggaggattgcttgagcccaggatttggaggctgcagtgaactgattgtgccactgcactccagtgtgggtgacaaagtgagacactgtctctaaaaaaaaaaaaaagagagacaagatgatcaggatgagcgcagtggctcatgcctataatcccagcactttgggaggccaaaccaggtggatcatatgaggtcaggagttcgagaccagcctggccaagatggtgaaacccctttctactaaaaatacaaaaattagctgggtgtggtgtcgcacgcctgtgatcccagctactcgggaggctaaggcaggagaattgcttgaacctgggaggcagaggttgctgtgagcaagattaaaccactgtgctccagcctgggcaacaagaatgagactgtgtctcaaaaaaaaaaaaaaaagatgatcaaacacaatgcgtcaacctcccagagctgtataaaccctaaccctaacccaggaagcaggcaagcctgtgtgtgagtttccactctattgctggtactactcggctctggcaaccccgaaggccaccttcccctgttgtcactgtgtaaggaggaaggagcactggtttgcaagtcagaagcctgggttgaagcctctgctcgggttcctgctggctgtgggaatgtggggttacctttcccggctggcctcgtttcctacatgtccaatgcaggggttccagtcacatgcattgggcaccattacatgtccaagctgtgccaggatctagaaaaatggctgggctcaggccaaggggccttcctgtctggcagtgaaaataagaggagataccaagggccctgagtctgagtctggaggggaagtcatgagcacagggcagtgccagggcccgggagctgccacagaggagcccaccttggtgacagacacctgtaggcgcgtccgtgatgcccagttcccaacacagggaactggacaaacgtttcatgcacgactcttttttcccttcttggctaccttgaggaccttgattataatagttagccttttttttttctttttttgagactcttgctctgtcacccaggttggaatgcagtggcaaaatcttggctcactgcaaccttcatctctcaggttcaagtgactctccttcctcagcctccctagtagctgggattacaggcatgaaccactatgctcggctaatttttgtatttttactacagatggggtttcaccatgttggccaggctgatcttgaactgctgacctcaggtgatctgcccgcctgggcctcccaaaatgttgggattacaggtgtgagccactgagcccagccggattataatagccttttcatgcaccaggggctttatactcattatctcatttcattcatatgagttgaagtcagtttatcccccatttcacagatgaggaaaccaaggcccagagaggttaagaatttgtccaaggtcacacagccaggaagtaggattcaaacccagacagccaggctgtaatacctaggctcttctcaggctcatgcccttcccaggggtctgggaagccctgacctgcagcctgtcacctttgtttaccccccagcctccaggatattacgtgtgcaccggcgtgggatcctggaactggcaggaactgtgggttgtgttggtccccgaacccccatcgcctatatgaaatatggttgcttttgtggcttgggaggccatggccagccccgcgatgccattgactggtgagtgcatgcctgggaccaggccacaaaatccctcacactctggggtagtcaaggcttatgaggaagtacccaaaactgaagctggggtttggtccagggagatcccagtgtgcagtactactttgcaggcaggcagagggctcttggataacatggccagtgaagccagatcttggtaccagctgccccttaccctggccttgagctgatgacgttgccttaaaaacttggctaggagctgtggctcactcctgtaatcccagcactttggaaggccgaggtgggcagatcacttgaggtcaggagttcaagaccagcctggccaatatggtgaaaccccatctgtactaaaaatgcaaaaattagctgtgtgtggtggcaggcgtctgtaatcccagctactcaggagaccgaggcaggagaattgcttcaacccaggaggtggagtttgcagtgagttgagattgcaccactgcattccaacctgggtgacagtgcgagaccctgtctcaaaagaaaaaaataataaaaatataaagtgaccaggtgtggtgattcacacctgtaatcccaccactttgggtcgaagcagtaatatcactggagaccaggagtttgaaaccagcctaggcaacatagtgagaccctgtctctatattaaacacacacacacacacacacacacacacacacacacacacacacacacacaaaggaagccagactatgcactaggaactgccctgggaatccctttgcgttctcacaacaatcccatttcacagatgaagaaaccaaggcacagaaatattcagtaacgtgtccaggtgcggtggctcacgcctgtaatcccagtattttgggaggccaaggcaggtggatcacgaggtcaggagttccagaccagcctggccaacacggcgaaaccctgtctctactaaaactacaaaattagccaggcatggtggcgcatgcctgtaatcccagctactcgggaggctgaggcaggagaatcacctgaacccaggaggtggaggttgcagtgagccaagatcgtgccattgcactccagcctgagtgggattacaggcatgagccactgagcctggcctggtgagctaatttttaaatttgttatagagacaagagagacaagagttttcttatgttgcccaggctggtctcgaccccctgatctcaagtgatcctcccaccttagcctcccaaagtgctgggattacagatgggtgtcaccgcacctggcctctaaggagggtttcattataaacctaccctgaagggagggaatccgattttatgagagggtgtagcctggtgaggcctggatgacctccagaggcaggggcttgtgcctgggctgaggcctaagggtcaatgggcagacatgaagttgccccaggcagagggtacagtgtgggcaaagtcaggaagtggcagggcttggatcactccaggaagagagaggagtcatgtgtcacaggagctcgagacccagagagggaggcaggcaggcaggcagggaccaagctt

SEQ ID NO: 59708 - DNA, 1922 bp, Homo Sapiens
gggggatagatacggtgttattagatgttggctgaagctggggtaaaacagtcctcagtcctctgggcctttctgaggtcagggcttagcaccatgtgcgcttcctaatgagccaggcttactgggtttaaattgtttccttgatcaccataaaaagaattataaattttatagaatgggtgcttttattcaaacatgtttagagatgtggatattttggaaataattagaaatcaaaacatgccataaaacttctgttggctgaagagctatacataaaggataataggtgggtattttgcaagcaactgaactgggatcataaaataacaagtataactcttgcatggctagtaagttattatcactcagtttcaaacgcctagtcaagacattgagacagactagtggggaaagctgcatgatctctacactgtgcctctttagccgggcagcttgccctccagcttgagagtgagccccggtgttgactttgctgatttgtgcagtggcaggcctgcatgcaggtagcacttgcagtacttgggtctagctgctcttccactcccagcacctctgagatattttcagcaccagctgtgtgtcatttctagttactgagctttgtgtttctggagaggattttccacagatactgatgctgatttctctttctacccctctttctctcctcctttgcctcccccttcagtcggcagcacctcttcctcaccagcactgttaggagtcagagaccctcgctctgaatacgataggacccagccacctatgcagtattacaatagccaaggggatgccacacataaaggcctgtaccctggtaagacgccagttgggtgtgtgatacagtctcttgaaaagccgcatttccaggcgcttggccagtggcctgggaagtagcctgtgcttgtattgagacagtcccccagcagcaaaccatgttccagtcattccctttcctactttggggattgttgccttttctgcttgtttaaagtaaaacaagcatgtacttgtttgtatgtatgtatgtatgtagttgtacggtgggcacaaataaaaagagggctgtatccaaataaatcatttctggctgctcactggcacagtccccttgctccgtcccctcctggctcgagcagtctctgtgttttccacatgcatcagaaccgtcagcccagtgtcactttgcaggggccacatcttctagactggctcatctcttaaattcaaaccagagaatggagatcaatttcatttacattttcatggagaagagtttgaataaatagcaaaaggtataatgtgattcttctcaacgtgattattttttaagaataacaaaaataatgttacatagtgttaatatttttatatcctattcagaaagctgtgcatacaatttatttaaaggataccagcccaaagggttactaagatttcatactgttcccattctcaaccgtctggcgattataactactttagatgttccaaataagtcagtgtgagctaccccacaaaaagtactcttttctcaaacctgtctattaaaaataaataaaagctggtggcagctttactcctgcaggggaggcagtctccattgtactgttgtctttgaaattgtgatttcacaggactatttactaatcgactgttgttactatggcaattaatagctcagaaaattgcagatgctacatttcaacaccaagctctgggcaaaaggaaatgcacataccaactgaagtgcatggttgcttccgatttgcagcagcctgctttatcttacagatcacctctttagcatgcatgcccttctgtatcttcttcgcttgcttcaataaactaatttgcctcaactacgtttcattttcctaaaaaaaaaaaaaaaaaaa

SEQ ID NO: 59709 - DNA, 2120 bp, Homo Sapiens
caactgcggacatgctgggtggatccggatcgcatggaagacgcagcctggccgcgctctcccaaatcgcctaccagaggaatgacgatgatgaagaggaggcagcccgggaacggcgccgccgagcccgacaggaacggctgcggcagaagcaggaggaagaatccttgggacaggtgaccgaccaggtggaggtgaatgcccagaacagtgtgcctgacgaggaggccaagacaaccaccacaaacactcaagtggaaggggatgatgaggccgcattcctggagcgcctggctcggcgtgaggaaagacgccaaaaacgccttcaggaggctctggagcggcagaaggagttcgacccaacaataacagatgcaagtctgtcgctcccaagcagaagaatgcaaaatgacacagcagaaaatgaaactaccgagaaggaagaaaaaagtgaaagtcgccaagaaagatacgagatagaggaaacagaaacagtcaccaagtcctaccagaagaatgattggagggatgctgaagaaaacaagaaagaagacaaggaaaaggaggaggaggaagaggagaagccaaagcgagggagcattggagaaaatcagatcaaagatgaaaagattaaaaaggacaaagaacccaaagaagaagttaagagcttcatggatcgaaagaagggatttacagaagttaagtcgcagaatggagaattcatgacccacaaacttaaacatactgagaatactttcagccgccctggagggagggccagcgtggacaccaaggaggctgagggcgccccccaggtggaagccggcaaaaggctggaggagcttcgtcgtcgtcgcggggagaccgagagcgaagagttcgagaagctcaaacagaagcagcaggaggcggctttggagctggaggaactcaagaaaaagagggaggagagaaggaaggtcctggaggaggaagagcagaggaggaagcaggaggaagccgatcgaaaactcagagaggaggaagagaagaggaggctaaaggaagagattgaaaggcgaagagcagaagctgctgagaaacgccagaagatgccagaagatggcttgtcagatgacaagaaaccattcaagtgtttcactcctaaaggttcatctctcaagatagaagagcgagcagaatttttgaataagtctgtgcagaaaagcagtggtgtcaaatcgacccatcaagcagcaatagtctccaagattgacagcagactggagcagtataccagtgcaattgagggaacaaaaagcgcaaaacctacaaagccggcagcctcggatcttcctgttcctgctgaaggtgtacgcaacatcaagagtatgtgggagaaagggaatgtgttttcatcccccactgcagcaggcacaccaaataaggaaactgctggcttgaaggtaggggtttctagccgtatcaatgaatggctaactaaaaccccagatggaaacaagtcacctgctcccaaaccttctgacttgagaccaggagacgtatccagcaagcggaacctctgggaaaagcaatctgtggataaggtcacttcccccactaaggtttgagacagttccagaaagaacccaagctcaagacgcaggacgagctcagttgtagagggctaattcgctcttttgtatttatgttgatttactaaattgggttcattatcttttatttttcaatatcccagtaaacccatgtatattatcactatatttaataatcacagctagagatgttcatggtaaaagtactgcctttgcacaggagcctgtttctaaagaaacccatgctgtgaaatagagacttttctactgatcatcataactctgtatctgagcagtgataccaaccacatctgaagtcaacagaagatccaagtttaaaattgcctgcggaatgtgtgcagtatctagaaaaatgaaccgtagttttgtttttttaaatacagaagtcatgttgtttctgcactttataataaagcatggaagaaattatcttagtaggcaattgtaacactttttgaaagtaacccatttcagatttgaaatactgcaataatggttgtcttt

SEQ ID NO: 59710 - DNA, 565 bp, Homo Sapiens
  misc_feature (548)..(548): n is a, c, g, or t
tttctaatgctgaaaagatttattaaaggcattctctttataacatttcttgtcagtgcacataattccaatagcaaatattttttcaccattcattcaaatacagtatcacaatgtgtttagtataaatatgtatacaaaattttataaagacactaaaaagtttctgaccaattaagtcatgagtttacaaagcacaaactgaagattaaatactgaatattaagatgaaaactactatacaggtactttaggaagttcttcaaagaagtgcacctcccgggaaatcctcatatgtacatctacactccagcaaactgcacaggcaaagtgctacttgccagattattgactaataaaaacacatatagagcttcagaaagaatacaaggtcaaatgccaaaaataaaaaaagaaatgaaagcaaatgtgctacattgtaccattttaaagagcttgaaaacaccacacaaggttcactaatactgttctgactgcaatgaccgtatttacttacaatctcttcctaacaaggaaactatcagatntattcatggtacgaatg

SEQ ID NO: 59711 - DNA, 525 bp, Homo Sapiens
aaagaggtcttacattatcagaactatactttaaaacagtctctttgagtctatggacaaaatcatactgaaatactgtatgagtatgcaggaacacctataatattttaaggagggtatttttttttttaaagagagcactcacattcccagtctctatgaaagccacccgtctccagcttcctttgcaatggttctcagtgcagattccttatttattaactcttaagagagaaactagtcatactatgtgagttctttaaacacctaatattaacagtttagataggagattttaactctttccatagaagtatttctggcatcttaagtatacagaatataatttaacctattttgataactaaaaatccttatgaatatccgtactatgcttcacatacagatgtgagctgcacagtcaaccttatctgaactgaaaacatttcccatttttacctttattatgaaatttagaagctgcactacacaggtatctctcttcagagctatcctctgtgtatg

SEQ ID NO: 59712 - DNA, 1405 bp, Homo Sapiens
aagtgattcttccacggccaaactagaggcacagagctggaaaaacttcatccccactcagcacatactagggaggtaacttgccagctttgctttgggtcatagttcttacagctaacttatgtgttccagaaaatttaccgagaaatcgacgttgacaggtctggtaccatgaattcctatgaaatgcggaaggcattagaagaagcaggtttcaagatgccctgtcaactccaccaagtcatcgttgctcggtttgcagatgaccagctcatcatcgattttgataattttgttcggtgtttggttcggctggaaacgctattcaagatatttaagcagctggatcccgagaatactggaacaatagagctcgaccttatctctgtgagtcagcaggccccgccttgcttctaaggggatgggggaggcatggggcggaaagggctgttacttgagtgatctgctttttcaagttttgctttaaagagctcttggtctgtcggggccaggcctgtaaccggttgtaagatcccacaatgcacttttacttgcagttgttttccaaccacctattctcaagtccaaaatgcacgcctggctccctcttctcatgagctttgacttgagtgtagctcaaggttaaactaaggagtggctgcaggatcatgcttagaaaaatgaactcctgattagcatgcaagggagaacatgtttatataaagaaatccttcagctgaaattcaagttgggttttgggaagatccatcattcttagagtggatctacttaaaatactttaagcaaattagttttctctactccctccccgtttaagataaaactaatactagtaaatacgtttgccatttattattgttattgcactcatgtgtctggaaccctagcaatacacatctctgaaatgatcatcaatctgaattaagtgggtatgctaatttcacaaaaagcaaagcgtaaaatgttctcgtgtcatcccaatgacaggaagttctctcactgaaagaaagaagccaggtggggtatacttccattatcacctggctccagtcagcatttcctctatactcagggaaggccacagagggccgggcgaagtggctgacactgggtgagaatggcagttgtcagtcctgtccgtgtaacagaggagtgaagtggtgaggagggcaggtctaaggcactggcagctcttttccatggattttgaactctggaggaaggcagcaactaaataactgtctcattctgctattatgcattgtattagcaaagtgaaaatatagtctatctggttacaaataacactaacttgcttaaaactttacatatcctaggaaatatctctacccctagattgcaatgtagagtcaaccccatctct

SEQ ID NO: 59713 - DNA, 1866 bp, Homo Sapiens
ctggaaccggatgaggacctgcagcgcctgcagctctcgcgccagcagctccaggtcacgggagacgccagcgagagcgccgaggacatcttcttccggcgggccaaggagggcatgggccaggacgaggcgcagttcagcgtggagatgccactcaccggcaaggcctacctgtgggccgacaagtaccggccacgcaagccgcgcttcttcaaccgcgtgcacacgggcttcgagtggaacaagtacaaccagacgcactacgactttgacaacccaccgcccaagatcgtgcagggatacaagttcaacatcttctaccccgacctcatcgacaagcgctccacgcccgagtacttcctggaggcctgcgccgacaacaaggatttcgccatcctgcgcttccacgcggggccgccctacgaggacatcgctttcaagatcgtcaaccgcgagtgggaatactcgcaccgccacggcttccgctgccagtttgccaacggcatcttccagctgtggtttcacttcaagcgctaccgctatcggcggtgacggccctggggaacggcaggcaggtgtcctcgggggcacagtaaaggggcttcggtgaagctggtggtcactccggggccgctgtctgggctgcagggccgcgggttcacgtcccacctcaggccgcatctttctttcgccaggcctcagtttcctcctatataaaaggggggtcaccattgagcctgccatggtgagctgaggagacactgggacaggctggcctagggtcctgatgcaacggagggggcgctaggggcatctttcgagcacgagggtggccagcagccgccagctgacctcaccgtccaggcggacactctccaccgcccctcagccaggctgggtggggcccacagggcctgccccaagtggcggccacacagggtgttgtggagatgggccagaggggcctgggcttggcggtgccaggctcgtgagaagcaggaaactcaaggccagccctgccacatcacggggcacccactgggcgtgaggcagagcccgcggctgtggggcagctccagccctgcccacaggccaccctcgcccgcacaggcagcactgaggccgggaccctgctggcgcccgatccgccactgcagaagagaccctctgtggacacccacactctgcagggactggcccccaactcaccccgtgctggctggtggggtccatttccccgcagcgggtatggaggatgcgtcgaggtccctgtctctgtcaaggtcgtgggaaccaaaagtcactgagccgtcctccccccacctctgagcacagggcctggagggcaggggctccccgaaggctgggggttggagaagggtgaggggcttcccccagggatccccccacctggcctgctcacggggccttggagcatgagaccagtgaccccgagttttgcccatatcaggacagtggctccttctcactcccctttctcaggccaggagggccgagggccacacgggtgccacagcccaggtcggagtggcccagccggcaggcttgttcttcagcatccgacgggaacatctccaacagaagcaaaacggaaagtgcctcccggacccccagagggccacccaacctcaccagtcaccagccccagaccacccacagcccctcccagacaccccgcctcatctggaaatagttccgtttgtttctctaaaaagacttgtaggtgggaaaaaaaatcttttgttctcatggaattggcctattggcaagatcgcatgtttttttaataaacgttgtattttagaataaaaaaaaaaaaaaaaaaaaaaaaaaaaaaaaaaaaaa

SEQ ID NO: 59714 - DNA, 517 bp, Homo Sapiens
tttttttttttaaataaagtattgtcattattcattgtttaaaattttagaatttattcttcatattgatttattactcatgttcttcacgttaaatattattctttaatgaggtctgaaataatactaacatgatactgagaagacactggcctttatttttctctacctatactctgttagtatttgggacagttttttatacacttgttctatataatattatactttaaatatataacagtattccttcaaatattcctagaatgttactaagcctgatacctctggtaagcacccttctagtttagtgcctgtgtatatctttagtgaagccaataggcttcttcactccttttcaaaggtgtttacatcatttccataatgctaaggcatcaacacattttaggttttcgttttttgttaatcattcttacagtttttggttacttacctcagcaggaatttcgcataggaatagggaatagaaaatagggaataggaataggaagtggaa

SEQ ID NO: 59715 - DNA, 100096 bp, Homo Sapiens
gatcattaggtaaattctcaagtcttgctgtcagccttgttttatttcgaagtgcaggtccagcaccctctaaacacatttccgtcacatttccagcagacgtggaatttcacacagggtgggtctgacatatttcaagggtcagggattcaaatcatttccagaggccgtacctagtgtcccctttctttctgtctctcccattcccaccccaggcccatgaagagacacctaaatcctctcagaggctctcagaacaaagctgaggtctccagagctcaccacagagctttggggttttggaaaggagagaggggcaacagtagaacaaaaggacctgcccagggccccttggtttggagctctcatatctaaccctaagcacccttccttgtcattcacctgccttcacctgcagctgttatcgccaacacaatgcttatgtcccatgctttcagggccttctggagggttcagacaaaactgtgctttctgtcccaaagtctgcataccaaagggacctccctatatgatagcctcctacccccttaccccctgcttttcagggaccctgtggtctctccaatctggtccagctgtccccagctcacctttctctttccctaagacccacatcctcctctcatcaacaagtctgcagctttgccccacggtggacagggcccccaggtcaaacttcaggacctagagagctgaggctgagaaggagggggagatgtaccaaagcccccagctcagcattgttggaaaagctcggctgaagggacacccctgtttctgagtagagaaacagcttgcaaataaagttgtctgggaggtagtagaattggagctctgtcaggattttagtcagtgaagcaacacctgtgagctcaagagttgggagaggaaggaaaggccagggtttggagaaattttctaatatccaaacagattttgaaattccatcatgattttggtgtgaatttttcttatcatctcttgggagaaaacgtccaggattctgttggtggcagaatccatgtcaaagagttaaggtatgagggagggaatgcccaccccatctggcctggaataccttctagatgcttttatccagtgtggcaacagagcagcaacactggcatcaccaggcatgcagaatctcgggccgtatcccaggcctcctaagtcatatctgaatttcgataatatcctcaggtatgatcatgtcagagttggagaagcctctcgagaacccagagcagcccccctaccaccaccaccaccaccacgaggccctgagccagctcagtggctctctgtccctgcactcacccagtggctttcagcagaagcattcacaacaggggagagaggccgagagaggagtcctcaggctggagcctgtggggtcccacacttccctggcccagcctcctgccaccacctacttcttttccctccccttttcattcctggcagccttcatgaaggggaaaagaattgcagctggagcagcagcaggcctgctgttaaagaatgagttctgcagaataaccaaccctctgttgttgagagtgaggggtgttttcaaagtgaactgaaacagggattttcagatcatctgaagggggagcaatggcttcagtgtgtttccagcactggggcatgaaggcaatgacaggtagaataaaacccccctgctctcctgcccaaagtagctgaagcacaagcttacccacagaagaatgtgtgtgtgcacgtatgtataagtgtgagtgtgtatttgtatgtctttgtgtgtttgtgtgtgtttgcttcatttcctcagacagccttcatcccagaatttgtggtgatttcgggatgtcctctcctcttggctgggagaatagcacagactccccgccacagcatgatgggaatctgctccacgtcccttcaggaatccagagaacccagacccctctccgtcaggcccagggagaactgtgacgcctgtccccatggccattcctagccccactgctagagccaggagtctctccagagataccgccaagaatgggaagcagcaaagtgaggagagtaactcacagggctgagggagtgtgcagagagggactggtctcctgtgttcgaagtgacagtgctcagggtcaatgctggactcttcacagaggagatgccagaggcaacctcatgtattagtccattttcacgctgctaatgaagacatacctgaaactgggcaatttacaaaagaaagatgttcagtgaacttacagttccacgtggctgaggaagcctcacaatcatggtgaaggcaaggaggagcaagtcatatctcacatggatggcagcaggccaagagagagcttgtgcagaaaaaaaaacctatgaaaacatcagatctcctgagacttattcactatcacgagaacagcacaggaaagacctgcccccatgattcaattacttcctaccaggtccctcccacaacatgtggaaattcatgatgagattcgggtggggacacagccaaaccatgtcacctcggttccagatactgcccctcactaaggcatgaggctcagtcacaatagtcctttctattcatgagaacaaccacttcctgggtgcaaaacatcctcataacccaggactgaaacagacgtccaccacccaaaatcctattcccagatggccttcctttcctcagactctctccaggactctagtaccttcttgtccaaaatatctgctgccagcaattggctctgcaggactgtggtccctgcagcagctaagatgtcctaattctctggtgctctccatggattcaaggagggggtcttgagaacattctccagccagtgaagcttcttgactgaaaggggactatcctaagtgcctctgggaagccttgcaaccttcctatgattcccagaatggagcagcctgcagagcatcctaagagaaactaaggtccaaagagaaattttcttggcacctctctctaaagcaaaggaaaaaaatagcacaaaatagcatatcaaaaaagcatcttactaaaattatattgagagcttatacaaattataagataattctaagtgcaccggtacgtaaacttagcaaagacatgaaaagaccattcatagaaaaggttattcaaagcctgtaaatgtttagtccaggtaggaatcaaagaaatagtaaaatagtgatgaaatactatttttatccacttgtcacagactagttttgtgtaaagtgatcatatcacactattttttttttttttgagatggaatctcactctgtcacccaagctggagtgcagtggcgcaatctcagctcactgcaacctccacctcccaggttcaagtgattctcctgcctcagcctcccgagtagctgggactataggcacatgccaccatgcccggctaattcttatatttttagtagagatggggtttcaccatgttggccaggctggtctcaaactcttggcctcaagtgacctacccgcctcagcgtcccaaattgctgggattacaggctgagccactgcgcccggccatatcacactttataacctgggcatgcaggccaattccaacgtcttccattcatctgctgatggtcttaagattccaagggcagcacccttagcccttgctcttggggagaagaactcacagcacacctctctccaaaaagatcttctctcttggctggtcaaagtgcagtgctgttttcaaacaatttatcacaaccagttacaaatgtctttgttccttctctactcccactgcttcactcaactagcctaaaaaaagaaaataaatttaaaaaaaaaaaacaaagatatcttctctccaaagttaattctctctccctgtaatttccaacaactctgccattttatacaactttgatgtgggtgtagattttaagagtagcttaacctttatttatttatttatttatttatttatttatttgcttttcctttgaattgctgcatctcagaccagcaaatcactttggaatatgatatgtgttgtatttcccaaacattgcatctcgaaatcccaatcaaaatttccagtttaacatcctgtttgactaacattattcagtgcttaataaatgatggattttttttttttttgagacagggtctcactttgtcacccagctgtagagcagtggtatgaacacggctcactgcagcttcaatttcccaggctcaagtgatcctcccacctcagccccccaaacagctgagactacaggtgtgcaccatcatgcccagctaagttttgtagtttttgtagagacagggtttctccacattgcccaggcttgtctagaactcctggcctcaagcgatctgcccaccttgacctcccaaagtgctgggattacaagtgtgagccaccatgcccagccttgagttaatttctgtgtatgttgtgaggtaatctcattcttttgcatatgcatatccagttgtcccagcacaatttgttgaaatgactgttctttcccgactgaattgtcttgacactcttatcaaaaataaattggccataaatttaagaatttgcttcccagctttcaattctattccactgattgaatttatgtttatgtatattgttcttctttttcaatattttttatctactttgggtcttttgtaattctgtttgaattttaggatctgtttgtctatttcttcaaaaaaggaaactggaatttttataaggattgcaatgaatttttttatcaatttgagagcaccaccatgttaacaacattaaatcttctaatccataagcatggaatatatattatttatgttttctttaatttctttcaacaatgtcttgaagttttctgtgtagaagcctggcacttccttgattacatttatttctaagtattttgttcttctttatgctattgtaaattgaattgttttctcattctcctttttgtattgtttattgctagtgtatagaaatagaattgattttaatatactcatcttgtatactgtgatgtggctgaactaatttattaattatagtaagctgttgtgggttccttaggattttctctacacaagattatgtcattttcaaacaaagttttatttcttcctttctaatctagatgtctttttttcttgcctaattgccctaaatagaaccgccagtactagctagaggtgttgttgaataggtgtgataagatcacacatccttctcttgttccttcttctaggaggaaagctttcagttttgtatatgtcttttatgtttacctatgtcattacctttgcaactgttctttatttcttcatatgatctcttactagcattctttcatttcagtctgtaggacttctcttagtattttctgtagggcagttatgctaataataaattctctcagtttttattatctagaattgtctcaattcctccttcatttttgaaggatacttttgctggttgtagaatccttgactgacagcccttttctttctgcattttgagtatatcgttccagtgtcttctggcctccatggttttgaggagatatcagctgttaaacttattgaggatcctttgtccttaatgagttgcttttctcttgctactttcaagattctctcttaagttgttgttgttttatctggtctttgacttttgacagtttgatcatcatgtacctaagtatggatgtctttgagtttatcctacttggagtttgttgatagcaaatgtgatgcatttgcaaccgtatattttctccatggaaacactattttctattagccatctccacagatccctgaaggtcaaggccctttggccataatttcaaccttcctgattattataataataataactactttgcttctgattattaagtgctgccaaatagcttctgctgattcagaatcctatcattcctattgctattagggaaccagtatatccagtatataagggcatctgctgtcagcctccgtctacagaggatgaacactactgagattcttacagcttctaaactcctcatcaccagcacattcattatttctttggtgaaaatgagtattatccaggacttcccaaggaatagagtctggtggtggattttccaatcttttgttatagatctattctcccacatccatttctctgagaactgtgaaccctttactcacaattttccatatgagttctgacatctcaactttattaatagaagctcttgttgttttccagctttccaaaagccaccccagtatcatttcatatcaacctcctaagaataaacttgctagggtgttaaatcctgtgtcccataagaatgccctatattgacaaactcctacatccagctttctatttttagtcccctccctttgatccaggatcttcagaatcttctctctgatttattttccttgctcctgatgacacatgttgtccaagtcttgaagctcctttagtatctaatccatccctctccttagtaagtcaagtacttccccagttgggccatgctaagatttgatttttgttatgggtctagtggccaaagggggaggtgcaacacatcctgaggggagccagcatttccttacaatgaatttgtctagtgtaagacttttgcaaggttttcaagcaagagtgggcctctatcttccaataaaaagtgtgagccacttctgcaggtccaaatggtccagaataatctgatgatccaaggacctcaaagggcatctatctaatatcaccatcccatgtctcagggtcttattctttcctattgaggtcctggttttggtactagaaacttccctaggctgaaaaatttgaacttctctgtagttatgccactcttaaagttaaatattcagcctggtctctctgccttcaggcaacgagagataagggtctctttaaatgttgccaagaaggcattgtaactcttatattttgctttaaattgattacttattgtcctgagcctttcatttttttctctttaaggcatcactgaagctcagtaatagccacctaattccatagtcctttattttattttattttgttttgttttattttatttttgagacagagtctcactcttgtcacccaggctggagtgcaatggcgtgatctcagttcactgcaacctccgccaagtgattctcctgccccagcctcccgagtagctgggattccaggtgcccaccaccatgcctggctaatttttgactttttagtagagatggggtttcaccatgttggccaggctggtcttgaactcctgacctcagatgatccacctgcctcagcctcccaaagtgctaagattacaggcgtgagccaccacacctggctccatagcccttatacttgcaatttgtcttatatctcttaaatgccagacacattacatcagccagtgaatctaattccacctgtgtcctagcctagttattccgagtaaaagtcttaacacttgcactgctaaagcaagtcagaaactatgcctgccatcaacatggctgtcccccttgccagagggctgacaagtaacccagccctagaatcccattcttatgttgtgcttcctaggaccgctcctggtacccactgtcttaggtttgattccttagaagcagaacttaaaagagacttgaatacatgtgattttttaggttggactcaccagtaaaaatctctaaggaaatagaggaagcagaaaaggtaatgtaaaaaaaaaaaaaactgtgccaaatgtgatctcaggtaaggtttgaacttgatcttgtccacaggggaccctgaagcataaatcataccacagattttatccacttgaggtaaaagggctgttcttttgtactccaataacattcagtcattggcattgggatgccatcggggagaggaagaaatcatattatcccgggtgaagccatctcttttttttatttttattttttttgtttgagatggagtctcactctgtcacctaggctggagtgcagtggcatgatctcggctcactgcaagctccgcctcccgggttcacgccattctcctgcctcagcctcccgagtagctgggactacaggcgcctgccaccatgcccggctagttgtttgtctttttagtagagacagagtttcaccgtgttagtcaggatggtctcgatctcctgacctcgtgatccgcctgccttggcctcccaaagtgctgcgattacaggcgtgagccaccatgcccggccaagccatctatttagaaaaggagagagttcatgagccaataatagccaccattaacaacagcctgtgagtgggcatgccagcccagaaaaggacatctagacagggcaccaacagtagataagaatgacagtagctttcttgttggaaacaatataagctagaagacagtggaaaaacatgtttaaagtaatcaaaggaataaattgccaatgtagaattatatacccagcaaaaatatttttcaggccaggtacggtggcttacacctgtaatcttagcactttgggaggctgaagtgggcagattgcttaagcttgggaattcaagaccagcctgggcaacatggtgaaaccccgtctctacaaacaaaaaaatacaaaaattatccaggtgtggtggcacacgcctgtagtccagctacttgggaggctgaggtgggaggacagcttgagcctgggaggtggaggttgcagtaagctatgatcacatcactgcactccagcctgggtgacagagggagaccctatctcaaaaatattttttttcaaaagctgaggcaaaaattaaaactttttaagatatataacagttggaagaattcatctccagagtgaatgaaaaaacatatatgcaccatgataaatggtaaaggaagtcctttgagctagaagaatttgaaaccagatagaaacctggatctacgttagagaataaagaacaccagaagtggtaactatgagggtaaatataaagattatttttgttattatttaaatcgttttaaagataattgataaagataattaacaaggacaaacttaagagaatatagatgatagtcgtgaaaaggcacttcacagaagaaatccaaatggccaatggacaaatgaaacgtttccagagtcaacccttccccactttatctctaaagataaagacaaagataatctttcacttaaagcgaaaagataacaatgtattatggggtttatagcatatattgaggtaagatatatggtaacaattatataaaagccaggagggaagaaatgggagtatactgtaaggttcttacaatgtgtgaagagtgctataatatcaattgaagtagactaataacatgaagatataaaccataagcctaaaataacccaaaaagggttatagttaataatacaaacatggaggtaaaaataaaattatatataaatatatgctcaatccaacagaaggtagaaaaagaggaaagggggaacagatcaaacaaatggcacaaatagaaaacaaatagcaacatgagaggtttaaacctaaccatacaaatcatcacattaaatataaatgatctaaccattccaatttataggcagagattaacatattaacttacaaagcaagacctaacagtatgctgcccaaagataactcactttaattataaaggtacaaggttaaaagtaaaataatggaaaatataccatgctgacactaatcaaaagtaacctacagtgactatattaatatcaaagtagatttcagagcaaaaaatattaccagagataaagaagatatttgattgttacaaatgagtccatttatcaaatcctaaatgtttacacacgtaataacagagcttcaaaatacgtacagcaaaaattaatagaaatacatggagaaatagacaaattcacaaaatagttaaggagccaacacccatctctcaaaaattgataggacaagtagacagaaaatcagtaaacaaatagaaggcttgaacaatactataagccaaattgacctaatcaacaaaattgacaatagaacattctacgcaacaatacattcttgtcaagagcacacagaacatctaccaagatagatcatgttctacaccataaaataagcctggatacatgtaaaaggatttaagtgatacaatatatgtctttgatcacaatggaattaatagggatggtttcagtgcatatatatatatgtcaaaacatcacattttacattttatgtgcagatttttgtatgttacactttgctaaagctgcttttaaaaatatatataaagagcatgaaaaagcaagccttgttatcagggatatataaagaactacaaatcaataacaaggacaaacttaagagaatatagatgatagtcatgaaaaggcacttcacagaagaaatccaaatggccaatagacaaatgaaacgtttccagagtcgacccttccccgctctgcaaaatcacttctcaagaagaagccacagagtcaggtgtgttcagcacatttttgctcacaacatgtgattatatccttggaaaccaagagttgtgaccccaccattctgggttacacagatggtctagccagagtgaccaaagtccttgtctaaatgtctgaagtgggagtggaaagtggggagctgcctaggacccaggaaataggggacatttttcagttgcatgagtttctcctgagtcctcaatggctccatttataaatgtccctaaccctgggtcagtgtgggtatcgggggaggagactaaagttggtgatggggattggggggatggggattctgcctaattatttctaagcttctgacagcaccctaaagcacaaagacaaacttctctttcacaattattttctgaggattaatgccagaaaagaagcccccaagggtaaagggagctctcattccacttcttctatcaacaatgccctctttgtctctctccttcccaccagacaagaccagcctcctcccacagccatacgttgacaacacgtgccaaggcctggggcaacagggtacccagggtgaagggctcacccaagagtagggagcgaagagaaatgtggaagctcagcacctctgtgccccaagaacgatgatgaagtggcgtcatttgtctggagtaatacccaagattcattgcctcacgccaaggaaatcaagaaggtggagacgcacaaggaggagtttaagattggaggtttaataggcaaaagaaagagaaaaaagaaaagctctctctcctgcagagagagagggacttccgagtgggtcttccggttttgtggtgaaatgcacggggggggggttttatagacaagcttgaggaggcagtgtctgatttacatagggcccgagagattagtcagaccaggtgtgccatttgcatagcgcaccaacaagttggccatctcaccttaaccttttattatgcagatggggtctctacttggccatcaccacgttgcctgcttttttactgcaagcgtgttgacaaaggaaagggaagagggcacctccatgttgaatatacctggcttccaggtgtcccttttctattggcacagctgttggcatttacctatgcaagcttttagcttgcttatctatgcttgcagcttaatttttcaggctgcttattgttagaaaagaaattatttgggggctgcttttcattaaagggaaatcttaccacggactctcttaccctcactatctgcctaaataatttttttctagctcctgtatcaatgacagaagggatctttcttctccctccctcttttccacacctgggtgcatctacctggtttgggggagggtgagcgacacaaggaacaaaggttgagaaggaatcagcagaagaaaaggctcagaactgaaaacaaagcatcttccacagagtcaaatataacagcacagggcctaggatactgtgtgacctagagaaaagggagcaaagccagccttgggcccatctttccgcagaaatctggaagaaacaaaactataaactggtgaggtcttaagagtgcacaggttttaaatctgtaatattgaccaacagtcagcaaatacatttctttctcaccagtatggcaatgattcaactgagcaacaagttgaaatcaaagaactggtggtacggaggcagcatcctggttttattccatgctcatcccttcctgttcatgcctggatttttttaactctttttctttttctttgtgaaacagggtctcactttatcatccaggctggagtgcagtagcacgatcttaggtcactgcaacctcaacctccaggctcaagtgatcctcccacctcagcctcctgagtagctgggacaacaggtgtacaccaccatgcttggctaattttttttgtttttttgtgtggtttttttttgtttgtttgtttgttttgagacggagtctagctctgtcacccaggctggagtccagtggcgtgatctcagctcactgcaagctccgctcccaggttgacgtcattctcctgcctcagcctcccgagtagctaggactacaggcgcccaccaccatgcctagctaattttttttttgtatttttagtagagatggggtttcactgtgttagccaggatggtctcgatctcctgacctcatgatccaccctcctcagcctcccacagtgctgggattacaggcttgagccactgcgcccagcctttttttttttttttttttttgtattcttttgtagcgccgtggtctcactatgttgcccaggctgcctgaattttctaataaattctccttcctgtactttctttctttcttttttttttttttattttggagacagagtctagctctgtcacccaggctggagtgcagtggtgccatctcagctcactgcaacctctgcctcccaggttcaagtgattctcccgcctcagcctcccgagtagctgggattacaggtgcctgccaccacgcccagctaattttttgtattttagtagagatggggtttcaccatgttggccaggctggtctcaaactcctgacctcaggtgatccacccacctcagcctcctgaagtgctgggattacaggagtgagccaccgcgcccagcctccaccatgtgctttctagcatataatggcaagtctttctgcccatatgagcatgcaacactagaaagctgacaggagaaaaaaggctggacatgaagagcatgtgggcagctcttgaccccagttgccaggtcctccttcttgacttcttgctgccccacagtaggactctgcagttcacccccaccgcaaagtcctctacattttcacaagtccttacttagtgactttctctacaccagaatgtttaggcccagtgaagtcctccccaggtttcaggccactgcccaccccagcaatcaggccttcttccactatggttttgaatgcaggaaggctgagtctctgggatcctggagccaggtggtggggatggaggataggagaagatccaagttcagaaagtcaggaaagaaatcttgtgggaatgtgaattaattcaaccattgtggaagacagtgtggcgattcctcaaagatttagaaccagaaattccatttgacccagcaattccattactgggtatatacctcaaaggaatataaataattctattataaagatacatgcacatatatgttcattgcagcactattcacaatagcaaagacatggaatcaacccaagtgctcatcgatgatagactgaataaagaaaatatgctacatatacaccatggaatactatgcagtcataaaaaataatgagatcatgtcctttgcagggacatggatgaagctggaaaaccattatccccagcaaactaacgcaggaatagaaaaccaaacactgcatgttctcacttataactgggagctgaacaatgagaacacatggacacagggaggggaacaacacacactgggtcctgtcaggggaggatgtaggttaggggagagcattaggaaaaagagctaatgcatgcagggtttaacacctaggtgatgggttgatacgtgcagcaaaccaccatggcacacgtttacctatgtaacaaacctgtacatcctacacttgtacccaggaacttaaaaaataaaataaagccaagcacagtggctcctgcctgtaatcccagcactttgggaggccaaggcaggtggcttacctgaggtcaggagttcaagaccagcctgaccaacatggaaaaaccttgtctgtactaaaaacacaaaattagccaggtatggtggcacatgcctgtaatcccagctacttgggaggctgaagcaggagaatcgcttgaacccgggaggcagaggttgcagtgagctgagatcgtgccattgcactccagcctgagcaacaagagcgaaactccatctcaaaaaaaaataaaattaaaattaaataaaaaagaaagaaatcttcatggtaaccttgaaaaacatcgtagactctgccaaggagagagagggccaatgcactgaggactgtggttggaaggtagaaacatgctgttttcacaagctcatggggcagccccaagcaggtgtgaaaaggaggattagcaggaagaaaatatcaaagccctgaaggagagatcaaaggtaaaagtagaaatgcacagacatttccccatttcccaaccccacaacacatctgcttcctccttccccatcattctctcatcttctctccaggcctcagctcacacaggaagtgatagcagagtcacttcttatccaggcacccctgacctctcacctccacacccaactcatctgaggatgatccctcttagaaggtatcagacttagggctggacatggtggctcatgcttgtaattccagtgctttgagaagccaaggcaggaggatgcttgaggccaggagttccagaccggactgggcaaaagagcaagattcccacctctacaaaaatttaaaaattagctgggcatggtggtgtgcacctgcagtccctgctgcttaggaggctgaggcaggaagatcgcttgagcccaggagtgagactgcagtgagctatgatggcaccactgcactccagcctgagtgacagagcgagaccctaactcaaaaaaaaaaaaaagaaactaagaaagaatcaggatggtggctctgctagtcactacctgcttgacaatgagcaagtaacttaattctaggctgcattgcatcaatgagttgtgagaattcagtgtagcaaaaccagcctatatgagtttcctgagggcagggaagatgtgcctcttgatcttccctgaaacccctttgccaaagacaatgttcagcatttagaacttgcttggtaaatagagcccatagtttgcagtccatgctagctactcacaaattgttgttttccttgccacagactgtgagaactacacggaaccctaaggagctactaatccagctgacacacgtggaaactgactcagactaagtgatacatacaggccatatggactaccagacacagggcaagactagatgctggttcctcagaccaggtgaagtgctgataccaaggcatgcaataaggggtaaagggtggaattagagaacaaaatgctgagaatctggctccaggaagagagataagaaggtagcctggactgtctcctaagcaggagtgattaaagcacggggaactgggaaagaagaagttatgagttacagggatgatgggcactaggtatttacagtagacgggatttattaagtactgtgtaccaggtgcatgttatttcttttattttaccttaattgttttagaaacagggtctcactctgttgcccaggctggaatgtgatgatgcagtacagctcaccgtgatctcaaactcctggactcaagcaatcctcccacctcaccctgagtatctgggactacaggcatgcgccaccacacctgactaatttttttaaattattttttgtagagtcagggtcattaatcataatgctcactatattgggtaaaatccttattaggagttactcttttaaaaaatcagatggaggaggttgaagctctaagcccaggttgcactgatctcagaaagtgggattcaaggagaggaaaacaatggagaattattacaaatggatggtagggatggggacaccaggaatttgggatgaggatgctaaaagtaagataaatgatggccaggcacagtggctcactcctgtaatcccagcgctttaggaggccaaggtgggcagatcacctgaggtcagaagttcgagaccagcctgaccaacatggagaaaccccaactctactaaaaatacaaaattagccgggtgtggtggcgcatccctgaaattgtggctgctcgggaagctgaggcaggagaatggcttgaacccaggaggcgaaggttgcagtgagccaagatagcaccattgcactccagcctgggcagcaagagtgaaactccatctcaaaaaaaaaaaaaaaagactagaagtaagaattctacaatcattagactgggcagatgaactcttaagacgggaagaaaagttgcaaaacgttagagctttaaaataattttacttggttttggaatacttatgaatgtcatgtctggttctcttactatttacaatatatccaaagaaactgtttactgacttcagcggctgcaaatctgatttttctcttccagcccactcataggctccttcttgtggcaaaacatgatattactcctaagactcaaacaccaacctaagcacaaatatctggcaagtgaagacattaagagttttgttttatttgcaaactgtgcatctgacaaaggtctaatagctagcatctataaggaacttaaacaaatttatgagagaaaaacaaacaaccccatgaaaaagtgggcaaaggagaggaacagacagttcccaaaagaagacatacaggcggccaacagacatatgaaaaaactcaacatcactggtcattagggaaatgcaaatcaaaaccacaatgagataccatctcataccagtcagaatggctattattaaaaagtcaaaaaatgacagatgctggcaaggttgcagagaaaagggaacattttcacattgttgctgggaatgtaaattagttcaatcattgtgggaagcaatatggcgattcctcaaagagctaaaagcagaactaccattcgacccagcaatcccattactgagtatatacccagaggaacataaagcattctaccataaagacacatgggccaggcgtggtagctcatgcctgtaatcccagcactttgggatgccaaggcaggcagatcacctgaggtcaggagttcaagaccagcctggccaacatgatgaaaccctgggctctactaaaaatacaaaagttagctgggcacagtggctcacacctgtaatcccagctactcaggaggcccaggcaggagaatcatttaaacccaggtggcagaggttgtagtgagccaagattgcaccactgtactccagcccgggtgacagagctagactccgtctccaaaaaaaaaaaaaacaaagacacatccacatgagtgttcattgcagcactatttacaatactgaagtgccgagaccagctcggttggggagaccctaacccagcggcgctagaggagttaaagatgcacacacagaaatatagaggtgtgaagtgggaaatcaggggtctcacagccttcagaactgagagccccaaacagagatttacccacatatttagtaacagcaaaccagttattatcattgtttctgtagatattaaattaactaaaagtatccattatgagaaacaaagggatgggccaaattaaaggaataggttgggctagttaactgcagcaggaacacgtccttaagacacagatcgctcatgctattgtttgcagcttgagaatgcgtttaagcggttttccgccctgggcaggccaagtgttccttgccctcattccttcattcctgtaaacccacaaccttccagcttgggcgttagggccattatgaacatgttacagtgctgcagagattttgtttatgaccagtcttggggccagattatggccagattttggggggcttgctcccaacagtgaagacatggaaccaacttaaatgcccatcagtgacagattggctaaagaaactgtggtacatatacaccatgaaatattatgcagccataaaaaagaacaagatcatgtcttttgagggaatatggatgaagctggagtctataatccttagcaaactaatgcagcaacagaacaccaaataccacacgttctcacttataagtgggagctaaatgatgagaacttatgaacacaaagaaggaaacaacagacactggggtctgcttgagggtgggaggagggagaggagcagaaaagacaactgttgggtactgggcttaatacctgggtgatgaaataatatatacaacaaaccacgatgacacatgtttacctatgtaacaaatcttcacacgtacccccaaacctaaaataaaagttttaaaaaagagttttgttttcaaaatcctttcttcctaggaggttgcaaattttactgaataagaataaccagggatggggcctggcacggtggctcatgcctgtaatcccagcactttgggaggctgaggcaggtggatcacctgaggtcaggagttcgtgaccagcctgaccagcatggagaaaccctgtctctacaaaaaatacaaaagttagcagggcatggtggcacatgcctgcaatcccagctactcaggaggctgagacaggagaatcacttgaacccaagagacgaaggttgcagtgagccgagattgcatcattgcactccagcctgggtgacagagcgagactctatctaaaaaaaaaaaaaaaaaaaagtagttccttggaagttaaaggttaagcttaaggactgattcaaaggcaggtgcaaaaaataaaccctcttttgtaacccagaactcatttttcagtatgagttttgatacatataagaaggaaagctaggcatggtggctcacacctgtaaacctagcactttgggaggccgaggcgggtggatcacgaggtcaggagatcgagaccatcctggttaacatggtgaaaccccggcactactaaaaatacaaaaaattagccgggggtcgtggcgggtgcctgtagtcccagctactcgggaggctgaggcaggagaatggcgtgaacccaggaggtggagcttgcaatgagccgagattgcgccactgcactccagcctgggtgacagtgagaggctccgtctcaaaaaaaaaaaaaaaagaaggaatatgatacctgagatagtttaaaataatggaggtattgataaccataaaggttggttccaggactgtagggttgatcatttaaaagcataggacataaggaaaatctcagctatgttgatttagtattccattggaggtggagcttgcaatgagccgagattgcgcccctgcactccagcctgggtgacagtgagaggctccgtctcaaaaaaaaaaaaaaaaagaaggaatatgatacctgagatagtttaaaataatggaggtattgataaccataaaggttggttccaggactgtagggttgatcatttaaaagcataggacataaggaaaatctcagctatgttgatttagtattccattggaggtggagcttgcaatgagccgagattgcgccactgcactccagcctgggtgacagtgagaggctccgtctcaaaaaaaaaaaaaaaagaaggaatatgatacctgagatagtttaaaataatggaggtattgataaccataaaggttggttccaggactgtagggttgatcatttaaaagcataggacataaggaaaatctcagctatgttggtttagtattccattgtcatgcttacatgatatgtcaagacagcttttcttaaaggcttttaccttgagaacatgattcctagagttgtaatggcatatcccacagatttgtactatgcttgagtgtgattcctcaggaacgaatatgatttgaactcattcacgtttagagagggtgtcaagttgaaaaccaggcagattcacttaccctaaaaatgactctaaagtaaaatgattgaagaaattagattccaaagattctgggtggaaattctgaagtatatttacattcatgtggacataaaagaggccaaaattcaagaactgtgggctgacaggagagctgtggattaagcaccagttctattaaaagggaggctgggcacagtggctcacacttttaatcccagtgattcaggaggctgaggtgggaggatggcttgaacccaggagttcgagaccagcctgggcaatatagcaagaccccattacaggtatgagccactgcacctggcctcatcttttaattagcataaagcccttagttcctacagctttgctccacaagagtgaagtcaacgctgagcctcagcaggacatctcttcccactgtgggccccgaagcttagtgaagctaacttgctggcctctggagaaccaaaatctgtgtctagaaatggttccagcaacttctccacaccccatgatgaaatagattactgggctttttcctgatgtgatgcaagatcaaatacactttgcataattcagattttagactacaccagccaaaaccacaaggacactgtgctactgtcttgagttggtgactctcttttcattctacctaatcaccctgtggccctgggtgacagccagcctctctccagccaagaagatcatgactacagttgtgtagtatttggttcataaaagatctgaacaggaaattcaggccattgcaggctggagtgcagtggcgaaatcatagctcactgcagcctcgaactcctgagctcaagcaatccttcctccttagcctactcggtagcaaggactacaggcatgcaccactatgcctggctcattttttttttttttttttttttggttttcgtagagacaggggtctcaatatgttgcccagctggtctcgaactcctggactcaagtgatcctcccacttcagccttccaaagcactggcattacaggtatgaacaaccatgcctagccccatattagtattttcccttttttttttttttgtacttttagtagagtcagggtttcaccatgttagccaggatggtcttgatctcctgacctcgtaatctgcctgccttggcctcccaaagtgctaggattacagacgtgagccaccacacctggccccatattagtatttttcctgtacaatattggatgagcaatatgtaaaaatactgatttgaacaggtttattccatttagtcagagaagataagccaaagcgctcaggaggaaattgcccagccagtgacatttcacagtaatgtcgaatactttgagcaaataaagaatagcacatgacaggaggaacatttcaatttttttaaaaaaagcaaagggcaacatgagcaggccagggcaaaggaagatttgaatgtgagctctggcgtcatgacaggagagatgggtaggggtagaagaaggggaggaaacctcagaagatccaagtcttggccagatgtggagggggagcaatggggcacagagctactcagaattctgcaaactctatttatttatttatttatttatttatttatttatttatttatttatttttgagatggagtcttgctgtgtcacccaggctggagtgcggtggtgcaatctcggctcactgcaacctccgcctcccaggttcaagcaattctcctgcctcagcctcctgagtagctgagattacaggcgcccgccaccacacccggctgatttttgtgtgtttagtagaaatttttgtgtgttttagtgtgttttgtgtgtttagtgtgtttagttcaccatgttggccaggctggtcttgaacgcctgacctcaggtgatccacccacctcagcctcccaaagtgctgggattacaggcgtgagccacagcgcccggcctgaaaactcttttacacaaacccaagcgtcttctgtgcctcagtttccccacactccttggcttcctgggagacccggcccttcactccagccgctccgcatctccacaccatgttggtcttggctcacacatccagagcttgtttgagaaccctcagctctccagggcacagctcaaggatacaggaattggccctggggttgtcagatcccctccaagtcccagggagtgagtttcctcaaatgagtcaccaaccgccatgcacaggtttcaaccgcaaaagacacagcagagctctcaccttgaccttctcatgaaacctcacctgcctgtgtctgtgcttttccttcccgtggcacagaactttccttacatcctgtcctcagcctcccactctggattattccaaagtccatcctccaagctgggctccttaaggaaatcattcccagccttcagaattctaagtcaaacatctcatctttttggaaagcctaaatttgaagttatccttccccaccacccgcttttttttttttttcttaatgctttgggttcaacttggaaatcaaagctgagaaattacttcttcagactaatgaaatccgcatttcctcttctggggcaaaaagttctatctgaacatatagagccccagggaagaaagctcaatcaagagggaaaaatacagcaactgtatttttcaattcaaaaaggatgacaccctcaacaaataaaaggataaagaatcaacagcttaggtcaataaggaaaccaaaagctcgtgtgagcaggtcagggctaaagaacattaaaaatgggatctggcctcatctgtaacaggaaagaggagtggggtggacaagggggaggaaacctcagaaaactgaagtcctggacaggtgtcagggttggggagaggggcacagagccactgagtcacccagagaaaaacccccgtagggaatgatgtatcagagatgtgaagacctaagagcttgccaagaggcggtcaaaagaatgtttctgccaggggaggtcggtcactactgtaatcccagcacttttgtaggctgaggctggtggatcacctgaggtcaggagtttgagaccagcctggccaacatggtgaaaccccatctctactaaaaatacaaaaattagcttggcatggtggcagacacctgtaatcccagctactcacaaagctgaggcaggagaatcacttgaacccagaagatggaggttccagtaagccaagatcacgccactgcactccagcctgggtgagagagcaagactccatctcaaaaaaaaaaaaaaaagagtgtttctaaccaggtcagcatgaaacagcaagtgggtgtgggggacacaggagcctgacaagggaggtgacctgggggtagggctgggccatgagcatagactaggcatcagggatgataaaggagtccagagaacccaatgtggttccttcgacagtcactgcttgctcccccaaaggaggaccactgttagattctcccacaggtaggaccaaatccaagtgcaaattgaagaggccccaacccaaagagtctcattgccaaaaatgatctcttttaataatttctcagtcaccttagaatagcatgtcactttgtacaccccatgttatactgttcataacatttaacagaagagaggatgatattactcccaatgtcacaggaggtgtacactcccctatgatattgttcctaatctccagaggggaagaggatgatactacttccaatatcccaggggggtgtacagccccccctgtgatatttttcataatatccaaggggaaagagggtgatattactccaaatatcacgggagtgtacaccccccatgatattttttgaaatatacatgaggagaaacaatgatattactcccaatattgcagggggtgtacacgcccttgtgatactgttcataatattaagggaaaaaaagaatattattctctcccgcctgaatattacaaacaatatcacggggggaggttcatcccctgcgatattgggagtaatatcatcttctcctcccctaaatagtaaaagcaatatcataggggaatgtacaccccctgcaatactgggagtaatatcatcctcccttcctgtgaatattatgagcaatatcacagggggtgtgatattgttcataaaattgttcgtaatacgcccgctgatattgttcgtaatattaaggggcagagatgataatattactcccaatatctcagggaacatacactcccctgtgatatcatttataattttcaggggcagagagaaaaatgatctcctttaataatttctcagccaccttaaaatagcatgtcactttgtacaccagatgttatattgttcataatattcaacagaagagcggatgatattagaagaggggaggtacaatcccctgtgatattgcccgtagcatccagaatagagaggatgacattattccacatatcgcagggtgtgtacaccccctgtgatattgtttgtaatatccagggaggaagaggatgatattgctcccaatattgcaggagatgtatacccccctgtgatattgtccctaatatccaggggcaagaggacgatattactcccaatatcgcagggggtgtatacttctcctgtaatattgttcctaataccaagtgggggagaggaggatactactttcaatatcgcaggaggtatacattcccctgtgatattgtttttaatatttaggggaggaaaagatgatattactcccaatatcacaggggatggacccccccgtgacattgtttgtaatattcaggggggagatgatactattttcgatatcgtaagcactgtgtgtgtacactgtctgtgacattgttcctaatatccacagggaaaaaaagatgattttactccttatatcatagaaggtgtacacccctctgtgatattgttcgtaatatccaggtggggagagaatgatattactccttatatcgcagggtgtgtacaaccccctgtaatattgtttgtaatatccagaggggaagaaatgatattgctccccatatggcagaggatatagaccctcctataatattattcgtaatatccaggaggggagaggatgctattactccccatttcaccgggggtgtgcacccttctgtgatattgttcataatatccagggagaaagaatataatattactccccatatcgcaggggttgtacacccacctgtgatattgtttctaatatccaaggggaagagaatgatattactcccataaacagggaggtgtacacccccctgtaatattcttcataatatccaggaagggagatgatattactcccaatatggtaaacaccctgtgtgtacaccatctgtgatattgttcgtaatatccaggaggggagagggtgatattactcccaatatcgcagggagtgtacactcctctgtgatattctaggagggaggataatattactcccgatatcgcaggcagtatacaccctcctgtgatattgtttgtaatatccagaaggggagaggatgatattactgcccatattgcaggatggtcacacccacaagtcatattctccaaaatatccaatgagggtcaggatgatgtaacttcccatatggcagagggtgtacactgccccgtgataatgttcataatattcagtggggagaggataatattactccccatatcgcagggtatgtacatccccctgtgatattgtttgtaatatccagggaatgagaggataacattactccttatatggcagagggggcacacccccccgtgatattgttcataatatccctggagggagagggtgacattacttcttatatcgctgatggtgtaaaccctcctgtgatattgttggtaatacccaggggaaagaggatgatattactccccatattgcaaggagtgtacaccttcctgtgatattgttcgtaacatccaggggggaagaggatgatgttacttccctgtgatattgttcattatattcagaaagggagagagtgatgttactcccaatatcgcagagggtgtacacccttctgtaatattgttcataatatccaggagggaagaggataatattactcccaatatcacagggggtaaacaccccgttgtgattttgttcgtaatctcctggaagggagatgatattactcccaatatggtaaacaccctgtgtgtacaccgtctgtgatattgttcgtaatatccaggaggggaggggatgatattactcccaatatcgcagggggtgtacatcccctgtaatattgttcctaatatccaagggggagaggagattactgctcttcatatcgtagagggtgtacacccgattgtaatattgttcgtaatatccaggaggggagagaatgatattactccccatatcgcagggggtatacatcccactttcatattgttcatagtatccagagggggagaaaataatattatttcatatatcgcaaggtgtgtacacccccctgtaatattgtttgtaatatttagaaggggagaggatgacattacttcccatatcacagggagtggacatccccctgtgatattgtttgtaatacttagggagggagaggaagatattactccccatatcgcagaagatgtacacccccctattatattgttcctaatatgcaggggggaaggcatgatattactccccatatcacagggggtgtacatccccttgtgctattgttcataatatccagtgggggagaggatgatattacctctccgtgatattgtttgtaatatccagagggggagaaaataatattatttcctatatcacaaggtgtgtacacccccctgtaatattgtttgtaatattcagaaggggagaggatgacattatttcccacatcacgggtggttcacatgcccctgtgatattgtccataatatttatggaggaaatggaagatattactccccatatcgcagggggtgtacattccgctgtgatattttttgtaatatccagggagggagaggattatattacttcgaatatcacagggggtgtacacctccatgtgatattgcttgccatatccgggggggagaggatgacatcaagtttaatattttaaacaccctgtgtgtacactccctggtaatattgttagtaatatctagggaaagagaggacaatattaaacccaatattgcaggggggtacacaaccctgtgatgttgttcataatatcgagggaggaagagtatgatactacttccaatatcgcaggcagtgtacaccacactgcgatattgttcctaatatcgagaagggcaaaggatgatattactcccaatatcgaaggtggtgtactctcccccttgatattgtttctaatatccaggggggagaggatgatattactcccaatatagcagggggtgtacacttcctttgtgatgttttttctaatatccaacggggcagaggataatattactcccaatgtcgcaggggtgtccaccccccactgtaatatctttcctaatatccaggggaaatgaggatgatattgctccaatatcgcagaaggtgtattcctccctgtaatatttgttcttatgtccaggtggaagagaaaatgacattactcccaatattgcaggttgtgtgcaacctccgtgatgctgttcctaatattcaaagcgggagagaatgacattactgccaatatcacagggggtgtacaacccccactgtgatattgttcctaatattcagaatgggagaggatgatattactcccaatattgcagggggggtaacaccccctgtgatattgtatttaatatccaggtagggagaggatgatattactcccaatatagcagaacgtgtacaccccatccctgtgatattactcctaatatccatttgaggagagtatgatatttctctcaatatagcagggggtgtacactccccctgtgatattgttcctaatatccggggggggagaggatgatattaccttaatatcgcaggggttttacacccccctttaatattgtttttaatatccagcggcagagaggatgatattactcccaatgtcgaagggggatacaccccttctgtgatattgttcctaatatccaggggcagagaggatattactgccaatatcgcaaggaatatacaaccctctgtgattttgttcctaatattcagagggaagaggatgatatttctcccaatgtcgcagggagtgtatccccactccgtaatattgtttctaatattcgggggcgagaggatgatgttactcccaatatctcaaaaagtgtacacctccctgtgataatattactcttaatatcgcagggggtatacacccccactgtgatattgttcctaaaatccaggcggggagaggatattatcccaatgtctcagggggtgtacacttctctggtaatattgttcctaatatcgggggggtagaggataatattactcccaatatcgaagggggtgtacacccttaatgtaatatttttcctaatatcgagggcaaaagaggattatattattcccaatatcggaggaagtgtacaacccccatcatgttgtttctaatatccaagtggggagaggatgatattactcccaatatcgcgggaggtgtacaccctttctgtgatattttatgtaatatccaaagaaggaaaggttgctttacccccaatatcgcagggggtgtacataccccctgtgacattgtttttaatatccaggtggagagaggatattactaccaatatcgtagggcgtgtacacaccttctgtgacattgttcctaatatccagggggtgagaggatgatgtgactgtcaataccgcagaaagtgtacagcctccccccaatgccgtgatattgttccaagtagggagaggatgatattacacccaatatcgaagagggtgtacaccttctctgtgatattgttcctaatatccaggtggggagaggataatagtactcccaatattgcagagggtgtacaccccccttgtgatattggtcctaatatccaagaagaaagagcatgatattatggtcaatatcgcagggggtatacaccctccctgtgacattgttcctaatatttaggtaaagagaagatgatattactttcaatatcgcagggggggtacataccccctgtgacattgttcttaatatccaagtggagagaggatgatattactcccaatattgcagggggtgtacaccctgcctgtgatattgtttttaatatccagaaggagagaggatgatattactctcaatatcgcaggaggtgtacaacctcctgtgatattgtttctaatatccaggaaaaaagaggatgatattactttcaatatggaaagaggtgtacacccccacatgatattgttcctaatatcctggtggggaaaggttgatattactcccaatattgcaggaggtgtacacacctcctgtgttaattttcctaatatccaggggatagacaatgacattactcccaataactcagggggtgtacaccccctttgtgatgttgttcctaatatttaggggtgagaggttgatactactaccaatatcgcagggggtgtacaccaccaccccgtgatattctttccaatatcccgggggaaagagaatgatattacccccaatattgaagggggtgtacacccccccagagatattatttttaatattcaggaaggaataagatgatattactggcaatatcgcagggggtgtaccctccgcctgcaatattcttcctaacatccaggtggggaaaggatgatattactcccaatatcgcagaaggtgtatacacccctgtgatattgttcctaataaccatgaaaagagaggatgatattacttccaatatagcaggggttttacaccccaaatgtgatattgtttctaatatccaggaagggaaaatgatactacttttttttttttttttgagacggagtctcgctgtcgccccagctggagtgcagtggtgcgatctcggctcactgcaggctccgcccccctggttcacaccattttcctgcctcagcctcccgagtagctgggactacaggcgcccaccccctcgcccagctaattttttatatttttagtagagccggggtttcaccgtgtttaccagaatggtctcaatctcctgacctcgtgatcctcccgcctctgcctccaaaagtgcagggattacagacgtgagccaccgcacccggcctgaaaatgatactactcttaatatcgcagggggtgtacacccctcctgtgatattgttcctactgtccagggtgagagaacacgatatgactcccaatattgcagagtatgtacacccccccgagatattgctcctaatacccagggaaggagaagatgatattactcccaaaagcacagaagatgtacacccctcctgtgaaattcttcctaatatcaacgggaagagaggatgacactactcccaatatctcaggcggtgtacaacctcatcctctcccaacctgaacattaggaacaatatcacagggagcgtgtacaccccatgcgatattaggattaatatcctctcccaaattggatattagaaactatatcaaagggggggatatacattccctgcgatattgggagtaatattatcctctcttcccatggatattaggaacaatatcccaaagggagagtacactccctgtgatattgggaataatatcatcctctcctcctctggatattaagaacaatatcacagagggtggtgtataccccctgcaatattgagagtaatatcatcctctcccctcccagaatattacgaacaatattacaggggggtttacaccccctgcgatattggaagtagtatcatattctcccctcccccccgcatattacaaacaatatcacaggggagtgtacattccctgcgatactgggagtaatattattttctccccccttccccggatattatggacaatatcacagggtggtgtacacacagggtgtttaccatcttgggattgatatcatcctcctccccggatattgcgaacaataccacagcagagtgtacacccctgcgatattcggaataatatcatcctctcccccctggatattacggacaatatcacaggggggtgtacaccccctgtgatttggaagtaatattatcctctccccttctggatattacaaactataacacaggggcttgtacaccccctgtgatatttgctgtaatatcatcctcttcccccttgcatattatgcacaatatcacaggagggtgtacattccctgaaattttgggagtaatatcattcttttttccctggatattacagacaatatcacagggaagtgtacacctactgcgatattgggaataatattacccactccccctctggatactgcgaacaatatcacagagtggtgtacatctcctgcggtattgggagtaatatcatcctccccttgactggatactacaaacaatatcacagtggggtacacacccactgcgatattgggagtaatttcatcctcttccaccctgaatattacgaacaatattacaggcgggtgtacaccccctgtgatattgggagtaatattatcctctcttcccctggatattatgaaccatatcacagaggtgtgtacaccccttagattttaaaagtaatgtcatcgtctcctttcctggatattacaaacaatatcacaggggaatgaatacccaaagcgacattgggagtaatattatcctctcttcccctgaatactacaaggaatgtcacagaggggtgtacccccgctgagatattgggagtaatttcatcctctcccctcttggatatttcgaacaatatcacaagacagtgaccaccccctgtgatatttgcatttatatcatcctcttcacccctaaatattatgaaaaatatcacagaggggtgtacaacccttgggatattgggagtaatattatcctctcccctccctggaaattacaaacaatattacggtggtggtgtacatcctttgtgatattgagaataatagaaatttctccatcttggatattaggaacaatatcacaaggggggctgtacaccccctgcgatattggaagtaatactattctctcttcctttggatgttaggaacaatatcacaagggcgtatgcacttcctgcgatattagaagtaatatcatcctctcctaccctggatatcaggaacaatatgacaaaaggagtgtacaccttctgtgatattgggagtaatttcatcgtctccacccctggatattaggaaaaatatcaaaaaaaagttttcaccccctgcgatattgggagtaatatcatcctctccctcccaagatgttaggaacactatcacagaggggtgtacaccccccgtacactattaaaagtaatatcttcctctcccccctggatattaggaaaaatatcacagagacctgtacacttcctgcgtattatccactcccaccctggatattagcaaaaaaatcacgggggggtgcacaccccctgcgatactgggagtcgtatcatcctctcccttcctgaatattaagaacaagattacgacgggggatgtaaattccctgcgctattgagagtaatatcattttctcccctcctggatattaagaacaatatctcatagggggtgtacaccccctgtggtattgggagtaatgtcagcttctcaccttttggttattaagaacaatgtcacggggggaggatgtagacccctgcaatattgggagtaatatcctctccacccctggatattaggaacaatatcaaagggggggtgtacaacccctgcaatatttgggtaatatcatccttgtcccccctgaatattaggaacaatatcacagagagtttaaacaccccttgtatattgggagagatattctcccctccccaactgggtattaggaacaatatcaagggggggtgtacaccttctgtgatattgggagtaatatcatctttcttcactctggacattatgaacaatatcacaggggggtgtacactggcaagtaatatcatcctctcccttcatgggtattaggtacaataccacaaggcgtctagggacacctgaacaatccccaagggaaagggggttcaggccacacttgggattgcccaggtcaaggtgcccaggaaccatggcctccaggggaaaccaagagtttcagatgaattcagtgcttgagggcagaaccaatgagaaaatctagtcacatttctacagcgcatcaccgttaaaaaaaggattctctgttatgctaggcaaggagggatgattatttattagcttctacagattagacaatggggtgggggtgggctcaaggtgagatgattttttgggtccaagtctactcaagacaggcatcccagtcttcggtctccaaatccacctcctgtctgtccccccacactgctcctcaggccttgtggatccattgactgtgatttctgtggttcagctcccacatcaggcaggaagggcagctactgggtctgagatcccacattgcctccaacccttgcttcctagctggcctcccagggcaccacgaggggctgggccaggctgctgtgctgcacgtggcaggagtagggggctgtgtcctgcgggggcactgcaccaccacccaggactggtaagtgccatttccattgtgaagaacatctccccgtaactcaggctcctgcacctcgccggcccgagtccagtgcacatcaattttccctgggtagaagtcgtaggccaggcacttcagtttcttcttttctcctggggcctggtggctggtgaccaccacagagggaggatctgtggagggatagagtgtgacactgcaggcttgaggtggacttctcccggcccaggtctcttcctacccccacccctggatgtcagcgatcagcagagctcgaagctctgtacctgcccacccccagccccgggagactttccagaatatcagggaaggctgacgctttccctcttgcccaatccccacctcacccatgtattgactctgacggcaataagttgtgaatgctccgtgtgcttctccatgttttcccacatctcagtgggctttggagttctgtcccccagtctcagtccagctgcttggttcagcccatgcctctatccagcaaccacttccctgcagcactgcacaatcctgagtctcactacgtctccaatccaagtctcagcttgcagccatcaattccgctcacactggcttgctcttgtccttctggggctgacattttacacgcctcccttctctccaccacccagatgggaggcatcattgtagagataaaaaacgatgggatttggaatctgaaatctggaatttgagtcccagctctgcctcttacagacagtgttaccctcacctccctaacctcaagctccttgtctgttaattggagatgatttggggacactcatcaagaaagaatggccttcctggcccattctgcctgaaattttgatgatgttctttttggaccacaaattatattatcccagggaaggaataaatcctaaaagatgaaagctgggggtctgagggacatccaggaacagatgagaccggactaagatgttgcctgagctcctagcctgagatcgtcttttattctgggctcagtactggggagcaggaagcagtgagtaccttgccggtccaggatatttttgctgtatttcaggtatttccgcagagtcgcagggcactcctcctccaggtaagccttggcccgctgcacgtagactggttctgcctcccacttctgcttggttatctgggctgctgggtcgaaggggacccaggctgggatttctttgttgaattcaatgtagtcctttccatcatagtaatatttccagaatgctccgctgcttctgttattctcgatctcacaaccaaaccttccctgcaatacgtgagaccctgaaaactcccccgaccccacagagagacagtcagcctggtgagaaatttatcaaaataactcttagtcttgcacattgggcaacccaaaagaaataaaggtttttgcaattcaagcatgcaatccctttatcaagacaaataggttattactccaatatatacaacagacagagaggggctaactcagtttggtttggcatttcaggtttgtctcagatgagatatgttcctccttaagagagctacagcctgggcgctgtggctcatgcctgtaatcccagcactttgagaagctgaagcgagtggatcgcttgagcccaggggttccagaccagccagggtgatatggcgaaatcccaccactacaaaaaatataaaaattagcgcagcatggtggtgcatgcctgtagccccagctactcaggaggctgaggtgggaggatcacttcagcctgggaagtcaaggctgcaatgagccaaaatcacactactgcatttcagcctgggtgacagagtgagaccctatctcaaaaaaaaaaaaaaaaaaaaaaaaaaaagcaccaggcccagtggctcacacttgtaatcccagcactttgagaggctgaggaggatggatcaccttaggtcatgagttcgagaccagcctggccaatatggtgaaaccccatctctaccaaaaatataaaattaggctggacgcagtggctcatgcctgtaatcccagcagttagggaggctgaggccaaaggatcacctgaggtcaggagtttgagaccagcctggccaacatggtaagacctcatctctactaaaaatacaaaaatttgctgggtgtgctggcacatgcctgtaatcccagctactcatgaggctgaggcaggagaatcgcttgaacctgggggacagaagttgtagtgagccgagatggagccattgtacatcagcctgaaagacagagcaagactcagtcttaaaaaaaaaaaaaaaattaaccaggagtagtgacacatgcctgtagcctgtagtcccagttatcgggaggctgaggcaggagaatcccttgaacccaggaggcaaagtttgcagtgagctgagattgcatcactgcactccagcttgggtgacaagagcaaaactccatctcaaaaaaaaaaaagctacagaatatgaatatatttctatctcttctatagcatctcttctaaggacaattatttgtttgaatttatgctgagtcctgaggaagctgtcacaactacaccaaagtgtacttccaaattggatagaaattatttgtgatttcatatgagtaaaggaaggctctctttttctctcagttctaggaagagttcatatcatcacctaagtaaccctaatctgatcacttctttctacctttctggtgtttgatatctttatcccaaatctctaaagccccaaccttcttgcccattagccacaactctcagaaatggacctcatagggcaggggacacagcctctttgttctgatgataaaagcaggtgtttacccagcactggttggtgctgttggcatagactctgaaagctctcaagctgtctgggctcacgtcccaggtctctccccagccccccacccccacctggtgtgttgcctgaactggagccactcaactccctgtgcctctatttcctcacctctgaaatggcaatgccaagagcactgttttagggggctattctgagcattatatatgctcatagatgggcctggcacaaagtaagtgctcagtaaatgtcagctactattatttcctttttttgttttttgttttttgtttttagacaacgtttcactcttgtcacccaggctgtagtgcaatggtaggattttggctcactgtaacctctgcctcctgggttcaagcaattctcctgcctcagcctcctgagtagctgggaccacagacgtgtgccaccatgccaggctatttttgtattattagtagagacagggtttcaccatgttggccgggctggtctcgaactcctgaccttaggtgatctgcctgcctcagcctcccaaagtgctgggattacaagagtgagccaccaagccctgccttctattattttctaataccctgtgttcatctcctcatcctccttcctcttaattatccactttgccatttctattcctgtccatcaatgcttcccccagtgtcttttctgatcacctgtgccccctcctctcctattgctgacacacagcctgggccattttccttaccaagacctcccccaccccacatccttgaaacatctgcctatctctttcttgcctccttttgaaaatcttcagatcccatgtagcaccttgggcatttttgtacttagtagcccatcttttgacacccactctatgataatttaacaccagcagttcaccagacctgaggttggctgccttggggctggcagtgtggtttaggagaaagagcactgggccgggggcacagggaccatctctgcacgggctctgccaccagctcctctgaccatagcgcaggtggcccttcctgggtctgcatcgtatggtaaggaggaactttagggctccaaggaactctaacagcccacagttttgaatccagcacttcctgagcccccagcatgggctacggtgtgtgctgggtgcttttctctgttgattccacaaatttcaattgagccaatattggctgtaccctgtgctaggtgatggagctgcaagggagatcaggacagactgtgacatccttcatagaacagacatagttaaatattacagacttgtttggaggtaggtctcagtgctccaatgtttgcagatttcaaccagatattttgggaacgtttcactgtcaacagctaggactggcagaaccaccaggtgagcccaggtctgagtgactttgagagtggctcactctccaggcaacctccctggacaggggtgagtctgatgccttctcacgggggtatcagcctccgatgggtggggtgtggaggtgagaggtcataggtgcctggataggaagtgactctgccatcacttcctgtgtgacctgaggcctgggatgaggatggggcaattgatggggaagcggggagcacctgtgctgtggggtgggtgggatgtggacatgtctgtgtttctgctgtgtctcctgttcttcccctgggattgggactatttccatcctgctgatcccttgccactcacactgggggggctgcctcttgggttagaccttccacccctgtggtctgttattcactgaccgttactgtcgttgtaatactccacgatgtctttcagggtctccataaagatgtcctccctggccttctgaagttggctgtcctgcttccaatcctccattccttccacctgtctccagagtcccatgggctgagacttcctgtctttactgttgtatctaaagaactggaggtcattgagtgagccaagggcctgaaacgcggggacgtcttcaacatgcttggacagcccagtgtagatataggtcagagagtaacgacctgcaaaagaaaagattctgatggttgaggtccatgcaagggtcccactgtggggctgcatagggctaggaggggagacctgccactggccttttcttccccagctctttctcctgccatcaacttcacaccactggaggctcactcaagtgaatatgctctactttcatgcctgagatgatatttcagagaccatcctgtgtcttcactacattatttcctctgcttgacacataggaagataacattactcagccacctcgaagatatattgggaccatgtgactgagttttgtcaaaagagaatgtgagcagaagtgatgtctttcttcttgtccaagaccctaccagctggcttgtcccttttgtttctcatccctagaggtgacgactttgaaggccacaggataatatgaaagagtctcaatatgcaattggcctggatccctgagtcaccccatggaggaatggaaccttgcccagtgtgcatggaatctgacatgcgttagaaattaacatttctaggctgggctccgtggctcatgcctgtaatcccaggactttgggaggccaaggcaggcagattacttgagatcaggagttgaagaccagcctggccaacatggtgaaaccccatctctattaaaaaatacaaaaattagctgggcatggtggtgcgggcctgtaatcccagtcatgctggaggctgaggcaggaaaatcacttgaaccagagaggcagaggttgcaacaagccaagatcatgccactgcactccagcttggatgacagagtgagactccgtctcaaaaaaaacaaattaacatttcgtccgggctcagtggctcacgcctgtaatcccagcactttagggggccgaggcgggtggatcacgaggtcaggagatcgagaccatcctggctaacatggtgaaaccccgtctctactaagaattcaaaaaattagccaagcatggtggcgggtgcctgtagtcccagctactcaggaggctgaggcaggagaatggcatgaacccgggaggcggagcttgcagtgagctgagatcatgccactgcacttcagcctaggtgacaaagcaaggctccatctcaaaaaaaaaaaaattaacacttctagcttaacctgacaaatacatatagttagaaagggtagaaaggagaatttaccagaaaattcaagaaatgacccagactgaattagcacagggtaagactaggatggagctcagaattcccggggttgtaccttgcattttggtacaaggtgggatctgggagagagggacatttccataatagttccataattattttatgatacaatttacacaggtgctaatgatgttggaggtcatatggcagaatcctagttcaattactaaaattattcttgctcctgagtgtctaaatgtgattagcctttaaatcagtagaccctacaattgaattcatggacatagagagtagaaggatggttaccaaaggctgggaagggtagtggcagggttggggggaaattgggagggtggttaatgggtacaaaaaaaatagttagaaaactatttgatagcacaacaaagtgactccagtgaataataatttaactggggccaggtgtggtggctcatgcctgtaattccaacactttgggaagctgaggcaggtgggtcacttgaggtcaggagttcgaaaccagcctggccaacatggtgaaaccccatctctactaaaaatacataaattagccgggcgtggtggcacacacctgtagtcccagcgactcagaaggctgaggcaggagaatcgcttaagcccgggaggcagaggttgcagtgagccaagattgcaccactgcattccagcctgggcaactctgtcacaaaaaaaaaaaaaaaaagaagaatgaataagacctactatttgatagcacaacagggtgactatagtcaataataatttaactggggccaggtgtggtggctcgtgcctgtaattccagcactctgggaggctgaagtgagtggatcacttgaggtcaagaggtcaagaccagtctagccaacatggtgaaaccctatctctattaaaaatacataagttagccgtgtgtggcagtgtacacccgaggcaagataattgcttgaacccaacaggcggaggtttgcagtaagccaagatcacgccactgcactccagcctgggtgacagaacaagaatccatctcaaaaataataataataatcataatttaattgtacacttttaaataaccaaaagagaggccaggcgcagttgctgacacctgtaatcccggcactttgggagaccaaggcgggcagatcacgaggtcaggatatcaagactagcctggccaacatgatgaaacccgtctctactaaaaatacaaaaaaattagccaggtgtggtggcaggtgcctgtagtcctagctactcaggagactgaggcaggaaaattgcttgaacctgggaggcggaggttgcagtgagccgagatcatgccactgcactcctgcctgggtgacagagtgagactctgtctcaaaaataaataaataaataaataatcaaatacttttaaaaactaaaataaccaaaaaagtataattggattgtctgtaacacaaacgataaaagcttgaagggatggatacctcatttttgatgatgtgattatttcacattgcatgcctgaatcaaaacctctcatgtaccccataaatatatacacatactatgcacccacagttttttttttaatttacaaaaaaatcagtagaccttgagtaaagtggattactctccatagtggtgggcttcatccaatcagttgaaggccttaagagaaaaagcctcagatgtcccctaaagaggaaagaattctgcctacagtctgcccttggaatcaagactaagacatcaactcttccctgggtctccagcctgctggccggctctgaagatttaggacttgttactcctcccaatagtgtgagtcaatttcttaaaataaatctctactctctctctcttttgtatacatatatgtaaatctcttcctatgtgtgtgtgtatccatgtgtatacagtgtatgtatgtatgtgtacgtacatatatatgtatatgtgtaccacctattagttctgtttctctggagaaccctgagtaattcagattttggcacagaatcagattaacattccaaagtgattgttatataacaaacatataacaccttttctgacaatttgtaaatgtcatgaattttaaactcacacaactgagaagccattcgcttccatgtctttatcctgcacattctcatgccacaaacagcctccttcccttatcctaggagtgactcttgatctcccggagctcccactctcttctcttccagccactcgccttccagacccactgcagtggtgtctgagtgtgggatttgggcacgggtttccttctagcaccatccctccagccaacctgccttcccactttccccttggggctgctctctctttccctcagcgtcaggcaggtgtacccagccatcggaaggagggaaggaacaggagcagaagcagctccaggcatatggttcctactccgtcctgactgtctaccccaagcaggtcgcttggtctttggagtctttgttttcactgtaaactaggggttttagattcagattcctgaaggtcttatttcgggccagcgcagaggctccctgaatgctcctggaagtgtgtgagctgagggagttgacagccttgggcacccattcctgccgtatgccagggtatcccagctgcatccagcctgtctcccagccacatgtcctgttcctcacctccttccagtcctctccagcacccatcccttgctttccccactcaccatcttggttctcctgggggacagcaggacccagaagcagcagcagagacagcaggacaggcaccattcttaccattgtgtctgcttggagggttctgggcaggaggcacagatattatcctgggtcctggggccctgcccaggggaggtgaatctacaggccaatgggagtgccaggacgggctcctcccctaatagagaaaaaaaaatgatacacaagctaggctgggcagaggttatgaagaatgaatctacacacaggatatgcaaattcagagctgagtccagagttgatctctggactgaggctttgtgtgtgcctggggtggaaggatgccagtgggtaggaggtgcgtgtgatgggtggcaagcgcctgggatgtgtcacccttccagtctattgtgacaacccctgggccagtaggggcatttgtgtgtttttggaccacactgtatccctgccttccagaaaaactctcaacatgtccaagacatggacctgggtagaccccagctggggtgggaccctcactctcccacatccgatcctgccagaggctgtgtctggaggacagtcacattcccatctctccctccttcctttctgtgcctgtggaatcccagccttccatgatggaagcagaaatagccgcatcctccttttgcagcctccctggcaacagaacgagcctcccaaaatgctgggattaaaggcgtgagccaccacgcccagccaagataatttttaatgcatacaacaagactcgttttacacagacgaagccagttatttgaaaaccaggtctttccaggcacgctcagtgttgatgggctatttgcagagagaccctccgaatacaaagcaacatgctattctaaagtgactggggcccgggtgcggtgactcatgcttgtaatcccagcactttgggaggctgaggtggttggatcacctcaggttgaggtcaggtactcgagaccagcctgggcaacatgatgaaacctcgtctctactgaaaaaatacaagaattagctgcgcgtggtggcacatgcctataatcccagcactcaggaagctgaggcaggggtttcaccatgttggccaagctggttttgaactcctgacctcgtgatctgcccgcctcggtctcccaaagtgctgggtttactagtgtgagcaactgtgcccagcctctcttttggttaaagaaacctacaaagggaccttttatagtgacttcaattttatggaataattgtaatgctcctaaggccgttgtgctccaaagtctagccgcaggtattgttattgattgggctccaaaagggcattattggcaagattgctccagcaaaaatacctcatgctcagagtttaattatttgttagattatgtagaggatggatggcagtcatacaggctgagacaatgggtgtccccttacctatttaaatggatggatgcaggcattactcctcctagaccaaaaatgattcatccctttgttaccccagaacatcctcaactatgaaaattagctgcagctatgacaggaataaggatatggaacactacctatcaactccttcacactaataccaaaacacccacattcaacatcaccctcatatctgaacgggtgatacccatcaggagctatgtcaaacccccttacatgctgttggttggaaatataattatcattcccaatacacaaactatagaatgtgataactgtaagctgttcacgtgcattgatgctacttttaatcccactacaagtactctcttggtaagggctagggagggggtatggataccagtttctttacatcgtccatgggagtcttccccctctattcacatagtcaatgaagttcttaaaggtatccgcaaaagaacaaagagatttatttttactcttattgccatcattgcaggactaattgcggttactgcaacagcagcaactgctggagttgccatccacaattctgttcaaaccgttcaatatgttgaattgaagcatggcagaaaaactcctccagactttggaattctcaggctcaaattgatcaaaaattagctaatcaaattaatgatctccgccaaagtgtaatctggctgggagatatgaatttggaacaccgtatgcaattacagagtgattggaatacttctgattattgcataatgccttatgcttataataaatatcaacatagctgggaaaatgtctcaagacatttaaaagcctgggatgataacttaaccttggatatttcaaaacttaaagagcaaattttcgaggattcacaagctcatttatccactgttcctggctcagacatttttgaaggcataactaaacaattatctgatcttaatccctttaaatagatcaaaccccttggaggatcattgttgtcactggcattattaatattggtatgcttacgttgtctccttttagcctgcagatgcctccaaggagtccgaaaacaaatccgaagtcaacgacaagcaatgatggcgatggcgatcctagttaataaaaaggggggagatgtgggcggcaagccatccaggtgccaagccaagagaccgagggcatgagttgttccagtataataaaatatataaaacaacaagagttatactagatctagatcatagatatgattatatatcaatatcattaatcattagttttttccaaatttattattccaatattataatattataataatcctccaatattataatttattccaatattataataatcttcgctgcataatcataacctaagaaaaaccaggccatacagagataggagctgaggggacatagtgagaagtgaccagaagacaagagtgcgagccttctgttatgcccagacagggccaccagaagggctccttggtctagcagtaacgccagtgtctgggaagacgccccttgccgagcggacggtggtctagcggtagcctcagtgtcaaggaaaacacccgctacttagctgaccgggaaagggagtctccctttccttgggggagtttagagaagactctactcctccacctcttgtggagggcctgacatcagtcaggcccgcccgcagttatccagaggcctaaccgtctccctgtgatgctgtgcttcagtggtcacgctcctagtccgccttcatgttccatcctgtacacctggctctgccttttagataacaatagcaaattagtgaaagtactaagtctctgataagcagaaataatggcataagctgtctctctctcttcctctttctctctgccttggctgccaggcagggaagggccccctgtccagtggacacatgacccacgtgaccttacctatcattggagatgactcacactctttaccctgccccttttgctttgtatccaataaataacagcgcagccagacattcggggccactaccggtctccacgtcttggtggtagtggtccccggggcccagctgtcttttcttttatctctttgtcttgtgtctttatttctacactctctcgtctctgcacacggggagaaaaaccctccgaccctgtggggctggtccctacaccaatctaccataacagatacctcagccaactgttgaagttatcactgcacaccaggcctgccagaatcccccaagactcttgtgttttcactgcgcagccccaatctggcccagtaaccaacctcagcttcccagccctccatttccctgagtaaatactgcctggaaacaatccttgtaccaatctctgtatccgccaggagtatttgttattggaaacgtaatgcagttctgaccttaagcagaaaataaacgtatttattggttagctctcagaatccacagaaaggatggagaacccaggctcagaattccagaggagcccaacagtcaaaatcacacctgcaaccggcccagtaaatatacagaagctgccagcagggggcagcagaggccacagcacgggatctacaacatcccgggggactgaagctcaagacgccccccgcagctactgcagccccactgccccgggagctggcagttgcaacccctgccaagaccaccagaaaacattgtccactgtgccctcctctttgtttccctaacacttgacctgatatccaaggcagtagcttcgacttgctgagcataaaccctgtgcacacctgctcgttctattgccagggaggctgcaaaaggaggatgcggctatttctgcttccatcatggaaggctgggattccacaggcacctaaaggaaagagggagagatgggaatgggaatgtcctccagacagctctggcaggatcggatgtgggagagtgagggtcccaccccagcgggggtctacccatgtccgtgtcttggacatgttgagagtttttccagaaggcagagatgaagtgtggtctgacaacacccaagtgaccccagagggtgtcataatagactggaagggcgacacatcccaggcacctgccacccatcacacacacctcccacacactggcatccttccgccccaggcacacacaaatcctcagtccagagatcaactgtctcagctctaaatttgcatatcctgtgtgtagactcactgatcacaacctctgcccagcctggcttgtgcatacttctttcttactgtcaggggaggagcccggcctggtactcccattggcctgtagattcacctcccctgggcatggccccaggacccaggataatacctgtgcctcctgcccagaaccttccaagcagacacaatggtaagaatggtgtctgtcctgctgtctctgctgctgcttctgggtcctgctgtcctccaggagacccgagatggtgagtggggaaagcaagggatgggtgctggagaggactggaaggaggtgaggaacaggacatgtggctgggagaagggctggatgcagctgggattccctggcatatggcaggaacaggtgtccaaggctgtcaactccctcagctcacacacttccaggagcattcagggagcctctgccctcacccaaaataagaccttcaggaatctgaatctaaaaccccttagtttacagtgaaaacaaagactccaaagaccaagcgacctgcttggggtggagagccaggacggagcaggaaccacaggcctggagctgcttctgctcctgttccttccctccttccgatggctgggtacacctgcctgacgctgaggaaaagagagaacagcccccaaggggaaagtgggaaggcaggttggctggagggatggtgctagaaggaaacccgtgccctcaccccacactcagacaccactgcagtgggtctggaaagcgagtggccggaagagaagacagtgggagcttggggagatcaagattcatttataggagaggggaaggaggctgtttgtggcatgagaatgtgcaggataaagacatggaagtgaatggcttctcagttgtgtgagtttaaaattcatgccgggcgcggtggctcacgcctgtaatcccagcactttgggaggccgaggtgggtggatcacgaggtcaggagatcgagaccatcctggctaacacggtgaaaccccgtctctactaaatatacaaaaaattagccgggcgtaatggcgggggcctgtagtctcagctactcgggatgctgaggcaggagaatggtgtgaacccgagagatggagcttgcagtgagcagagatcgcgccactgcactccagcctgggcaacagagcgagactctgtctcaaaaaaataaataaataaataaaataaaataaaattcatgacatttacaaattgtcaaaataggtgtttcacgttagttttataataatcacatttataatattaatcccattctgcacccaaatatgaattattcggggttctccagagaaacaaaactaatatacattgtataaacactcacgtatgtatatatgaatatacattgtatattcatatgtacactaaatatatgtgtatatgtataatatacatatatacgtgtatgtatatacaaaacagagaaagggaggagttttatttaatatttcttgtggctcacacaattctgagggctaaaagtcctaaaccagcaaagcaagccagcaggctagagaccaagcaaagagttggtgttgcggtcctgagtccaagggtagtctagaggcagaattctttcttctctgggggacctcagccttttctcttgatgccttccactgattggatgaggcccatccacactgtagagggtaatctgttttactcaaggtctgatttaaaggctaatcacattcagaaactcatgagcaagaatgacttcagtacttaaattagaaatctgccatatgacttccaacattactaacactcatgtaaattatattctaaattaactatggaactaattgtggaaatgtcccactctctcagcttccatcttgtaccaaactgcaagatacaatgccaggaattctgagaggtatcctagccttaccctatgctgatccattctgggtcacttcttgagttttctagtaaattcaccttcctacactttctaactatatgtatttgtccggttagactagaaatgtttatttctcatgtcaagttcaatgcagattgggcaaggttcctctcctccacagggtgactcagggatccaggctgtttgcatcttgggactcttctgtttcatcctgtggcctccacagtcaacgaaagggataagagaccgtaggggcaagccagatggtagagccttggaccagaagaaagacatcagtcacttccactcacattcttgtttgacaaaactcagtcacatggttccaatctatctataaggaggctgagaaatgttaacttcttctgtgccaagcagattaaactctgtagtgaagaaacagaatggtctctgaaatatcatccccagcatgaaagtagagcctgtttccttgagtgaggctccaatggtgtgaagctgatggcagaggagagagctggggaggaagaggccagtggccaggcctcccctcctggccctctgcagccccacaatgggacacccttgcatggaccccagccctcagagtcttttcttttgcaggtcattactctctgacctatctctacactgggctgtccaggtctggcaaaggcacccacaggctgcagggcactgtcttcctcaatggccatgccttcttccactacaacagtgaagacaggaaggctgagcccctgggaccatggagacatgcggaaggagtagaggactgggagaagcagagccaagttcagaaggccagggaggacatctttatggagaccctgaacaacatcatggagtattacaacgacggtaacggtcagtgaacaacagaccgcgggggtggaaggtctaacccaagaggcagccccccaggtgtgagtggcaaggggtcagcaggatggaaatagtcccaatcccaggggaggaacaggagacacagcagaaacacagacatgtccgcatcccaccccccccacagcacagtgttgtccccttccccatcgattgccccatcctcatcccaggtctcaggtcacacaggaagtgatggcagagtcacttcctatctaggcacctctgacctctcacctccactccccacccatcagaggctgatctccccatgagaaggcatcagactcacccctgtccagggaggttgcctggagaatgagccactctcaaagtcactcagacctgggctcacctggtggctctgccagtcctacctgttgacagtgaaatgttcccaaaatatctggtcgaaatctgcaaacattggagcactgagacctatctccaaacaagtctgtaatatttaactatgtctgttctatgaaggatgtcacagtctgtcctgatctcccttgcagctccatcacctagcacagggtacagccaatattggctcaattgaaatttgtggaatcaacagagaaaagcacccagcacacaccgtagcccatgctgggggctcaggaagtgctgcattcaaaaccacaggctgttagagatccctgcagccctaaagttcctcctcaccataagatgcagacccaggaagggccacctgcactgtggtcggaggagctggtggcagagcccgtgcagagacggtccccctgcccccggcccagcgttctttctcccaaaccacactgccagccccaaggcagccaaccccaggcctggtgaactgctggtgttaaattatcatggagtgggtatcaaaagatgggcttctaagtacaaaaatgcccaaggtgctacatgggatctgaaggtttcccaaaggaggcaagagataagcagacgtttgaaggatgagggatgggaggtcttggtaaggaaaatgacccaggctgtgtgttagccataggagaggagggggcacaggtgatcagaaaagacactgggggaagcattgatggacaggaatagaaatggcaaagtggataattacgaggaaggaggatgaagagatgaacacagggtattagaaaataagagtagctgacatttactgagcacttactttgtgccaggcccatttatgagcatatataatgctcagaataaccccctgaaaccgtgcttttggcactgctgtttcaggggtgaggaaataaaggcacaaggaggtgactggctccagttcacacaacacaccaggttggggcgggaagagacctgggacttgagcccagacagcttgagagctgtgagagtctatgccaacagcaccaacctgtgctaggtaaacacctgtttttataatcagaatgaagaggctgtgtcctctgccctatgaggtccatttctgagagttgttgctaatgggcaagaaggttgggactttagagatttgggataaagatatcaaacaccagaaaggaagaaagaagtgatcaggccaggcgcagtggctcgcatctgtaatcccagcactttgggacaccaaggcagtcagatcacctgaggtcaggagttcaagaccagcctggccaacatggcgaaaccccatctatactaaatatacaaaaattagcctcgtgtggtgttgcgcacctggaattccagctactcagcagactgaggcaggagaattgcttgaacccgggagatggaggttgcagtgagccaagatcatgacactgcactccagcctgggcagcagagtaagactctgtctcaaaaaaaagaaacaaagaaatagtcagacagattaggttgatttaggtgatgatatgaactccacctagaactgagagaaaaggagagccttcctttcctcatatggaatcacaaataatttctatcaaattcggaaatgtactttggtgtggttgtgacaggttcctaaatactccccgtaagttcaaacaaataaaaagagatgctacagaagagacagaaatctgcccacggcctgtagctctcttaacttccctggctgggaggaatgcatatttcatctcaaattggcccgaaatgccaatccatatagcctttgccactctgtgtcaactgtacgtccagataaaatcatatgccatgattacggaactgcatgcttagattgcaaaagcctttcctcctattgagttgtgaagagtgcaggactaagagttattcagttggcactaggctgactggcttcctgtggggtcaggggaggtttcagggtctcatgccttgcaggaaaggtttggttgtgagatccagaataacagaagcactggagcattctggaagaatgcctatgatggaaaggactacattgaattcaacaaagaaatcccagcctgagtccccttggtcccggaagcccagaacaccaagcagaagtaggaggcagaaccagtctacgtgcagcgggccaaggcttacctggaggaggagtgccctgcaactctgcggaaatacctgaaatacagcgaaaatatcctggaccggcaaggtactcactgcttcctgctatccagtgctaagctgggaaaaaccaaggtgatctcaggctgggagctcagagagcatcttaggccaatctcctctatccatgtaagtcacgtagaaccccagttttcaacttccaggattcattcctttcctaggaggacatcaaaatttcaggcagaatgggccaggaaagccactgattcactggtaggcttccctaaatatcacccattgagagatgaggagctggaggtgacagaggtgagggtaacactgtgtgtaagaggcagagctgcagccaggcatgctggctcacgcctgtaatcccaacactttgggagtgagtccaaggtgggtggatcacttgaggttaggagttcgagaccagcctggccaacatgatgaaacctcgtctctaccaaaaatacagaaattagcctggcgtggtggcaggcgcctgtaatcccagctactcgggaggctgaggcatgaaaattgcttgaacccaggaggactagattgcaatgagccaagatcgcgccactgcactttagcctgggcaatagtgtgagactcagtctcaaaaaaaaaaaaaagaaaaaaaaaaaggaagagctaggacttgaattccagatttcagattccaaatgccatcgttgtttctctctacaatgatgcctcccatctgggtggtggagagaagggaggtgtgtaaaatgtcagccccagaaagacaacagcgagccagtgtgaatggaatcgatggctgcaagctgagacttggattgcagacatagtgagactcaggattgtgcagtgctgcagggaagcggttgctggatagaggcatgggctgaaccaagcagctggactgagattgggggacagaactccaaagcccactcagatgtgggaaaacatgggaaagtgcacagagcattcacaacttatcagagtcaatacatgggtggggtggagaatgggcgagaggggagccaggacattccatgatccaacagagaaggatcagggaaagcctcagccttccctgatcttctggaaagtgtcccagggcagggggcagtggggcgggcagatacagagcttagagctctgctgattgctgacatccaggggtaggggtgagaagagacctgggccgggagaagtcgacctcaaacctgcagtgtcacactctatccctccacagatcctccctctgtggtggtcaccagccaccaggccccaggagaaaagaagaaactgaagtgcctggcctacgacttctacccagggaaaattgatgtgcactggactcgggccggcgaggtgcaggagcctgagttacggggagatgttcttcacggtggaaacggcacttacctgacctggttgttggtgcatgtgcccccgcaggacacagccccctactcctgccacgtgcagcacagcagcctggcccagcccctcgtggtgcccggggaggccaggtaggaagcaagggctggaggcaatgtgggatctcagccccagtagctgcccttcctgcctgatgtgggagctgaaccaccgaaatcacggtcaatggatcctcaaggcccaaggagcagtgtggggggacagacaggaggtggatttggagaccgaagactgggatgcctgtcctgagctgactcggacccaaaaaccatctcaccttgaaccaccccccgccattgtctaatctgtggaaactaataaataatcatctctctttgtcaagcacgacagagaacagtattaactgtaaaatgctatagaaatgtgatgtgattttctcattggtcctgctcccaagcactgaattcatctgaaactcttggtttcccttggaggccatggttcctgggcaccctgacttgggcaatcccaagcatggcccggacccgctgtcccttagggattgttcaggtgtcccctgctgacatccacaggcgtggccatggccactctggctgtgaggtgctagaaccctgcaagctctttcacacagccaagcctcttctgtgcctcagtttccccacacttcttggcttcctgggagacccagccctccactccagctgctccacatctccacaccatgttcgccttggcccaccagccaaagcttatttgagagctctcagctctccagggtacagctcaatgaagcgggaattggccctgaggttctcagactccctctgagtccctgagagtgagtttcctcaaatgagtcgccaactgccatgcacaggtatcaaccccaaacacacagcagagctctcaccttgaccttctcatgaagcctcacctgcctgtgtctgtgcttttccttcctgtgggaaaagaactttcctttttttcttcctttttcttttttttttttttttttttttttttgagatggagtcttgctctgttgcccagcctggattgcagtgttgcaatcttggcttactgcaaactccgcctcccgggttccaacgattctcctgcctcagcctcccaagtagctgggattacaggcatcagccactacgcccggctaatttttctatttttagtagagacagggtttcaccatgttggcaaggctcgtctcgaactcctgacctcaggtgatctgcctgcctcggcctcccaaaatgctggcattacaggcgtgagccactgtgtctagcgacaagaactttctttacatcctatactcagcctcccactctggattattccaaaatccatcctccaagctgggttccatagaagaatcattcccagtctttggaattctgagttaatcatcttatctttcatgaaagcctaaatttgaaggctacaattttttgttttaactcttcgactccaatttgaaaatcaaagctgagaaattacttttttttttaaagtctacatgaaatccacctttctcccttccagggcaaaaacatcctatatgaacagtagccaagttcaggaaagaaaatgcaaatagtcgccaggcgcggtggctcacgcctataatctcagcactttgggaggcccaggcgggcggatcacgaggtcaaggatcaagaccagcctggccaacatagtgaaaccccgtcttcactgaaaacacaaaaaattagccgggtgtggtggtgtgtgcctataatttcagctacttgggaggctgaggcaggagaatagctgggtttggtgatgtgtgcctgtaatcccagctacgggggaggctgaggcaggaggatcacgtgaacccaggaggcaggggttgcagtgagctgagatctcgccactgcactccagcctgggcgacagtgcaagactctgtctcaaaaaaagaaaatgcaaataatcaagaggaaaaaatatagcatgtgaaatgtgaatatgaggacacttggagcaaataaaaggtgaaagttaaacatttaagatcaacgaagaaaccaaaatccacatgatcagaccagggctaaggaaaattggaataggagatgtgacctcatctataacaggagacatggatgatgataaaggaggagagagaagccacaggattcaagtcctgggcaggtgtggggcaggaggagagggacacagggctactgagatactcagggaaaacttcctggagcaattcggatttcagagagatgtggaggcctaagacagcttgccaagtcgaggtcaaaagatttccatgcagaatgggattttacattccctgttcttttgagtctccagtgcctaccagagaatcaaatatacaataggtccgggcacagtggctcatgcctgtaatctcagctctttgggatgccaaagtgggaggattgcttgagccaggagttccagatcagtctgggcaacatagcaagaccctgtctctacatttaaaaaaataaaaaattatctgggcatggtggcacacacttgtagtcccagctacttgggaggctgaggcaggaagatcacttgagcatgggaggtcaaggctgctgtgagctatgattgtactattgcactccagcctgagcaacagagcaagaccgtgtctcaaaaataaataaataaatacacatattaatacaataggtaattaatacataatttctggatgaatcaataaatacgtaagcaaaggcaatagaaagcactaaatatttctgacgaccacgaagaaccttttggctgggacagtgaattctactgggaaagaagtttgaaaaagcaaagctcagagaaattgaagaggaccttaacatatgtataccttgctatatctgattgatgtcttttgcctgattcagtgtgcatcattcctccagcctacctgggaactatccccaggagagtccaccagagagagacaagatagtctaaggcaggggtccccaactcccggtacccgttcatagccagttaggagccgaaccacgcagcagaaggtgagctgcagggtcgaagcttcatctgtatttacagctgctcccccaccccccgaccattgctccaattaccgcctgagctcacctcctgtcagatcggcagcagcattagactctcacagaagcacgaaccctattgtgaactgtgcaagaaaggtatgtaggctgcccgctccttatgagatctaacgcctgatgatctgtcactgtctcccatcaaccccagatgggaccatctagttgcaagaaaacaagctcagggctcccactgattctacaccgtggcgagttgtagaattatttcattatatattacgatgtaataataatagaaataaagtgcacaataaacgggatgcactggaatcatcccaaaaccattcccctccccagtccgtggaaaaactgtcttctacggagccggtccctagtgccaaagagattggggaccgccggcttaaacaaagaggtctttttctcaagcaggttccaatcagcgctaggccggattcgctatggcttttgcctgccccctagtggtcaaggaaatagttgcagccaagtgttaggatccagtccttgagaatttggctcaaagcctggatgcaaaggccatgagataacggtcatccggtcttcctcgcacaactcacacaattctcgccgtcttttttttttttaagagggaatttcactcttgttgcccaggctggagtgcagtggcgcgatctcggctcactgcaacttccaactcctgggttcaagcgattctcctgcttcagcctcccatgtagctgagattacaggcgcccgccaccacacccagctaattttttgtatttttagtagagacggggtttcatcatgttggccaggctggtctccaactcctgacctcagatgatccactcgcctcgacctcccaaagtgctgggattacaggcatgaaccacggcgcccagccaattcctgccttttattatggaggaaaacctccgcgggattacagcacacccagtggacgtctgttacctcatcgaacttgggtccaaccaccgggtgctgcaaacactgacatgtggattccagtgagagaaactgaggcatttattgcagggtgccaagcaaggagaatcagccagctcaagtgtaagacctaaattccccaatggcttgtaggtaagggtttttagaggcagagaagcagaagttacaggcaaagtcataaatcaatacatggcccggcacagtggctcacgcctgtaattccaacactttgggaggccaaggcaggtggatcacctgaggtcaggagttcaagaccagcctggccaacatggtgaaaccccatctctactaaaaatacacaaaattagccagctgtggtggtgcacgcctataatcccagctactcagaaggctgaggcaggaaaatctcttgaagccgggaggcagaggttgcagtgagcagagatcgcgacactacactacaccctaggcgacagagcaagactctgtctcaaaaaataaaaaataaatcactcataacctggtgcaatggttcacacctgtaatcccagcactttgggaggccgaggcaggaggattgcttgaagtcaggagtttgagaccagactgggaaacatagcaagaccccatatctataaaaacattaaaacttagctgggcgtggtgtcatgcacctgtagtcccagctactcaggaagccgaggcaggacgattgcttgagcccaacagttggaagctgcagtgagctatgatcacaccattgtactccagcctgggcaacagaggtctttaaaaacaaaaaatcaataacgtgtaataatctttttttaaaactccctaacaggatgtgtggcaggttcctgaggtggtggctgctggcggaggagagctggcactccacccccgtggggcgcctcctgtttcccgtgctcctgggattccgccttgtgctgctggctgccagtgggcctggagtctatggcgatgagcagagtgaattcgtgtgtcacacccagcagccgggctgcaaggctgcctgcttcgatgccttccacccgctctccccgctgcgtttctgggtcttccaggtcatcttggtggctgtacctagcgtcctctacatgggtttcactctgtatcacgtgatctggcactgggaagaatcatgaaaggggacggaggaagaggacaccctgatccagggaggggagagcagcagagataccccaggggctggaagcctcaggctgctctgagcttatgtggctcagctgggagctcagctggtcctggaggggacagcgccggggttgcagtaccacctgtatgggttccagatgcccagctcctttgcatgtggccaagagccttgcccgtatagattaacttgcaccttttcccacccctcggagaagatcatctttctaaaagccatgtttggggtcagtgggttccgtctcttgttcactcttttggagattgtgcttctgggtctgggaagactgtgtaagcccctgcggaacttcctgggtggggcctcttcctccagccacgccctggccctgagcagcaaaaggaacctccagcagacactgtgagccatccatcggcctggtcagccttgttccatttcagagaccatgttccccacagccccagtgactaggggtgacatctcctgacctcccccacctgtggatatggccaagtcgaggtaccggttaaccaaagatgctgaaggagtgaagaaccagccatcccctaatacgcaggatggttatattgattatgtcaaactgaaaactttggagaaactcctctctcagaaagcgataactgggccagacacggtggctcatgcctgtaatcccagcattttgggaggcctaggcaggtggatcacttgaggtcaggagttcaagaccagccaggccaacatggtgaaacccgtgtctactaaaactacaaaaattctgggcatggtggtgggcgtctgtaatcccagctacttgagaggctgaggcaggagaattgcttgaacctgggaggtggaggttgcaaagagccgagatcatgccactgcactccagcctgggtgactccgtctcaaaaaaaaaaaaaaaaaaaaaaagtgctggtgttccttaggactgtgttgcgggccctctctctccccattccacaccctcactctccctggataactttccctttgtctatagctccagccaccacgtccttgcggatgacttcccagtgcagatccccagtctgggctacctctcgagttcaggcttgaaatcctgtcgttcggccaggcacggtggctcacgctgtaatatcagccctctgggggtcgaggcgggcagatcacctgaggtcaagtgtctgagaccagtctggccaacatggtgaaaccccgtctctactaaaaatacaaaaaattacaggcatgcatggtggtgcgtgcctataatcccaactacttgggaggctgagacaggagaatcgcttgaaccctggaggcagaggttgcagtgagccgagatcgcaccactgcactccagcttgggcgacagagactctggtcagatgcctcctaggctcaggcacctgctctgggagcagtgggctcctctgcatccttgagcacctaatctttatgtgcaggatcataaaacacaccgtgcggatcagtgtcagatttccttcttaagctaatagaacagaatgcagctttcaggattcaggaaagatttttctgcacaggcaagtcagttgcagtcgcgtgttattgccaccagaggacacaatgatcctgctaacatgatgaaagactctcccagcggatttaataacaatcttagcaattttttatttattttttttttcttgctccgtcgccaggctggagtgcagtggtgccatctcggctcactgtaacctccgcctcccgcctcctgggttcaagcgattctcctgcctcagtctgccgagtagctgggattacaggcgcgcaccaacatgcccggctaatttttgtatttttagtagagacggggtttcaccatatagaccaggctggtgggtgatccgcccatcttggcctcccaacgtgctaggattacaggggtgagccaccgcgcctggccttaatctactttttatatctgtggttttgcctttcctggtcattccatctatgttgaatactacaatacgtggccttctgtgcaagggcaattggttccatgcttagtcccaccagatgatagatgttaaccaatatttactgataagttggggcctctccgacaaggagaccaatgaggctgtctccttcaaaagcatctcagctctgtcttggagctttgagttgagagtttttttttcaagccagattttacgtcgttcccagacacattcacaagccttgctggaccaaagaaaaaaaacgagttagcctgggcacagcggctcacacctgtaataccaacactttgggaggccaagatgggtggatggcttgatgccaggagttcgagaccagcctggtcaacatagcgagaccccccatctctaaaaaataaaataaagtacatataccagcaatgatgtataaccgaaaaataaataaataaacaagttaatattgaaatgtcatgtttgcccccaacccaaataagcactataacctcttgttattcacttctcatgcaaccagtcttctgttctctgtgagtctttaggaaatgaggagcatgatcttctagcagtaaaacacctgtagagaattgccttatgttttttgtttgtttatttgtttgtgtgctttggtttggtttgctttttttttttttttttttttttttttgagatggagtctcgccctgttgcccaggctggagtgtagtggcgaaatctcggctcactgcaacctccacctccctggttcaagcaattcccctgtctcagcctcccgagtagctgagattacaggtgcacaccaccacgcccggctaatttttttgtatttttagtagagatggggtttcaccatgttggccagactggtctcgaacttctgacctcaggcaatccgcctgcctcagcctcccaaagcgctgggattacaggcatgagccactgcgccccgcctccatgttaatcactctttctgatttcaaataactcattatccccatgaccttatggatttgtttttcctcttcatccacaaaattctccagagaagtctcccttgttatctcttggctgtgctttctatctcaccagttatctttctccaaagagcttcctctgcaaagaagctttgtatatgaagaccatgtgggggctgaatcaagaccaagtttcacaacctaaaagtagttcacaaagcttccttgcctctattctctgcaaatctgtaaactcttcagctgacccaatttctctctttagccttcagagattattttattttattttatttcatttcatttcatttcattttgacagaatctagctctgtcgcccaggctggagtgcagtggcaccatctttgctcactgcaacctccccctcacaggttcaagcaactgtcctgcctcagcctcccgagtagctgggattacaggcgtgagccaccacgcccagctgatttttttttgtatttttagtagagacagggttttgccatgttggtcaggctggtctggaactcctgatctcaaatgatccgcctgccttcacctcccaaagtgctgggattacaggcgggagccaccacaccagccaattctatttttaattttattgaagaagcgctgtactatttctcacgggggctgcaccatgttatgttcccaccagcaatgcacaaagattccaatttgtccacatcctcaccaaacacctgctattttgttttgttttgttggtggtggtggtggttttttgtgtttgtttgtttgtttgtttttagtacagggagagtatccctaatccaaatatctgagctccaaaagttacaaaaccagaacttgagggccatcatggcacttagagaaaatgctcattagagcatttcagacttaggattttgggattagggctgctcaaccagtaaagcaaatattccaaagtcaaaaaaaaattctgaaatctgaaacatttccggtcccaagcatttcagataagggatatttaaactgtagccatcccgacgagtgtgaggcgtcttctcaaaagtcttgcacactattttgtctgctttgatctgtcatgtgtttcctaccactttgaaagcataacgaattttatccgtattcatttatgatgagaggcagtccaggcagtgcaaagggcacaaatcgtggtcccacaagtcctggcttctgacccggatcactgtgagaccctgagcaagcaagaacttgctccaggcctcagtttccttggtctctgggggaagccaggatgataatcagccatgctccaacccctcagctgaaactcaggcctggatgcattgtaaatggatttcctcttccacaggtgagccgctgaattcgattccttcttccttccttccttccttctttccttccttcctttcttccttcctctcttccttccttccctctctccctcctccctccctctgtccttcctccctctctccttccctctcttctttccttttttttcctttttgagatggggtctcactgtgtttcccaggctggagtgcaatggtgcaagcaaagctcactgcagcctctgactccagggctcaagtgatccttccacttaagcctcccgaatagctggggctacaggtgtgccccaccacacccggctcattttattaattcttggtagagaccaggtctctctctgttgcccaggccagtctcgaactcctggcctcaagcgatcctcccacctcggcctcccaaaggactgggattacaggtacgagtcactgcgcccaggcttttctcccttttgactcattttgaggcccccgtcgtagggtacacgccctgggaatcgggggtcttccagtatagggaaccaccgagatgcgggccctccgaagtcctagagagggcgcctcggccgccggcacccgccacacttccggcctttgtgggccgcagcgacggcggtctgcggctgtcggttctgtttgttgctgtcactgctgtttgttcttgccagcggctaggtgtgtagttgcttggggctcctagcacgaggcctctgtccccaggcacgcagcgccagtctccggctgttgcgccctgggcgccgcctctctccggcccccctttgtttcctgagccagctgggaagactaaaagggtgggtcctgggagcggcccatggttcgacccttcttttcaggcatccttggagcatgcaggctgcagatttcaggccgaccccgctagcaccaaagtccatgctgctgtccgtggcagctcagtttgaaaatggcctggtagaaagtccaggttgttgaactggtaaacgcactctgcatcccttgacttgaagttttcattattctctaacgtgcacttacccccagtagagagcaaatgaagattcatacaagaaatactgcctttcccaaaatgggacattccagcaagggtgccggtactgacttgggttagcttaagagagagatgcagttgaaaagcttgtcggcagggatcagggaagacttccactaagtggtgtgtattcaaaggagaggtaggaattggttaggtggacgacatgctccaccatccaagaagaacattccagatggaactcaggcaaaagcacaaagttcgaaaagtcagaagtgcaggggaagtggtaaatatttcgacaccatccagataaatggttgtttttggttttttgggatgggggacagggtcttgctctgttgcccaggctggagtgcagtggcacgatctcggctcactgcaacctccgtctcccgggttcaagcgattctcctgcctcagcctccccagtagctagaattacaggcgcctgccaccaagcccagctaatttttgtatttttaatagagacagggtttcgctatgttggccaggctggtctcgaactcctgacctcagtgatcctcccacttcggcctcccaaattgctgggattacaggcgtgagccaccttccccggccccatcctgataaatgtttattctctgtcggggagtggtgattaagatctgtgtgaccacagatcacttctgctcaaaatagccaagccccttaaaaaataaaggtttgttttctagaaatagtatagcaggagaactgactgccacttattggccaatttatttaacctttctgactttcaaatcccttgtttctaggggcatagcaataatatcttgtaatagggaggaatggattaggttaatttgtagaaagcatccaccacagtgtgtgtggcaggtagtattaatacgtcggaggtttatcattgtttttactgttaataatcattaaaaatgtgatagtatcccttcccattatggagcctccttctctgtacagtaagcaatgtggaaagaggaagaggagtaaattccagaaagtgttaagaaagatgtatgtagaaatgatagcaacctattcaattttcacaaaatttgaatagggcatcatactgtctcttactatacccataaaatatcttgtagcatttttatctgagtgaaagcaagcatgataatgtatcttttaaaaaataaatatactttgtaaatcacttttttttttttttgagacagggtctggctgttttgcccagaatggagtgcagtggcgtgatggtctcggctgacagcagcctcgacctcctgggctcaagccttggcctcccaaagtgctgggattacaggtatgagccaccatgcccggccctccctttcttttgtgtctttggatttgtctttgtggagagggtaccaggtaggtcttttttcctctgagcaattattaaacctgtgttccttatgaactgtattgttctgtttgaaagcccctgtctggcacgcaaaacaagaccaaaattaatagagttgggcaaactactgaaaactatatatatttgcaatcaaaacttcaagaaaaagcaataacaatcctcattaaagaggttagcactggccaggtgtggtggctcacgcctgtagtcttagcactttggtagaccagtgcaggaggatggcttgagcccgggagttccagaccaccctgggcaacatggcaaaacctcgtccttaccaagaaaatatacaaaaattccctgggtatagtggcacacgcctgtagtcccagctactcaggaggctgagatgggaggattgcctgagcccaggagtttgaggctgcagtgagcgtgatcacatcactgcactccagtctgggtgatggaggaagactcagtcaaaaaaaaagaaaaaaaaaaggtaggagctttcctcaaacatcttctctgtccattcaaatgtctttgttgtaactgaatcgcagggttcagtcacttgctatttgcagagtctgattaacaagagcaaagtgtggtataaagtgacctttttttttttttttgagacagagtctcactctgttacccggctggagtgcagtggcacgatctcggctcactgcaacctttgcctcccagattcaagcgattctcctgtctcagcctcccgaggagctgggattacaggcgcctgccgccacactcggctaagttttctatttttattagaaacggcgtttcaccatgatggccaggctgacctcgaactcctgacctcaggtgatctacctgcctcggcctcccaaagtcctgggatgtcaggcgtgagccaccatgcccggccagtatctgtagctcttagccctgggtcagtttctccagaggaacaccttccagtctccttcctgaaaagtccaagcccagccaccactctataccaacagaagtaaagacttaaccattgaaggtgggagaaggaagtttagggctgcccatccatggtgggtctgagatcccacacccctcaggccagcaatcagaccccgctggcctgaggaataccgggcacagttgagggtgtggacgctacagagaaaacaagaggattaaatagatatttacctcccgaatggtgagaccctccctcatccctgctcagatggctacttttatctagaacaggagatggcaaacatttttctataaagggccagataggcagggcacagtggctcacacctgtaggaggtgggaggatcgcttgaacccaggaagcagaggttacagtaagccaagatcgtgccactgccctcaaccctgggtgacagagtgagaccccatagcaaaaaaaaaaaaaaaactaatttttgtctgtaggcataagggttgctggctctttctccctcatgcagcctccaagatgtactatggaaatttagacatttatgaattgccttgcaatggaaaggtagtaacagcaacttcgagagttcctgccaagttctaccccgagtggaacaagttgctgattgttcccttccctggattttaaccaaggtgataaatacagtgggaggagatatctgggagaggtagaggctttgactccagaccttgagcttttttttttttttttttttttttttgagacagagtctcactctgttgcccaggctggagtacagtgttgcaatcttggctcactacaacctctgcctccccggttcaagcgattctcctgcctcagcctcacaagtagctgggattacaggcgaccaccatcacccctggctaatttttgtatttttagtagagacagggttttactatgttggttaggctggtatcaaactcttgaccccaagtgatccgcccgcctcggccttccaaagtgctgggattacaggcatgagccaccgtgccagctgatcttgagtttatggaagtcagaaactttgtccctaagcaataaaaatagttttttttttctttttcttcttttttttttttttttttttttttgcctttgggttcaagtgatcctcctgcctcagtctcccaagtagctgggactacaggtgcatgccaccacacctggctaattttttatattttgtagaaacaggatcttgctggctgggcgcagtggctcatgcctgtaatcccagcactttgggtggctgaggcgggtggatcacctgaggtcaggagttcaagaccagcctgaccaacatggtgaaaccccatctctactaaaaatacaaaaattagccaggcgtggtggtacatgcctgcaatcccagctacttaggaggctgaggcaagagaatcacttgaacccaggaggtagaggctgcagtgagccaagattatgcgattgcactatagcctgagcaacaaaagcaaaactttgtctcaaaaaaaaaaaaaaaaaaaaaaccagggtcttgcttcgttgcccaggctggtcttgaactcctggctcaagtgatcctcctgcctcggcctcccaaaatgctgggattacaggtttgagccaccaccccgcccccacctttcttagttgcaggggcagaatgggggtttggaatacaaaagagctgttcctgctacttacacatacatatttttaagcaagtcagttctcctagctaagtcttaatgtctttatctctaaaatggggataacccaccctacctcattgggtatttgtgtagattaataaaatagcaggtaaaaatccctgtcatatcaagggtgttcaaaaaatggcaaatattatcattctgatttatctagacaaggaaactccaagatgttaaggcatcatccaaagggcacacagctcattaggggtaggagcaggaatacaatttgttttcttgactctccagctaatattcttgcttctaacctgtactacttgaaaaggaggctttagttctttttattgtatttatttatgtatgtatgtatgtatgtatgtatttatttatttattttgagatggagttttgctcttgtcgcacaggctagagtgcaatggcgccctgtcacctcactgcaacctccacctccagggttcaagcaattctcctgcctcagcctcccaagtagctgggattacaggcgcataccatcatgcctggctaatttttgtatttttagcagagacaaggtctcaccatgttggccaggctggtctcgcctgacctcgggtgatccacctacctcagcctcccaaagtgctgggattacaggcgtgagccaccacacctggcctagttcttttttttttttttttttttgagaaagagtttctctcttattgcccagactggagtgcaatggcaccatctcgactcactgcaacctccgcctcccagctcaagcgattctcccgcctcagcctccagagtagctgggattacaggtgcccaccaccaggcccggttaattttttgtatttttttagtagagacagggtttcaccatgtaggtcaggcttgtctcaaactcctgacctcaggtgatccacccgcctcagcatcccaaagtgctgggattgcaggtgtgaagtaccgcacttggcaccccctccttttttttttttttaaccatgtttgaattgctaaggtaagaaaagtgtcagggctgcaggatgttaggaaataaagattctccccttttctttctttctttttttagagacaggatctcgctctgacacccaggatggagtgcagtggtgtgatcgtacctcattatagcctccaactcttggcctcaagcgatcctcctgcctcggtctcccaagtagctaggactataggcacatgccaccacgctcagctaatttttgtattttttgtagacacagaatcttcccatgttgctcaggctgatctcaaactcctggcctcaagcaatcctcccgcctcagcctcacaaattgctgggattacaggtgtgagccaccatgccccaccccagttctccccttttctaacaccacccttcctaccaccttggtttctgctgcagacaacaggccccctcctatcacggccagactttgagcaaagctggcttttctgtaccacatagtacaggaggtattggcaagcaccactcctgccccacctttgcccctcctgcctactcttcccccatccatctccaccccgagtctcaccccctccggatgcaggctctcttcccctgagcagagctgctcttcctgggcagttacaaagattctttgtaatgtgtttacaggaggagggggtgagagcggggcctggctgtactgatgggcccaccagccctgtttacataagcagagaaggagccaaaacagatgaccctgtagctcagggacctagattaaacacataaccaaagtccagagccctgtgccccagccgcccagtttctaggctacaccacacagaagcagcatggaggagcctcttgacccagggagggttgttgactcggctgggtgagagatgtttgcacagagagggaactagcagggccatctggctgttctcctgctaagcgctgggcatttgcaggtcaggcaccctcaggattccagggcccctgggaaggcagccccagccaatactgtttcttctttggggaaatttctaaaacattgttatttttacatttttcgcccggtaattatacccaacccaaataaactgtgaagttttattttgcgaggtggtgagaaatgcagttctccgcatttaaaacatggcgatggctggcacctaaaagtcctctgcagtttacaaagcattgccacctccacaatgtcataccgtcctcagagtagctaagtgggtagctatttgccaaaaccatccctattttacagatgagggagtcaagacttagagaggtcgggtcacttgcacaaaccacacgcccaacaagagtgactccaaattttacacccctactactctgacccctacttcctctccattgggctgtaaaataaggcaagaagagagcttgttccaatacataatcaccttgcaggtggctcccaggagagagtgtcacatctcatctcagacatgctggaagccgaagtggtcagcctcaaggggcacttagagggccctgcagtccacccaaggacaccaccagcggggcgttcccagtacgccactcaaagccttacgtggagaggccaggcgcagtggcgcagacctgtaatcccagcactttagggaggctgaggcgggtggatcaccgaggtcaggagttcgagaccagcctggccaacatggcgaaaccctgtctctattaaaaatataaaaattagctgggtgtggtggcaggcacctgtaatcccagctacttgggaggctgagcaggagaatcacttgaacctgggaggcggaggttgcagtgagctgagattgccccattgcgcaccagcctgggcaacaagaatgaaactccgtctcaaaaaaagaaaaaaaagagaaaagaaataaaatgccttatgtggagagactgagcccccaactatgtgaaactgcatgaaacatacacagagcatcccaccactagctgaaatcatggagataagagagggaacgtgtttagaatcacagaaactttcctccaagtttgtttcctcttgtctcctcgtgggctttgtctccccgcattcaaacctgtacaatctacctgaagccattacctgagtcccaattagtgttctttctactttctcctacttctttatcctcccttttacaacccaaaacaccaaacctacccgaaaggcatcatcattccatcttcttcgccgcctttgtctctctgcctcttttttttgttgtttgtttgtttgttttgttttgttttgagacagggtctcactctgtggcccaggctggagtacagtggcacgatctagtctcactgcagcctcagtctactgagctcgagcgatcctcccacctcagcctcctgagtagctaggaccacaggcacgcaccaccacacctggctaattttttaaattttttgtagagacaaggcctcagtatgttacccaggctggtctcaaactcctggtctcaatgatcctcccacattggcctcccaaactgttgggattacaggtgtgagccaccaggcccggcctgtctctgtctcttaaccccaactctactgctccatccaaatagctttgcccagtttcactgattagaacttctctgccacccaaaggtcccagctctgctcccatcacccttagtccagccccagcatctggctcagccaccaggtcctcctgggcttttctttcttgtcactgtcaaatcctggttcccctgccttctcctcaatttatgtatttattgtttacacacacacacacacacacacacacacacacacacacacacacatatatatatttttttttgagatggagtctcgctctgtcgccaggctggagtgcagtggcatgatcttggctcactgcaacctctaccccccagattcaagcgattctcctgcctcagcctcccaagtagctgggactacaggcgcccgccaccacacccagctaatttttgtatttttagtagagactgggtttcatcatgttggccaggatgatctcaatcgcttgacctcatgatccgcccgcccacctcagcctctcgaagtgctgagattacaggcatgagccaccatgcctggccctttttttttttttttttttttagacagagtttttgctcttgttccccaggctggagtgcagtggcgcaatctcggctcattgcaacctccacctcccaggttcaagtgatccttctgcctcagcctcctgagtaactgggattacaggtgcgcaccaccacacctggctaatttttaaaatatttttagtagagagagggtttcaccatgttaaccaacctggtctcgaactcctgacctcaagtgatccacccaccttggcctcccaaagtgctgcaattacaggcatgggccactgcgcccagcctgtattttatttattttgagacagagtctcactctgttgcccaggctaaagcgcagtggcacaatctctcctcctccggggttcaagtgattcttgttcctcagcctcccaagtagctgaaattacaggcatgtgccaccacgcgtggctaattattttgtattttagtagagacagggtttcgccatgttggccaggctggtctcgaactcctgacctcaagcgatccacctgcctcagcctctcaaaatgctgggatcacaggcgttagccaccatgccctgccccaaccccaatttattctttagtgatcacgtttctgtaacaactgtgtgactgtgttttgcagcttttaaactagttttacgcaaatgtatatagaggtaccttcatacagagtctcatttacaagttaacttcgcctccccgtaggatctgtgttcatttcctgctgaaattgctaaatgtggcttgtttgtttttttctgtcttcatcttcaatgtgcctggattcttcctgctatcatgcttttaaccaacctacattcaggtctttcattaccttcctgataaagtgctatttataagttttcagtactctttctactttgaagccctgacttcttttcccccaaccactttattctctctctacagtcactggttttttgtttttgtttttgtttcgtttgtttgttttttttttgagatggagtctcactgtgttgcccaagctggtcttaaactcctgggctcaagccctcctcccacctcagcctcccgagtagctgggattacagacgtgaacaaccacactggctcttctctgtctacattcagcaccaccatagattattttttgttttttggggttttgttttgttttgttttgtttgagacagagtctccctctgttgcccaggccggagtacagtgtacagtggcgcgatattggctcactgcaacgtctgcctcctgggcttaaccgattctcattcctcagcctccggagtggctgggaatgcaggcgtgcaccaccacacccggctgatttttgtatttttagtagaaatggggtttcaccatgttggccaggctggtctcgaactcctgacctcaagtgatccacctatctcggcctcccaaagtgctggaattacaggtgtgagtgtgagccaccacacctggcctacctacttttaattacgtgtagattaaggggcagttagtgcagaaattactagggaagaggtagtaacttctaggttgtcagctcattgccatggaaaggggtggtaactcccgggtgttgccatggcaacggtaaactgacatggcactctggtgggcatgtcttatggaaagctgcttctgccctggccccattttagctaatcctcaatttggtccactgtccaagccccacctgcagagtcaagtccctcctcccacctcagcactgctagaaaagagcttcaggatggagccacacatgtcactcaagcccaagggtcagtcaacagcccacagccctaaattcatctgtgtccaatgccagaccctgcaactgctgatttacatgaatcaactccatcatgcaagcctcatgacatcccaatgaggtaggtgctgtttgaatcctcattttacacttagagaaactgaggctccaaaagttcaagtaactagaccaagagtacatggtacagacaagatgagaaccaagaccatctgagtcctgcgcccctctactatacaccatagctaggaaggatatggcttgggctgacttgggaatgaggccacaaggctaggggctgtttggtttgttttgatttgatttgattaggcaccaatgttctcataaacatccgtatccagacgcaggtgcttttgcagtcatgtgactggacgtgggctaggactctgttgtccgtggctggagtccatagctgagaacaaagaaggaaaaacttcaggaggacactcccagcccacagcacggcacatcaaagatcccagatgccacctacgtgacaggcagaaacgctcgcgagctttgcttgctcagccagtttttctgctcctcaagtctggacgaaagcagcaagaaagagagaaaggacttggtagaagccaaagagaaaggactttgccttctgcctattggtgggggcttccctctcctcctccatgactggttcccttgccccctcaccatgaagacaagtgagaatgtcttcaaaacctggggacagaggctgggtgcggtgtctctcacctgtgatcccagcactttgggaggctgaggtgggcagatcacttgaggccaggagttcaagaccagcctggccaacatggagaagtctcatatctactgaaaatacaaaaaattagctgggcgtagtggcatgcacctgtaaccccagctactggggaggctgaggcaggagaatcacttgaaccgggaagcagaggttggagtgagctgagattgcaccactgcactctgcactccagcctgcacaacagagggagactccatctcaaaaaaaaaaaaaaaaagagcagggggcagggcgggcaggaatcccagtcaccagggagactccatatctacaaaaaacctcatcctcggccaggcacagtggctcacacctgtaatcccagcactttgggaggccgaggcaggcagatcacaaggtcaggagatcaagaccatcctggccaacatggtgaaaccccatctctactaaaaatacaaaaattagctaggtgtggaagcacaggcctgtagtcccagctactcaggaggctgaggcaggagaatcacttgaacccaggaggcggaaattgcagtgagccgagatcacgccactgcactccagcctggcgacagggcaagactcaaaaacaaaaacaaaaacaaaaaaaccctcaacctctagttgagcattattttaaataggagactctcgtgcctaggcaggtggcgggtgattcaacaaagccactaagaggggaaggtggccagggaggggcaggagcaccacaggaggtccacgttccattcactaagaggggaaggtggccagggaggggcaggagcaccgcaggaggtccacgttccagccatttgagtggccaagggtgcctgagtttgtcacagatcaaatggacccaggagcaggtagctggacttgagttgtccaactggtgcccccacccaagaatctcctcaaaaggaggttgtgcagtgccctgctaggggcagaaggcagatcgactgggacaggggactgagtagtaagcaggcccccaaggccccctgaggatttcatccctgaacaccacaagccaacgtttgtgtggctgacgcacagtagcggtagactgtgttttccaaaagtgaccttggcagcgtttttggtcccacatgcaattccagaaccacatcacttcccatcaaaaggtggcatctggctgggtgccatggctcacgcctgtaatcccagccctttaggaggccaaggtgggcagatcacctgaggtcaggagttcaagaccagcctggccaacatggccgtctctactaaaaatacaaaaattagccgggcacagtggcaggcacctgtaatcccagctactcaggaggctgaggcaggaggattgcttgaacccgggaggtggaggttgcagtgagccaagatcgcgttactgcgctctagcctgggcgacaaaagtgagacttagtctcaaaaaaaaaaaaaaaggtggcatcgccaggcatggtgcctgtaaaaccagcactttgggaggccaaggcaggagtatccctttagcccaggagtttaagaccagcttaggcaacatagtgagaccccatctctaacaaaaaataaaataaaattagctgggtgtggtggcgtgcacctgtactcccagctactcaagaggctgaggtggaaggattgcttgaacccaggagtttgagaccagcctgggcaacatagtgaaacccccatctctacaaaaaaaatttaaacattagccgggcatagttgctcatgcctgtagtcccagctacacgggaagatgagggtggaggatcacttgagcccaggaggtcgaggctgcagcgagtcatgattgtactccagcctgggtgacaagagtgagaccccgtgtcataaaaaaaagaagaaaagaggggggaacatattttcccttcccctgaaactaggtgtgactttatgactgcctcaaggcattgaatgcagtgaaagggatgctgagtgcttctaagattaggttataaaggacatgtggccttcattcacctgtcccctctgtctctctgtcacccactccacttccttccttcccgtacctccttccttccctcccttccattcccttccctttcctttccttccttccttcactccctccctccctccctttctttccttctttccctccctcccctttccttctttccctccctccctccctgccttccttccttcctttcctccctccctccctacctgcctgcccgctcacctgctcttccttccttccttccttccttccttcccttcccttccctttccttccttccttccttccttcctcctctctctctctctggatacttgtccttggaccccagccaccatcctgtgaggaagcccagagcacatgaagagaccacctgcacatgttcagatccactgccccagctaagatctccgctgacagccagaccaatcaccaatcttaggagctggcgagccttcagatggtccaacctttgaggccccccagaggagccaggtggagcatagatgagccatccatgtggatccctccaccaaatggaagatttaggagcaaaataaacaatgttgtcattgctttcacccacgaaattgttgaataatttgttttgctgcttaagtagctggaacactgtgttaccgagggaagagcaacaaccaacaggagagaatagtcagttaagtaagagatttttgaccctctccctatccgtccactttgctcaacacaacagagaagccacagcttccaataggaaaatagagagggaaggtgtctccaacagtcagatcactcactcctgccaccccagggagagggaaggggaggaggaaaagcatagatgaaagtacccttcccacagcaggttccccagccacagccctagccgacagtaaagaaaactcaggctgggcacggtggctcacgcctataatcccaacactttgggaggccgaggtgggcggatcgctggaggtcaggagttcgacaccagcctggccaacatggcaaaatcccatctctactacaaatacaaaaactagtcaggcaggtggcacacgcctttaatcccagctacgtgggaggctgaggcaggagaatcgcttgaacctgggaggcggaggttgcagtgatcccagcctcggtgacaaaagcaaaaactccgtcaagaagaaagaagaagactcagtaaaatgggacctttggaatcagatataagacttgggtttgttttttttgttttgttttgttttttttaagacagagtttcgctcttattgcccaggctggagtgcaatggttcaatctcggctcaccgcaacctctgcctcctgggttcaagcgattctcctacctcagcctactgagtagctgggattacaggcatgcaccaccatgcccagctaattttgtatttttagtagaggcggggtttctccgtgttggtcaggctggtcccgagctcctgacctcaggtgatctgcccgccttggcagcagcaccccatctggagtggccactgccatgatgctggctgcagtgagtgaggcatagctgggatcgcagcactccacagagctggagggagctgggaacacatggaagcccccactccttccaagttggagggacaggagaccctccctcccaggagtagctgcagccacccagtcacagccgcaaacccgggctccccttcagcattgactccaccagctttcacaacacagaagtcaaacttaggcaaccacagtttctagggtgcccttcaggaacttttatttgttcagggcagccagccaatttttaagcacaatgtctctttgtaatcataaatcattagtttcatgattctttcaacactttcatcttagagtcctttcaaaactcttgggtggataccacctgatcttgtcagctgagcttgtttgctgacaggtctagaaccctggggttacaaacgttattgcctatattccctctgactatctgtgggaccagtaatctcatttcttggaatccatccttaggaagtaatcaaagatgtcgaggccaggcgcggtggctcacacttgtaatcccagcactttgagaggctgaggtgggtggatcacttgaggccaggagttcgagaccagcatggccaacatggtaaaaccccatctctactaaaaatacacaaattagccaggcatggtgagtgcacacctgtaatcctagctacttgggaggctgaggcatgagaatcacttgagcccaggaggcggaggttgcagtgagctgagatcacgccattgcactccaacatggcaactgagggaaactctctcaaaaaaaaagaaagaaaagaggccaggtgcagtgactcacacctgtaatcctagcactttgggaggccgaggctggtggatcacttcctgcctctgccacccctgagacagcaagagcaacccttcctcttcctcctcagcttactcagtgtgaagacgatgagtatgaagaccttgatgatgatctatttccacttactgaatagtaaatatattttctcttccttaaaaaacagtgttcacatgatatgaatgtagcagatacttccaggataccagcctcctcttcaatacaactgcaactatggttttgaacagtgtttaaaataatatcaataaatatttatttgtatatgaaaacaggaaaaaggtaaactaaagccatggggattgtgttagggtggagagattaccggtaattatttttctccattttgcaaatttcctttaatgatactgttgttgcttcttttttggatacagagtctagctctgtccccaggctggagagcagtggcacgatctcggctcactgcagcctccgcctctggagttcaagcgattctcctgcctcagcctcccaagtagctgggactataggcgtgtgccaccacgcccagctaatttttgtatttttagtagagacggggtttcaccatatgggccaggatgatctcaatctcttgacttcgtgatccacccaccttggcctcccaaactgctgggattacaggcatgagccaccgtgcccggccctttttttcttttttgagatgggatcttgctctgtggcccagactggggtgcaatggcacaatcatagctcactgcagcctcaacctcctgggctcaatctatccttctacctcagcctcccaagcagctgggaccactggcacacactaccctgcacccagctaattttagtattttttgtagagagagggtctcattacgttgcttaggctggtctccaactcttgggctcaagaatcctcccgtcccagcctcccgaagtgctaagattacaggcttgagtcatcgtgtctggccctgtcattgctttttagttttcaaacattttttaaaaagtaaatctggccgggcacggtggctcacgcctgtaattccagcactttgggaggctgaggcgggtggatcacaaggtcagtagatcgagaccatcctggccaatatggtgaaaccctgttctctaccaaaaatacaaaaattaaccaggcatggtggtgtgcgcctgtagtcccaggtactcaggaggctaaggcaggagaatcgcttgaacctgggaggtggaggttgcagtgagccaagatggtgccactgcactgcaggctgggtgacagagcgagactccatctaaaaaaaaaaagtaaatctctccaagcagtaagagtcatgcaaccaagctactgagtttctcccatgaacttgtctcggaacatagtggaaagtcacaaccattaaagcctgtagtcccccccacccttgcacaacgtggccccctcttatgcgtgccttaccctgcaaggcaaagatgaaggctgtaactgtggtaggttgtgaaagcactttgaaggtaaaagtgtctgttgttactctgaaaactccttttaaacggctataatagcatatgccacatgagcaaagcacagaaccttataactatgcttgcttgtggaaagacatcccttgtccacgggccaagtatttgaaaataccactccatatagctccagggccctgagagaagctaccgtggcagctttgggaaaccagccacccttggcttcactttgatcttcctcagtctacatccttgtttcagttcctttgccacagacatacaattaccaagtactatattgcttgataataactataattactacaaggactgcctgagatgaaaaagacaggtgaaatcgaactttcacatggactggtgtctgagctggagagtctgtttgagtttgagtaggggaaagcctgaaaccccccaccacctgctcccgttagtccctgcattaactaggggcggactgggacctgatcctccaagctggaggcttgaaaactcaagggcaggcgcctggtccagcgattcggaaaccgagatgcaaagtcctcccgcgctcctagagaggacccggaagcgcggcgcggtcccggaagacgaggtggtgacacgcttccggcctttgtgactcattgtgtctgtgtcgaggcgtcgggagggcctaagtccgtgtgcggtgcccttcggccggcctgagccccagagtcagctcccctttctcgcccagcgcccccaggccgctcccggggctcacggtgagacttggggccggcctctggggtgggagggcggggccgcaagggtgtgtgcgcgagggtgggctccgcagctgcggccctgggaccccctccaggcggccccgctgttgtgcgaagagagtccatgcccctgcctcctggccgggcccggccgtagaaagcgccgttcttcctgggagacgtccccgccccacccccaggatcaggcggggagggggcgagggtttcagtggctgagggtgcccggagacccggggagaagccgtctgtgggcccctctcccgcagtgtcgtcatcgccctttgacgtttctgcaaacggggtcgcgagcgaaccgaccccggtcttgatttttctgctctcccttagtcgccatttgctttgattccggtgaggtgtctttttccccccccggttccttcgggacctcgaggtgaaatgagcggaaggatgagagatggacacattttgaggtgccgcatacgtttccagacctgcctttccttctcccaccctcatcactgagcggtgattaaagagtatttgaagcctagtcatagtggataaataggtgattgggatctagtagagattatatacaccccactctttcagcttgatggaatgctttgaaggctttggaaaagagctgtccgggacgttaggtggatttttcaattctggatagttgctctgtttgacatggagtggggtgagaagtgaagggaatttgtggaaattgcactgtgtcactaggagactgattagctgagtgaccttggataagacgagacactcaccaagtcttaatttcgtcatcaataaaaactaactggattttctcaaaaggcccttccgacttcgaaatgatttggtcaatgtaattgaagaattaactacagtttagcttgacactcctccatccctcccctccctttcctgcagtgccccctgtacacagtaagatactttcattatagagagtggctgttccatggcctgggaccaaagaaagcatttattgtacgggccagtgctaggcggattggaggcggtcaataaatacttgttgaattgaattgtggagaattcattgtaaccacatcagcaaagcactgttagtatatatgctgaacaaatgtggagaaatcgctgttttacataggaaaccatggtgatttgccccagaatgtgtatccaggtttgtatcttctctgaattaacatataagattcttgtttattatttcaggcagttttcaccactcttaaaatacaaacgaggaagctagctacttagtcttttgctcattctcgatttaaaagcatttaaaatacagatgaatagcatattaaatctaacattttcattctgtgggagtatcaatattctttgaatagctagctgtcttttaaggtagctttttcatattaaaacatttgattgctctttaaaaaaatgagtgtaaagggcaaagggcaatttatttaaaaaaaaatttttttttttttgagacagagtcttgctctgtcgcccaggctggagtgcagtggtgcgatctcggcttactgcaacctctgcctcccgagttcaagcgatcctcctgcctccgcctcccgaatagctgggactacaggcatgtgtcccaaggcttggctgatttttgtatttttagtagagacagagtttcgccatgttggccaggctggtctcgaacgcctgatctcaggcagtccgccaacctcagcctcccaaagtgctgggattacgggcgtgagccactgtgtgcccagcctttgtttacattttcaagactatgccctggaaaaatactgggctgtttggaacacagcctttgagcttgtaacttcaagccgttgtttaagaaaatcatttctgtttatcctaggtgagaactgaggtatccttagctgctggaggtaattttatttaaagtggatggtatgtcagtatgtttttcagcccatattcacccagaggtagtttcctactatctggaacccccaccctacccccatttgactgataaagatacaaaatgccagagaagttaaatacctctctcagggatgtgccacttacttgtgggagactagaattcagttattgcctgtgcagctttcactattacaggagttgtcccattgcttaatcttctaagcaggctgaaaattggaatgtacagttacatcttttaagcttattgaaaaaaattaagacatttctgtagtgcctactaaatgccaggcactattttaagtgctttatatctattacctcatttaatcctcacggcaactctatgggacaaatgctgatttttattcccattatacagatgaggaaactgacgcatagagaggttaacttgttgacttgcctaaggccgtcaactagtaaggggtggagcagctttaatgctaacctgaaactcatccaactagtccatggaacaaatttgagtgcaacattgaatgtagaatgatcgggcttttaaaaaatagtaacgttgtcaattcagtcaagtgtatttttgaaactgaggcttgcaaggaatcatgctaagtggtctaaggagtacaaagaggactgctcttaataatctagttgaggaagaaggcaagaaaaattacagagaaagaaacatcatgagaaattttttttttttttttgagacagagtctcgctctgtcacccaggctggagtgcagtggcgcaatcgcagcctcccgggttcacgccattctcctgcctcagcctcccaagtagctgggactacaggcgcccgccaccacacccagctaattttttatatttttagtagagacggggtttcatcgtgttaccaggatggtctcgatctcctcacctcgtgatccgcccacctcagcctcccaaagtgctaggattacaggcatgagccactgcgcccggcgcatcatgagaaattacctagcaaatgtttggtgaagagtattagggcctttagagacagaagagtatgtgctcagatcatctgggaaacctcaaataaaacccagcctttccactgctgtgatggcttttccctgcaccccagagtaggagcagagagatactgaaggtgaggaggaggatctgtcccagttgtgggcagagggaatgtgcccatgtctgtgtctatttccccctggactcatttcctccttagagtcgcatcttcgcactgacccaagaagtgtcctgctcaatagctaaggcaggataaaactttcacaaaagtagggatttctggtggctgggctcgctatcacactagttctgctcagttaccatgtttgaagatcccacctggttatgttgtagacagtccccacttgaatcttctgctgtgtctcctccctttcccaggaagggcttcagtcacatagtgaccctccagtgaaaactgggtggtagataaggcccgttcctgagtgatttttttttctctttgagaaggagtctctctctgtcacccaggctggagtgcagtggcgcgttctcagctcactgcaccctccacctcccaggttcaagtgattctcctgcctcagcctcccgagtagctgagattacaggtatgtgccacacatccagctaatttttgtatttttagtagagacggggtttcgtcatgttggccaggctggtcccgagctcctcagctcaggtgatcgaccctccttggcatcccaaagtgctgggattacaggcgtgagctaccgtgcctggccctgattgattcttcattgtcacgttcataggccttcattttaggatctgtataccccacatgtcaggtacaagataaattttgtataatggttaaagagtttacattggggaatcacttttatttcaaattctgcctctaccatatacttgctgtgtgaccttgagtaagttatttaatggcagtatatctcagttcttcttttgtttttttttgagatggagtctcactctgttgcccagactggagtgcagtggtgtaatctcagctcactgcagcctccgcctcccaggttgaagcaactctcctgcctcagcctcccgagtagctgggactacaggcattgcaccaccacacctggctaatttttgtatttttagtagagatggggttttgccatgttatccaggctggtctcgaactcctgacctcaggttatctatctgccttggcctcccaaagtgctgggatgacaggcatgagccgctgcgctcagcctctcagttctttatacagtgagatgataagtgtagctacctgctaagattgttatgtggtcaagtgaaaatgcttaaatacccggtacctagaaagcactcagtaaacattggctcttactgttatagttatgagagggttcttgaacagtgataagaggcaagtcgcgttttagctagctttaaaggttaagtaggatttgaaaaggcagagaggactgcggggggaagtcccaggcatggagtgtgatgtgaggaaaggatggcagtcaaaatacaaggcatatataggaaatactgatgagagggcttttgttgcatagggaaggtttatggggggattgatgggaaaagaagcttgagggaaaattgggaccaggcactggaaagtattaactgcaaggctgtagagttttagaaagaataatctgaaaggtggattgtgggagagaagggagaaaatgaaggcagggaaccaaagaaaggaagctggacttcatggaactagattaaaaaaaataagtatggcctgtaatcccagctactcaggaggctgaggcaggagaattacttgaacccgagaggcggatgttgcagtgagctgagatcatgccattgcactccagcctgggcgatagagcaagactccgtttcaatatatatgtatatataatttttgtgctgttatatgtacatgatccctttttcaccaaaattaagaatatgtttagtgagagccataaaactaaaaatgcttttgctagtttaaaactcggtttaacccatcatgataaagcagtttaatggtctgtttctaaaacttcaatttgatgcttagttttgatggctgtagaggtgaaaagaataaattcagaaagatttgtagcttcagatggaagaatcacagtgtcagttctgcttagtaacttgtgattgatccaacctatcaaccatgctgaatttttgttgttgaaatgcagggtatagtcttacaaactaatcaggtggtggcattttatatttttaacaaataggcttaagacccacctgaaattcttcatttgaaagatttttaaacaggttagaaaatatttccaagtttcttttttttttccttttttttttttttttttttttgagatggagtctcactttgttacccaggctggagtgcaatggcgtgatctcagttcactgcaacctcagcctcctgggttcaagcgattctcctgcctcagtctcccaaatagctgggattacaggcgcctgctaccatgcccagctaattttttgtatttttagtagagacggggtttcacgatgatggccaagctggtcttgaactcctgaccgcaggtggccccctgctccctgcctcagcctcccaaagtgctggtattacaggcatgagccacctcacccagccccaagtttctaaaatgtgaacatagatgggtttttcctggatacttgacatcatttttggcagttaaattacataacaatggaaccatttcatacagctgttcctgtaattgccctttcttcacactttctttaaagaagctgattactcattggtgactttttctttgatttagactgacattggtttttacctcctaatgtggctaaaaccttactctagatagaagcttcatctgtgccattttcttcttgttcacatctgtttatattattagtgtgtcctgtaattgcagtttctctataagaatctttttttttttttttttccttttcctgatagggctttgctctgtcacccaggctggaatgcagtggcgtgatcgtagctgactgcagcctcaaacttctggtttcatgcaatcctcccaccttagcctcctgagtagctgtgactgcagacacagtccccatgcccagctaatttttttctttttcatagggacagggtcttgctatgttgcccaggctggtctcaaacttctggcttcaagcatcctcctgcctcatcctcccaaagggctggaattataggcatgagctaccatatctggccacaagaatctttaaagctgcttgtctcttttatgacagagtctcgctctgtggccaggatggagtgcagtggcgcgatctcggctcactgcaacctccgcctcctgggttcaagtgattctccttcctcagcctcccaagtagctgggactacaggtgcccgccaccgcgcccagctaatttttctatttttagtagagacagggtttcaccatgttgaccaggatggtcccgatctcctgacctcgtgatccgcacgccttggcctcccaaagttttgggattataggcatgagccactgcgcccagccaaagctagatttagaaatccattatttcacataactggtctcagataaaccagtctacatcacaatgtctaaaatgaacaacacctgtgacaggtcagcacagactaagtaagtgtattagtgtcaatttatagcttaatttctctctcttttaagatacagacattccaattattttctttctgtatcctttgcggatcatcttgtactttggaaaccacaatttaactgcccaagtcactcataaaaatagcaaaagtagctggatggtacaaaagtaggtcccagggcttcaaatttggttgaatattgactccagtaggcagccacctactactgagcaaacctaaccctcagttatgtcatttgtaaaacagcacttaacagtttggccgacctgctagggctgttgtagggacaaaagaagatggtgcgtgtactgctttaagcctggcacctggcactctgctaacattcagctctctgggctgggcactgttaatgctccatttcgtaacctgctgtcaacctgcaggtaaatcactctgactccaagcaaacaccctgagggtggagtcggcctgtttgaggtttctgtttgcaaatcttgatatatgaagtgacagtggagattgtacagttttttcctcgatttgtcaggatttttttttttttgacggagtttaacttcttgtctcccaggtaggaagtgcagtggcgtaatctcggctcactacaacctccacctcctgggttcaagcgtttctcctgcctcagctttccgagtagctgggattacaggcgcctgccaccatgccctgctgacttttgtatttttagtagagacggggtttcaccatgttggccaggctggtcttgaactcctgaccgcaggcgattggcctgcctcggcctcccaaagtgctgagattacaggcgtgagccaccacccccggcctcaggagcgttctgatagtgcctcgatgtgctgcctcctataaagtgttagcagcacagatcactttttgtaaaggtacgtactaatgactttttttttatacttcaggaatagtaaagaaacacatcataaaacctcccaggacataaaggtgagcacagaccctgtttggatcaagtcagttcctggagcctgaatgatgactgctgaatcacgggaagccacgggtctgtccccacaggctgcacaggagaaggatggtatcgtaatagtgaaggtggaagaggaagatgaggaagaccacatgtgggggcaggattccaccctacaggacacgcctcctccagacccagagatattccgccaacgcttcaggcgcttctgttaccagaacacttttgggccccgagaggctctcagtcggctgaaggaactttgtcatcagtggctgcggccagaaataaacaccaaggaacagatcctggagcttctggtgctagagcagtttctttccatcctgcccaaggagctccaggtctggctgcaggaataccgccccgatagtggagaggaggccgtgacccttctagaagacttggagcttgatttatcaggacaacaggtaaaaagaggtgaaacctattatgtgtgagcagggcacagacgttgaaactggagccaggagaagtattggcaggctttaggttattaggtggttactctgtcttaaaaatgttctggctttcttcctgcatccactggcatactcatggtctgtttttaaatattttaattcccatttacaaagtgatttacccacaagcccaacctgtctgtcttcaggtcccaggtcaagttcatggacctgagatgctcgcaagggggatggtgcctctggatccagttcaggagtcctcgagctttgaccttcatcacgaggccacccagtcccacttcaaacattcgtctcggaaaccccgcctcttacagtcacgaggtaagaagcaaggtttcatttaggggaagggaaatgattcaggacgagagtctttgtgctgctgagtgcctgtgatgaagaagcatgttagtcctgggcaacgtagcgagaccccatctctacaaaaaatagaaaaattagccaggtatagtggcgcacacctgtgattccagctacgcaggaggctgaggtgggaggattgcttgagcccaggaggttgaggctgcagtgagctgtaatcatgccactactccaacctgggcaacacagcaaggaccctgtctcaaaagctacttacagaaaagaattaggctcggcacggtagctcacacctgtaatcccagcactttgggaggctgaggcgggcagatcacttgaggtcaggagtttgagaccagcctggccaacatggtgaaaccttgtctctactaaaaatatgaaaattagccaggcatggtggcacattcctgtaatcccagctactcgggaggctgaggcaggagaatcacttgaacccaggaggtggaggttgcagtaagccgagatcgtaccactgtgctctagccttggtgacagagcgagactgtcttaaaaaaaaaaaaaaaaaaaaaagaattaattaaaaatttaaaaaaaaatgaaaaaaagctgcatgcttgttttttgtttttagttattctacattgttgtcattattaccaaatattggggaaaatacaacttacagaccaatctcaggagttaaatgttactacgaaggcaaatgaactatgcgtaatgaacctggtaggcattatttattgaattatcagcattccagatgtccagcacatttttaataggaaagtattgggaacagatgtcattattttcagcctaggttttaaaacattttagtatgtcatgaattatcttcaaaaggatcataaatcttttttaaaggtccattttatttaaaatatataaaaataatcactgcactgcagcctgggtgacagagagtctgtttccaaaaaaaaaaaaaaaaactatagcatcagtcttttctaggttattttcagaaatttcaaacaatgggaaaagaatggaagaacttttgaggggagttgaggaacacgaaaaaagatcagttcacagtcatataaataaaaagtcatgttacttgttttttctcttttgacggaaatatgtaatacatttatccagttttaaaatcaaagtatgtgcttagaatgtaaagacaaggaatgctaaaagtacatttatcacttaatggcagggataagttatggtaagtgcaatgttaagtgattttgttgtgcgaacatcataaagtatacttatacaaacctagatggtctagccttctccacacctacgctacaaagctgtacagtatgttactgtactaaacactgtagggaattgtaacacagtggtaagtatttgtgtatctaaacatcgaaaaagtaaaaacagagtataaaagatttttagcccaggcacagtggctcacgcctgtaatcccagcactttgggaggccaaggtgggtggatcacttgaggttaggagtttgtgaccagcctggccaacatgttaaaacccggtctctactgaaaatacaaaaattggctgagcgcagtggctcacacctataatcccagcactttaggaggccaaggcaggcagatcacctgaggtcaggagttcgagatcagcctgaccaacgtggagaaaccccgtctttactaaaaatacaaaattagccaggcctggtggcaggtgcctataatcccagctactcaggaggctgaggcaggagaattgcttgaactcaggcagcagaggttgcggtgagccaaaatcgcaccattgtcatgccatcgcactccagcctgagcaacaagagtgaaactcatctcaaaaaaaaaaaaaaaaaaaaaaaaagtacacctgtatggaacacttaaccatgactggagcttgcaggaccggaagttgctctggatgagtcagtgagtgagtggtgagtgaatgtgaaagcctaggacactactctaccatagactgtagaaacactgtacacttaggctacactaaatttatctttaaaatttttgtttcttcaataataaatcagccaggcatggtggctcatggcttaatcccagcacttcgggagtccaaggtgggcggattacttgaggccaggagtctcagactggtttggccaacatagtgaaacactgtctctacaaaataaaaaaattagccaggcgtggtggtgcatgcctgtaattccagttactcaggaggctgaggcacaagaattgcttgaacctgtaggcagaggttgtggtgagccaagattgcaccactgcactccagcctgggtgacagagtgagactctgtctcagaaaaaaaaaataaataaataaatacaaataataaattagcttactgtaacttttttactttatgaactttttgatttttttaactttttgactgttgtaataacataactcaaaagacaaacatgttgcacagctatacaaaaacattttttatccccctattctataggggtttttctagttaaaaaaatttttattttatactttttaagctttttttgttaaaaattcatacaccctccaagctaggcaacagagcaaaactccatctcaaaaaagaaaaaaaaaggccaggcgcagtggcccacgcctctaatcctggcactttgggaggcgaaggtgggcaaatcacttgaggtcaggagttcaagaccagcctggccaacatggcgaaacgccgtctgtactaaaaatacaaaaattagttggttgtggtggtgtacacctgtaatcgcagctactcaggaggctgagacacaagaacgcttgaacccgggaggtggaggttgcagcaaaccaagatggctcctctgcactccagcctgggcgacagagcaacactcatctcaaaaaaaaaaaaaaaagaattggtcgaggcacattccttaaccagtgtgtttattggtgatgacatttaaggaatattagacatggagcttaaggatgcatcctctcttccgtgcatcctggaggacagccagcaggtatgtgctagagaaagctgtgtaaactggtgcaccgtggccaggcgtggtggctcacgcctgtaattccagcactttgggaagccgaggcaggaggatcacaaggtcaggagattgagaccatcctggctaacggtgaaaccccgtctctcctaaaaatacaaaaaattagccaggcatggtggcgggtgcctgtagtcccagctactcaggaggctgaggcaggagaatggcgtgaacccgggaggcggagcttgcagtgagccgagattgcgccactgcactccagcctgggcaacagagggagatgctgtctcaaaaaaaaaaaaaaaaaacaccggtgcaccgtgatgtttaactccactactgttgatgttcttgtaaggtttctccacactctacaagcagaagtcacagggcgaccttaggaaactggagaggatattcatggtcttaagcactagattatagagtttaggttgccagagtaacagtttcaaagatcctggcacacacagttgctctttagtaaatagttcttaaataaattgagacatgtacatttattctcaatttcctctttcttatttgttttccagagtgtttccttactctcagaagtttaaaaaattaagtacttggggctgggcgcagtgactcacgcctgtaatcccagcactttgggaggctgaggtggccagatcataaggtcaagagatcgagatcatcctggccaacatggtgaaaccccgtctctactaaaaatacaaaaactagctgagcgtggtggcaggcacctgtagtcccagctatttgggaggctgaggcagcagaatcacttgaacccaggaggggaggttgcagtgagccgagatcgcgccatgcacaccagcctgggtgatagagcgagactccatctccaaaaaaaaaaaaagtacttgggtacagtggctcacacctgtaatcctagcatttggggagaccaaggtgggaggatcacttgagcctgggaggtcaaggctgcagtgagacatgtttgagcactgcattccaacctgggtgacagagagcctatcttattgttgtataaaggtttgaaataggtacaaggtttggtcattcagtttcaaattcatttctcaaatatccttgtatctcactaacatcatctgtctaccagtaacatttccaaatctaatagtacttggcaagagatggggagggggttaaattgcacaatttaaaattttcataattgttatgcatcacagttattgtgatcacgtgataatgttatgcatgtcttttgttgtgtgtcagccccaacttttgtctcagcatttgaaccatgcatacatcttatcaaaaaaaaaaaaaaaaaacagtatttattgtggccaagtgagggagaaaagtagagggacaaaaactggcaaaaacttagccagaggtggccggacacagtggctaacacttgtaatcccagagctttgggaggccgaggcgggcagatcacctgaggtcaggagttcgagaccagcctgaccaacatggagaaaccccgcctctactaaaaatacaaaattagctgggcgtggtggctcatgcctgtaatcccagctactctggaggctgaggcaggagaatcacttgaacccgggagccgaaagttgcgatgagctaagatcgcaccattgcactccagcctgggcaacaagagcaaaactctgtctcaaaaaaaaaaaaaaaaaaaaaaaaacttacccagagctaaggagacctccttacttccctgcctttctggatattgctactaaagtgttttttttgttgttgtttttctggatttcattgagacggggtctcactctatcatccaggctggagtgcgtgatcatagctcactgcagcctcgaccccttgagctcaagcaatcctcccgcctcacctgccactaaagattttaaagctgtgttgtgttttccacaagtgtaggcataaatgggattctcatatcctggtatcgttccttggactggaggaaattaggagccagacttgagctatgggctgaaggtacccacttttatagctgagaataggaacctgggtccccatcctggctctgccactgggaatgtgacattagggaagtcatttgcagtctcagggactcaagtttccccttctttaaaataaaagggttggaccaggtgattaggacccttttatgactcctgctcaagagtagaggtcttgggaaaactgaggccctgtgttctctcgtttgtgttgtctggaattctgtatttgggacctaaacactgaacagtgaacatgctggtgcaggaaggaacatgccccgagcccttctttgagcaaggctcagagcggagctgatttactcacagaccctttctcctcccccagctcttcctgctgcccacattcctgcaccccctcatgagggtagtcccagagaccaggcgatggcatctgcactattcacagcggattcccaggtgagctgtggcccctctgctctcctgagtcctcagtgtctgcctctgttcctgagctctcttcattatctccacaggccactctggatgcccctgctctcaaagaagccccaaccctgtcctctccttttagcatctttctaccacaaactcccctccacccccaggttctggccacccttttcttcccagcgtcctgtagctttgcagccacctctcttcctgactccaggtttgagcaatgggattgtccctgagtttggggggaaatgactgtttgtctcgtgttattttaggcaatggtgaagatcgaggacatggctgtgtccctcattctggaggaatggggatgtcagaatctggctcggaggaatctcagtagggacaacaggcaggagaattatgggagcgcatttccccagggtaagacggatgcaggcttactgtctgataagatggttttgtctctctgtgtgttagctgtgggatctctgatgtgttcaattgagtgttgaggagttagagactacctatccccttttgtagaccagatggaaagtgagaatgtttgtgttcatttaactccagaagcatggtactgtgaccctgattccaggtgggttttttattgctaagtagtttttgctctttaaaatcagaaataattgagttccaagtcctcacctcttcagccactcagttgcctgggaggcagttctgctccgttcccatggattacaatttaggtgcctctgtcgggggaatatctttcctagcagagatgaccaggcgaactgatcatccgtctaatcccaacccattgtcccggtaccacattcccgaaactaccaagcatccttctgttggctttctgtcttcttccatcctgtgtgattagtgtgattccaatacactgctttgtgtaattccacgaacttgcacctggactgtccttgtgatgaggattcccagcttccaaacttaatggtgattttctatgaagagctctgggtcctggatgtgtagtaagaacgaggaagttcaagaggcatcagccagataagacaaggtgacactgttggcagacatttccatttgtctctgctggatcttaacccctcaggacagtgctgcaaagaagccctcacgtgagtacagcaatagggaggtccacagcaagcttctacctggagagggcaaagggagtgtgaataaagcgtgaacatgaaggatgttactaatgaaacatcaagttctatttttgatcaggcataaatggggcttataatttctcttggtacttgctctttgtactagatgattttttttttttttttttttttttgagacagggtcttgctgtttcccaggctggcatgcagtgctgcgatcacagctcactgcagcctcgacctctcaggctcaagcaatcctcccacctcagcctcccaagtagctgggactacaggcatgcatcaccatgcccagctaatttttacatgttctgtagagaagaggtttcgccatgttgcctaggctggtctcaaaacccttgggctaaagtgatccacctgtctccacttcctggagttctgggatttaacaggagtgagccactgcacctggtctccagcattgttttctgtttcttttttgttctgagttattctgtgtcagtcagtgaagggtttaattatttttactaatgtcgtaaccacttttttccacctactcctctgttacttgagcactgtcagctctgtgttcctctccttgttggatagaaactatttcctgtgtctgaagattcctgtagcctgccaggttcaaaacaagttccttgaccaggcacaatggctcacacctgtaatcccaacactcgaggaggctgtggcaagaggatcgcttgaagccaggagttcaggaccagcatgggcaatatagcaagaccactgtctctacaaaaaaatttaaaaattagccaggcggggtggtgcaggcctatagtcccagctacttgggaggctgaggcaggaggatcacttgagcccaggagatcgaggctgcagtgagctgtgctcatgccactgtactccagcctggctgacagaacaagaccctgtctcaaaaacaaaaacaaaacaaagtttcttgtttgttaatcatcagcttgttgatagaaaactcacagaattggagaaatatttactattcctttctttctgctaataccactaatcattttctatgaaagacctgttctttttttgaacttatgaataatgttagaaatggaacatgatgttttaaatgtatacataaaccttccaattaattatcaggtgatccagtagtagacctgtgacctctgaaggctcctgcttctcatcccttcccttctgctgtgatttgttgtcttccctctgctcattccccttgtgtctgtttcttccatcctctccccatgctccctctgttgtcatttccccttactctccactctttgcctgcgctctcattttccaaatttttgttgttccaaaactaggacaacagatcttcctgttgtcccagtttttccccttgtttttctcctattttatgtccaattaatattgtgaagtcaggccgggtgcagtggctcatgcctgtaatcccatcactttgggaggccagggcaggtggatcacctgaggtcaggagtttgagagcagtctggccaacatggtgaaaccccgtgtctactaaaaaaatacaaaagttacccgggcgtaggccaggcgtggtggctcacgcctgtaatcccagcactttgggaggccgaggcgggtggatcacgaggtcaggagatcgagactatcctggctaacatggtgaaaccccgtctacactaaaaatacaaaaaattagccgggcgtggtggcgggcgcctgtagtcccagctactcaggaggctgaggcaggagaatggcgtcaacctgggaggcggagcttgcagtgagccgagatc

SEQ ID NO: 59716 - DNA, 3052 bp, Homo Sapiens
gcctcagcatgtacatcggtatctggttcatggtagattttcaatgaatctgagtgaatgaatgatggatgaatgattttgtatctccttactaggcatatgttccttgagggcatggaccgtgtctaatgggtggctacctagtgtctcattcttggtccgttgttagtggtgatttttgtcctcttctttgcactcatcattctaggcttgtattagggtaaattgttagcataattctgccttgtttcccaccctgcccccgcctttttttttcttttgaaacagagtcttgctctgtcacccaggctggagtgcagtggcacaatcttggctcactgcaacctctgcctcccgggttcaagcaattctcctgcctcagcctcccaagtagctgggattacaggcacccgccactacgcctgactaatttttgtatttttcatagagacagggtttcatcatgttggtcatgctggtctcgaacttctgacctcgtgatctgcctgcctcggcctcccaaagtgctgggattacaggcttgtttgcttttaaacagtttgtgggcagggatggtattttcttatgattctattcctcacagatcctggcccagagccattagcagagaaaattctcagtagatgtttgctgacctaaacttcattccaccacgtttgccttccttttgacttttcacctcctcttagaaggtaccttatatgataatgtcacctatgcaataaagaccacaaagtaaatttaataaaatagaaggcatgcttccctcttttctaaccccacacttttttttttttaagatcaaaataacgttgcatttgtgtgtgccctgcttttatttatttatttcttttgtagacacgaggtctcactatgttgcccaggctctctccaactactgagctcggtgatcctcccacctcggccttccaaagtgctaagattataggtgtgagacaccacacccagcccagccctgctttcacaaaaaacaaaataatgatgaatatattgtactaccctcactgttttcatcattattttgttttttgtgaaagcagggctgggtagtacaatataatgatgaaaacagtgagggtagtacaatatattcatttgtctgtgaatgcttcttattttatcaggaaaaggaaaaatttctgtttcttgactgtaattgttgaaatgtattttcaaagttttttactttatttttggactgataccataaaatcgtgtgaaatgatgtgaggattttctaatggagaaatgacttagaatatcccttggatgtcctatctgctttttaattgttttatcatcccagacatgtttctctattcctgtctattcttttatctgtaaaatgaggttattgaactagatgctgtctacaactttttttttttctttcattaacattaaatctctggtacctgagaacattgggatcaggctgatatgtctaggtgtctatttctttggtctacccttcaagtaggaatgaaaacccatagaatttctgtaattatcagcctcaataactttctaaagcctttaggaagcagataccctgcaatttatctcactaatttgtttgtgattaacactctctgccccttctcatatcccaagctcagtgttttgatatttaattacagggaattctttcctcttcatagatgatatagcaattgtatttcatttctcttatctgaaatctctgctgactttccatgtcttatgaatttaaatagtctaaatagggcatgagatcttaaatattccttccagtttctacatttgctattcagcaacaacattttccccggaaaagggtgaaagcctgtgagtcccccacagggcaggagcactgaatacacccacattttcctaccatctgacatagatgagacacaaagtagggactcagatgattatttaactgaatcaactggattccttaattctcacaatattatccttcctactttgtaaatagggaaatggaggcttagtcacacaaaatatcttgttcgaagttactaatcaattaagtaacttaataatttattgacatctgaggcatttctctctttctacagcctcagaccagaaatgatgggatttcagccttcttttcttagagattggtgagccaagacctggagagagaactctggttgtcttaagtcacccagatgaactattaatagaaaaagaattctactcagtcagtacttaaaagcttgacatgtttgtgtggagacctgtgtgtgactgagttcagatcactctaatttcctgggcctcacttgacccatctgtgaaatggggcaatgagctcttttcggcatgaaggcaaggaactgtccagaagacctctggagaattcttcttaccctgagatcaagggttctgtgagtagtacaactcacacccaaagtcttagttgcagggcactttagtgggaaaaaaaaaaaaaacgctgaggctatttttagagccttcatctggttatagactagttggtaggagagcaatacctttgaaaagttaagaaatagttttatacactgtgttaaggatgttgtcaaaactaatactcgtgtatgcaaagactttaacatttattaataattttttctatagattggtgaaattggtttgtaatttttgtcatttcacttttgtggaaattgagcaaaggtgagagataaaatgatgtgatcaggctgggtgcgttggctcatgcctgtaatcccagcattttgggaggccaaggtgggcgcctgaggtctggagttcaagaccagcctggtcaacatggtgaagccctgtttctactaggaatacaaaaattggctgggcatggtggcacatgcctgtaatcctagctacttgggaggctgaagcaggagagtcgcttgaacttgggaggtggaggttgcagtgagacgagattgcgccattgcactccaggctgggcgacagagtgagactccatctcagaaaaaaaaaaaaaaaaagg

SEQ ID NO: 59717 - DNA, 1741 bp, Homo Sapiens
gaattcccccacaataagctccctggggaagggaatgcagggttgctggggctgggcccagaagcagcagcaccagggaaaaggattcgaaaaccctctctcttgtatgagggctttgagagccccacaatggcttcggtgcctgctttgcaacttacccctgccaacccaccacccccggaggtgtccaatcccaaaaagccaggacgagttaccaaccagctgcaatacctccgccaggtagtgatgaaggctctgtggaaacatcagtccgcatggccattccggcagcctgtggatgctgtcaaactgggtctaccgattcccacctcgggttgggagaggaccacggtggccaaaattcttagcttcttcctttccctcatgcagcccatggatagccagccccagaggattatcacaaaattataaaacagcctatggacatgggtactattaagaggagacttgaaaacaattattattgggctgcttcagagtgtatgcaagattttaataccatgttcaccaactgttacatttacaacaagcccactgatgatattgtcctaatggcacaaacgctggaaaagatattcctacagaaggttgcatcaatgccacaagaagaacaagagctggtagtgaccatccctaagaacagccacaagaagggggccaagttggcagcgctccagggcagtgttaccagtgcccatcaggtgcctgccgtctcttctgtgtcacacacagccctgtatactcctccacctgagatacctaccactgtcctcaacattccccacccatcagtcatttctctccacttctcaagtccttgcactctgctggacccccgctccttgctgttactgcagctcctccagcccagccccttgccaagaaaaaaggcgtaagcggaaagcagatactaccacccctacacctacagccatcttggctcctggttctccagctagccctcctgggagtcttgagcctaaggcagcaccccttccccctatgcgtagagagagtggtcgccccatcaagcccccacgcaaagacttgcctgactctcagcaacaacaccagagctctaagaaaggaaagcttcagaacagttaaacaattgcaatggattttgaaggagttactctctaagaagcatgctgcctatgcttggcctttctataaaccagtggatgcttctgcacttggcctgcatgactaccatgacatcattaagccccccatggacctcagcactgtcaagcggaagatggagaaccgtgattaccgggatgcacaggagtttgctgctgatgtacggcttatgtctccaactgctataagtacatgccccagatcacgatgttgtggcaatggcacgaagctacagatgtatttagttccgttatgccaagatgccagatgaaccactagaaccagggcctttaccagtctctactgccatgccccctggcttggccaaatcgtcttcagagtcctccagtgaggaaagtagcagtgagagctcctctgaggaagaggaggaggaagatgaggaggacgaggaggaagaagagagtgaaagctcagactcagaggaagaaagggctcatcgcttagcagaactacaggaacagcttcgggcagtacatgaacaactggctgctctgtcccagggtccgatatccaagcccaagaggaaaagagaaaaaaaaaaaataaggaattc

SEQ ID NO: 59718 - DNA, 2744 bp, Homo Sapiens
ggcctttttttttttttttttgtctgagacagagtcttgctctaccacccagtctggagtgcagtggtgcaatctcggctcactgtagcctccgcctcccaggttcaaggattctcctgcctcagcctcccaagtagctgagattacagacgcccaccactaggtccagctaatttttgtatttttgtagaaaaggggcctcaccatgttggccaggctggtctcaaacgcctgacctcaagtaatccacctgcctcagcctcccagagtgctgtaattagagtcatgagccaccacacctggcctaaatgcactcctataagacaatgtggaaggtaggggccaaattccacacaaccagcttagaagacaaacttttacagcaaagagccatcatttggagaaggacatatgtataatggcaaagaggtattaatacgtgaagtacctgtgacattgaggatcgttacctagaattgacattcagtatttacttcacatagctctgtaactgggtctcttgtaaacaggcattttgtcctcccccttccaatactgtgaacccattattatgtcacctttcctcatgacagtcctataaactaggtaaagaacaaacgtctctattcacagacagaacaggggaaacaagataaaaaatacaactttccagtatttaacaaattctgtcaagtctagacaaaaggtatgatgtctaaatgaagctgttagtgggctatgttgaatctcaaaattatctttctccttttttttttaagagatgatctcattctgttgcccaggctggagtgcagtggctcaatcatagctcactgcagcctcgaactcctgggctcaagtgatcctcccgcctcagcttcccaaggagctgggatgtgccagcatacttggctttttttttttttttttttttgtagagatgaggtctcacaaagttgcccaggatcgtctcgagcttctggactcaattgatccttctgactcagcctcccaaagtgctaggattacaggcatgagccaccatgcctggcctcaaaattgtctttttaaatatgtctgtgcttttcatagtgtaactactatacaactgaaatgtcgattatggcacaattgatcataactgactcacatactttgtgttttgtttttcatggtgtctctcctagcccagaagcttcctaaaccacttttccagaggcttttttaggaacacacattaaaacatgcttcctgaagcagagccactcattcccgggtccccttcctcatccttcaaagagctctgactctcaactttgttttttgagctagcatggcatgcacacaaaatccaagcttatgactctacaatgagagtgctttgatttaaataatctttccttcctaatttaggccctcccaacgaaaacttaaacctttatgcttctttacagagaaaaacaagcataaggaaagcccctccatttcctacaagagacagatctccaggactgaattttaagccatggggaaattgcaaaggagacacctgagctcttttgagcacttgtgccaaaacacaacagatggaatggtttggcatttcagaatccagttccacagaataaagaagaatctccactctggcagtggggaggaggaaggaagtggaggtttgttggctttactttgccatccatccctttctctatgtggtagagaaggactgagaggagtgatcccacaggacacaggttcccccgtgtctgtcaccttcaagggggctcaggctcccagggggaaggcacaggggaatcacggagttcagttccaggctccaggactttccagaagggacccctgagcaggactcgctttcaccgtcaagtattgctttcttttttagacacaagattttgctctgttgccctggctggactgcagtgatgcaatcatagctcatcgcatctgcaaccaccagggcttaagcaatcctcccaccttagcctctggagtagtggggaccacaagcacataccaccacagccaggtaattttgttgttgtttttgtaaagacagggtctcactatgttgcctaggctggctttgcactcctggccgcaagcaatcctcctgtctcagcctcccaaagcactgaagttacaggtatatgaaccacatctggccagcaccaagtattttgacaaagcacctattagggtaattccaagtaatctctggcaaacatggtttcagttaggcaagactacaagaaaccgcccacatctattttgtaaaaatctgtgctcccctttcctacttgagtagacacgctcacaaacagacacaaaggcagacccctccctctagtttttctaacataccagagccccctgcaaacacctgaggccctcaatgctgattttcactggaatctcatcacagttgaacagggtagaagcagcttaacctctctccttgtgcctcgctggaaccagtggctcgtcttccacgggctgcccctgatccctgggctttgagggacaaagagcttgctggaaatagtgatcaccctcgtgatgacaccaggtcaacaggcagctgtgggctcattaagatgtaagccggccgggcgcggtggctcacgcctgtaatcccagcactttgggaggcctaggcgggcggatcacgaggtcaggagatcgagaccatcctgggcaactttgtgagacctcatctctac

SEQ ID NO: 59719 - DNA, 475 bp, Homo Sapiens
attagcaaggttttaatggaaagcataaaacactggaaatatggacagaaatcagattattacccttttatttttttccctgcccctttcacaatgagactggagggaattcaagaaccacttgaaataaaggcgaaatgattagatttttttctcctaattgcctaacgctgatgtcatggtgtacgcaaaatcaacattgatctctaagtgaaagaggagaaacagaacaacatcaacagcctttcgaggtaaactgtgggccagaatctatttaggcaacccgcagggaccaaaatctctgaaaagcccaacagtggagccagtttctgatgctcctctgctggtgatctgatctttgagtggggaaatctgttagaaacagcctcctcgagggagccctccccctggcactgcccctgggttcccaatcacatccacggagacgtgctgggttcatcacgctggccactga

SEQ ID NO: 59720 - DNA, 470 bp, Homo Sapiens
aagagaaataatagtaacgataatagctagtatctacttgagtgcacactctgtcaggaatcatgctaagtaggtctcattcaatcctcaccacagtctacggggttgggtatatggagagaaggggattctgattaagcccccgtgactctacaaaggggtctcctgcaatgggcacctgaaaaagcctcgactagtaaaggaagaagctgtttaaagacgaaacaaggaacccaaatttctcaggcagtgtgagcctacacacggaaagaagtctcaggcctgaagcacaggcacctttctattctcctgacagcccacccgagggacatcaagagccacagatgtcatgataggtgtgtgagtgctatagaaggaatgtttgtgtccctccaaaattcatgttaaagacctaacctccaaagtaatgttattttgaggtggggcctttgggagacgattaggtcata

SEQ ID NO: 59721 - DNA, 497 bp, Homo Sapiens
ttttttggaataaccaatgaaacgtgattcttctgtgtgagggatgccagctttggcccccttcatgcttcaggcctgaatgaccaattgccacgatgctaatcacagaatgtaattgacaggcccttacttttatgccttttgctgtcttttccagtccctgagcttctgtagatatggtgtgggcacatggagggcttaaggatggggttctgatttgacctgcctcctttctgcagccaggatttgcatcctgcccgtgtagtcagcatgtatacaaagaaagagcatgtgtgtacgtatgtgctcagagcaagggactttctgcatgtggagaaaacgccttttgccctaagaagtctacctcaaaccaaagggatgaagtgatgtatctgtgttgcaacactgggcttgggggaaagtgaagctgtgcttgctttgaaagagctgtgctaagtatctgcagaatagctgctccaaaaatggaatctttattc

SEQ ID NO: 59722 - DNA, 4088 bp, Homo Sapiens
tttttggtattctgtttggatgcccaatttggataactggggaccaatagcagcattgtctctttgttaacagaggaattggctgtgtgtgaattatgcatggaattttagcggtggtataattaatgtaaaacgtgtgttcttgtctagaaaatgttactcttggttgtttgctgaatttgaaagttgtgtgaaccaaagattccgaaaagttgcctttgtgccagtaaattgtaaaccaaatattaaaaacctgaatgttcaaaattggcctagtttaaagagaacataaactattttctgtcgtgcaatagaatggcttagaataatcaaaaggatgagcttaacttacggaagggatggatttaggaggaatatggtaaggactcgattgagtacagagggaagcagatctaaagttggtgtgatttcttggagaccctgaatttaggtctgcttattaaatgtcagcagctctagtgcaatgctggtaacgcgtaggagaaggagatattaaggagcccagcttttaacaaggaaggcgaggcgaggcacttctgtcagcttccccttagaagggttcattttaaaagactaactttgtgacataagtcatatttttagtttgtttataactgtcattggtatttactatttttttcttttctttttccccttccttgctcttctgactggtctctggcttcctccaaagggatgtgcgtaagtatcgtctagttacttattggtatttgagccttctaacttgtaggactggtttcactcgactcgtttccttttgactctatagtgttgttgaattcaagatggaagagagcatgaaaaaagctgcggaagtcctaaacaagcatagtctgagcggaagaccactgaaagtcaaagaagtaagctcttgcttaacactgcggatactgtgtgtaattgttgagtgatcctactttggaattagggaaagacggtcatggtcccagacggcatttacaaagcaagtgccagcctgttgtttctaatgaagagtgtcggtcatagcctacagcagccattccctgcaaggactttggggtggtggccaagcagatcctgagtggctgctgaccaccttctaatatctgtgatttgtctgaggccctgttgtctcagggactctcaaaccatgagcccgtgggtttgtgccattaagttttactccatctgacccttcttcttggcccatctttttttctttttttaaaaagtgagtttgttccagcctgggcaacatggtgaaaccccctctctacaaaaggtacaaaaattagccaggcatggtggcgcatgcctgtagtcctagctacttgggaggctgaggcaggaggatcatttgagcccaggatgtggaggttgcagtgagctgagattgcaccattgcactccagcccgggcaacagtgagaccctgtctaaaaaataaaaaataaagtgagtttgttattcctcaaacctgctttcacatctcatctgaatcaaatatattccttgaggaagaaggtttttttgttgattaaatccctcttggctgggcgcagtggctcacgcctgtaatccccggcactttgggaggctgaggtgggtggatcaaggtcatgagttcaagaccagcttgaccaacatggtgaaaccctgtctactaaaaatacaaaaaattagctgggcgtagtggggggtgcctgtaatccatctactcgggaggctgaggcaggagaatcgctggaacccaggaggcggaggttgcagtgagccgagatcgcgccattgaactccagcctgggcagtaagagcaaagctctgtctcaaaaaaacatccctcttaacttcttttcacctcttctcttggggaggaagatgagtagattcagagtgaagcttggtagggtctaaggtctctcatgtgttatgatgtcttttttagtgctgatggtggtaattgacaggacagagagttgaagaagagagtcagtacagagcttcacagaccttcccagatgttgttttactgcgcagccctcacacacacgcctccaacacctgaaggacttgaaggatgggggcgcttgtgtggtctagaactgtttctcaaacttctggaagccattgacggggtttgcagaagttacaaaaccccattgatgaattagtaagattcagctataccaagcccatgatgctctaatttcagtctggcggttctacattatatcagctaatcatgtttccctccctaccctgcttttcttttttacttagtgcaattgagagctgtgtttttagtgctacacttcatgccttttcttcctttcctatttctttagctggactcttctaagctggtagttgagttcatttgactttcttgttaatagatttgagagatgctttccaaacaacctttcagtttctaagtcttgagaatatcatttactgtgcgagcatggtttgcgttgtactgggtcagttaaacgtaacaccttttgtgcttgttttaggatcctgatggtgaacatgccaggagagcaatgcaaaaggtgatggctacgactggtgggatgggtatgggaccaggtggcccaggaatgattactatcccacccagtatcctaaataatcccaacatcccaaatgagattatccatgcattacaggctggaagacttggaagcacagtatttgtagcaaatgtaagtaaacagaaccatcgtctaaagtagaaaatcagaactttatgaaatgaccttgtcaatatgttataaaagtaattctcacatttgagaagaaaaatgtaaagaagggttttgttcttgatttctttaaaaatcagccttataggcgggctttgtctgcattcctaagtcacaggcttgaccgtggtctcgttggggctgtgattcctgagtttcgcaggtgtttccacaagcagtaaccgagtctgcattctccgttggtttattttatgcagttttggtgcagagtaagactgtacgagcagaagtgcactgacaccttcctcttgttgtgtctggggtgaatgataatacctccaccatctgcaaggggaaatatttagaataaagtaggttgggtggggtggggagtggtaaagcttatcagggaaacaattttttaaaaatgttcagaaaatgagtattaatttgaagtatgaggtgacttaagtttctgagaaaagagacaatatatttactataggtacagtttatttacagtgaaggccaggctttataatcctattttaaaatttccattgcagttgattagtttttgtgacattatttcctaatacttttttccaaccaaagcatgtatcattcatgtagtaaaaatgttgtgtttcttaagatgtttacattgaggtttttaccccgttctctctcgattagctggattataaagttggctggaagaaactgaaggaagtatttagtatggctggtgtggtggtccgagcagacattcttgaagataaagatggaaaaagtcgtggaataggcactgttacttttgaacagtccattgaagctgtgcaagctatatgtatccttctgcaggaattcaacttatgaacagtttgacctaaattgctgtgttagtaatgtaggtttgtgtgaggaagaggtgactgtgtgtattcatgttttttatgtgactagggggagtgcattactgtggaattaagaggttctctgggccggaccggtcacggtggctcacgcctgtaatcccagcacttcgggaggccaaggcgggcggatcacttgaggtcagttcgagaccagcctggccaacatggtgaaaccccggctctactaaaaaatgcaaaaattagctgggcgcagtggtgggtgcctgtaatcccagctactcgggaggctgaggcacaagaatcgcttgaacccgggaggtggaggttgcagtgagccgagattgcgccactgcacaccaccagcctgggtgatagagtgagactcagtctcaaaaaaaaaaaaaaaaaaaaaaaaaaaaaaaaaaaaaaaaaaa

SEQ ID NO: 59723 - DNA, 539 bp, Homo Sapiens
  misc_feature (527)..(527): n is a, c, g, or t
gaaacaaaatttgttctgtttattggcatctccctaggagtaaaaagtgatttttaaatgtctgaagcactgcccatgtatcccagctcacagacattgcatttacaaaaataatctctcaattgtataaatatgcagcactttaaaagtaattatttatcatcactttcagaaacatcattatttttcttcttggaccttggaacttcacatttttcatatttgttagatgctttacagctccatgcgaggcccccttgtttagacagtcaagttcttcattgggttctgtatgtaagttcccacccacggccacattgattcagcctctttttgaggattgaggagatgaccacaatcccagacccatagatccaaggccaagaaaaggaggtgcatttatgccatccgcgggtcactctactgattgcagccatttaaatgtctgcattgagagctcaagaaatgaaggcatccacgatccatgaggacacatgagtttcaaattaaagattatgaaaacacanacctacaaagtg

SEQ ID NO: 59724 - DNA, 507 bp, Homo Sapiens
  misc_feature (428)..(428): n is a, c, g, or t
  misc_feature (433)..(433): n is a, c, g, or t
ttttttttttactatttttgtctattgatggatctccagtgtctagaacagccctttcccagagcaggtgcttaataaatctctgttgaattaataaatttttttagaattaaagtcaacagtcctgtgaacacccaagttgagtctcttaagtaggcccaaggcccacgagtaatcactggtcctctggctcttgcacagaagttcgagtggggtaaggggtaattcaggccccaaaagctatttttagagcaaaaacttcagaatgattttccacaaagaaccagagaatttagttcacttcattgggcatagcactggctgagctcagtgagtaaacaccccagattttaattgatatttccatttgttaactgttaaatgtgaaaccatgtcattctaacattgtttcttaaaccatttcagtncaagngtttaatggacctttcgaaaatatttaatattttactgtcacaacaattggattgtcccatgtttttcttatta

SEQ ID NO: 59725 - DNA, 536 bp, Homo Sapiens
ttgtggtttgaaaacatgtattattagaggcacatgtttaaaaacaagtacagtatgaaatcttccttttcagtgagccagtgaattttcattcgtttgtttgtttctatgaatatttggtttacttccttcttctgggcaagattagtatgcaattctcattagcaagtcaaaaacctacagacctaaactatatgaaaacttaagttggtattgttagatgaagacaggtaagctaacaccaaaagaacaactgtactaaattttaacactattctttaatagttccattttcctgagtttgtgtttgttctttggcattggtttaggattatatcccattttttcagaaggcgttgcttgctggggccaatttgggcaccatgctaaatctggaaagagcataaagcttcaagagggcgaagcaaagtctcttgtatgtaattatttttctccaagatggaaagagcaacaggtgcacactccagtgtagaaagacatctattaattggctgtatccgaattacatactgact

SEQ ID NO: 59726 - DNA, 468 bp, Homo Sapiens
taagttttaggaaatttatttcacatttaaaaaagtattattatgttctatacatcatttcataagatgaagtcacacacaccaatcataagtactaaagaaaggagattgttttcaattttgagataaaatatcattttacatttaaagttacatcaaaataatatttaaaaatcttatcaagcacacatagattttattttctgtgttccttgctccattaaataaatactcacaagatcagcatatttcttacagagagctgccagcttctcctctggagtcgaaagagtgtttagggcttgcatcaataataaaacttcttttcctaatgattaataagattttaaaaagtaccagaagaaggctgaaatcaatccaatctgtaaattttatgtaaacttctatgttaagacattcagagtaaaatgatatagctctaattaaaaacagatttacctattaaat

SEQ ID NO: 59727 - DNA, 514 bp, Homo Sapiens
tttttttccttttttaagtggctataaaggatatgacaagttatacttcaaacaaaaggataagcaaaaccaatgattcaataataagagcctttttacatcatttcagtacaaattgtatgttctaattatttaaattaaaaaggaagaatgcttttcttatcattgaacctcccttccccttccttcaaaataacaaacaattaaattattactacaattaaacaattaaaatgacaaccagtagtcagggaaattaatgaacatgaagtaactgaactgccatggaaagtaactgccaaaaatacgcactcttcaaaaatcacctctggaggacatgagttactggaacagtaagtaacatctttggaatcctcttttaaaactgcttcttaatctacttttggaatccttcttttagaagtgccaacataatttaatagggaagaataatcttttcaacaaatggtgcttggacaactgaatatctacatacagaaaaatgaagttggac

SEQ ID NO: 59728 - DNA, 492 bp, Homo Sapiens
tttttttttttttttttcccattttctccccagaaagaagggaaaaaccaccacagtggtgaccattaaagagaagcctcaatgcactgcagagctggatgggaatgctgagagctcatgaatacatgtatcaatgggctgataaaaacttggaataatcacccaaaatgtgtttattaagcaatttatggctcagggtgctcattagacatcgtacaaagggattttattgtgttacagattgaagagtacaagatagcaccaaaagtaattcagtacatctgtgggttattcatatacaactgaggttaattagataacttccacataccctgcatttcaccaatcaacacaaagtcaggaggaaaaaaaactcacataactcaagatactgtcatgtaaagaatgcttcctgttagcaaatctgatctgacttagcagcaaggaatctttataaatatattcttctaactatgtgggtcttccatattt

SEQ ID NO: 59729 - DNA, 534 bp, Homo Sapiens
  misc_feature (53)..(53): n is a, c, g, or t
  misc_feature (90)..(90): n is a, c, g, or t
  misc_feature (431)..(431): n is a, c, g, or t
  misc_feature (467)..(467): n is a, c, g, or t
  misc_feature (492)..(492): n is a, c, g, or t
  misc_feature (499)..(499): n is a, c, g, or t
tgcctcagtggcttgctttgctgtgcagaatgcagtctcagtggaaataagantgctcaaaaatgattaacccttggtaatctgcatttnctgaagtttgacctgggtccgcagcccaatgtactcattctttgtacacctgtttctcataaattatcagctggctgggtgggcagggggcgccatggtttaaagctgcaactgactgagcaactctaatgtaagtgtttgccaaaacccagggtaaggatttccagtcttccaggaatgaaattatctttgaagtgataacgatgcgacatttactgcacatctgcacaccacagctggtgtcagggaggcgccacccccagggagagggagttggtctcagcctccctgatgagaatatctccctaaagtgagggccagattgcaaggagggaaaaccntgaccaagaaaggttttttgccagtttagagagagntgcctttgcaagtttcgttgcaggnttgagcntgtttgccgagagttgttgttgccttctaagtttt

SEQ ID NO: 59730 - DNA, 476 bp, Homo Sapiens
tttttattatgttcataaatttattgcaagctaattgcctgggaagctggatattccttaacatgaaggtaataaactttaacgttccactcaaaaagacaaaaaccaaacaacgaaaaataagaaattaaccagaaagctatagcttgttttcttactcagaaaaaaagtataactgataaggtacaatttctgtaactggatatttttcaaaattataaggcttttagttctaaaaagtataaaagaactgtgatgcacttctagtcaacctaatcttgctagaagctttatcaacactgacagtctcaatactttctcttttgctattatatagtcaactttaaaggtaattccttaaagtaaatttgtgtgttcctaaaaatatggactaaagttgaatgggcaaaggtatacatcgcattttctgggggagtaggggagaagtcattcccaaaaagtgaaatatttaaaca

SEQ ID NO: 59731 - DNA, 923 bp, Homo Sapiens
  misc_feature (101)..(101): n is a, c, g, or t
ctcaaaatgctaaatgatgagggaaagtgtagcaagtatgattcaattctattaaaagacagaaaaatcaaggtaggcacttgctcaaaactacgtgagtngtcagagaggagacacaaattagctttgggaactcccgagamctccaatgysctccagtcaaaatcttttttaaaaggttcctttgtaaacattacccttcccccgatctcygtmaccaagghhgccacctgtmacatggatttvcmgcctgcagtattgtacttcccctgcttggkgccatctgtgctaggkcatgatgatttttctatgaaagcdgctgttctcaccatcacaaccagccttgaacttggtggcacaacctggatcctaaatagtggctctggagcaactgggaatagggccccggggaccatccacccaggtggcagcgctgggctgcaccaagggggagtcaggccagaaaaaaagctttgccctgctccctgctgctttttgccagcccagccagaagccctgcagaaaacctgtgctgaccggcccgacatgtggcaggtacaagaagatgccctatttatgaggggacaggtttacaatttacaaaagacaggcgaaaatataaagacataacttaagtcctgccagtggggagttagaatgttcctggccaggacataaagaaatattcctctccacaagctcgaataaaggaacacacagcagaaatagttgggggatgacgtcagaagttctgggctagtgtcctgcacttctccttgaaagtaaaaacagtgggtctagaagaatctacgtggcattgcccttatttgagtagttctactgctccttgcaaaacaagtaggatagctgaagaaacttcctcttatttaaagattataagaatgttcccctgccttttttaa

SEQ ID NO: 59732 - DNA, 504 bp, Homo Sapiens
tactattcctaaactgttttatcgctttctctcctctcttgacaaccgattaatctaaattctgaattttaaaaaaatgttcattacaaaaaaggtccccacaaaacagaaaaagatcaccagctaccttaaaatggtcttaggctactggatgttgcctgaaaccatctccagacttgagtatgtatttatgtaacaaaatacaaaccaaatggcaaagacaaattacttcaaactttgcacagatactgaagaataaatctttccagaaagactcaacatttttgaaaactcatatgtaataaccataatctaccatttgaacatttataaataaatttcattttcactgcttaaaaggtttgaatatgtttttggaatagtctataagtttaccagttaaattaagtcttcccttgccagaagaccaatgccataactctcaacaaaagtgtatggactggccaagcacggtggctcaagcctgtaatcccagcactttgg

SEQ ID NO: 59733 - DNA, 515 bp, Homo Sapiens
ttttttaaggaaaaaagttaccttttaagttcagcttccttaactactggcaacagagagaaactcataatttgttttgatcagcccagttacagctgccctgcctacccatggaccattgacttcccagcacactcttaagaataatatacagagaggcaccattttgctctgggtcttatggaatcctagagctcttgaatacgttttggtggtcctacggagagctgtaactagcagtggagttgttgcttattccagctgtgtgcttttcactttccgatctttggacccagagaatcatttgccatggaatcatctggctagtaagacacttttatatggatgcaatacaaaaagtggtaaattaaagcaaagcaatcatgtggtccttactctaaaagagacaatatgtaaatgtactattataataaggtagctctgcagatgtaataagctactcataaattatttgggtttaagaaaacttaagactatgttaaactggacaacat

SEQ ID NO: 59734 - DNA, 501 bp, Homo Sapiens
  misc_feature (498)..(498): n is a, c, g, or t
tttttttgtatttttgggggagatgttgccccggctggtctcaagctcctgagctcaagcgatccacccacctcagcatcacagagtgcagggattacaggcatgagccaccaagttctgatcaacggtactaaccgcagtttcaggcatccactcggggtcttggcacacattccccacggataggggaggatggctgtatcactccttaagagcaacaggcagccagggaccccagctcaacacccaccgacacatgatgtctactgtgttctgaacatgcataagcatataatttgaactgcattgttagccttcaggaaaggggcaccaggagctgtgctggccaggtacctagatcatttactgttcaaaaccaacccaggagctgagctactgagctcagcctccctctctcaaggctgggaaaggaaagttcatcttcactcagatgcaagcttcaagtaggcagagcagctgtctcttattcacccctgngcg

SEQ ID NO: 59735 - DNA, 541 bp, Homo Sapiens
  misc_feature (26)..(26): n is a, c, g, or t
  misc_feature (533)..(533): n is a, c, g, or t
tttttttttttagagtagaatacagnttttattatattgaagtatttgcagcaaatctatacattgaaaacatgtatgtacacacatttatatactatatataatatatacgatatttgcaatacaggcaaatacatagcatctgtgtgacagggaatcagctgacaaaggatggcctgaggtactagaaagtggctggtcttgctcgaatgtttgcaggatgagcgttaatgagcagaatcgaatgacatgatgatgagcataaaagctattggatagtaagagttacacaatagcctctttaatgtgtcgcatctcatttaacctttgcaaaaatcagtttttatttccaggataggagatgcacctaaatgttttctgaatcacagtgacttagaggaaggattgaagtgttgtctcaaaattggcttttctgacctccgcttcttctcggttggcatcgtgcagatatttactagagagctgtgtaatttgccatgattggcagggaagccactcactgaagggaattnccctttat

SEQ ID NO: 59736 - DNA, 1327 bp, Homo Sapiens
ggcgggaagatggcggcggcgggaaccctggaacggagcttcgtggagctaagcggagctgagcgcgaaaggccgaggcactttcgggaattcacagtctgcagcattgggactgcaaatgccgtggctggcgccgtaaaatacagtgaaagcgcgggaggcttttactacgtggagagtggcaagttgttctccgtaaccagaaacaggttcattcattggaagacctctggagatacattggagctgatggaggagtcactggacataaatctgttgaataatgccattcgcctaaaattccaaaattgcagtgttttacctggaggggtttatgtctctgagactcagaatcgtgtgataatcttgatgttaaccaatcaaacagtgcacaggttacttttaccacacccctcccggatgtataggagtgtaagttggctaagtgcaatatcttttatttcccaaattactctgggtgtcacaaatgtagtgctggagcgatgtcttttggaattgaaggaaatttggattctcgttatccctcaccaagcatactttgatagctaccgcttaaaatgatcaggcatacattttaagttgagaattagttttcattaagaagaatagctttcttaaacttgacagttttttactttaaaaacttttttagcaatagagaggaactgagcaaaattctggttattttgatttaatagatttttctttttaattactcaacaggagttggtagttgacagtcagatgcagtcaatattcactgacattggaaaagttgatttcacagatccttgcaactatcagttaattccagcagtacctggaatatctcctaattccaccgcctctacagcctggctcagcagtgatggggaggccctgtttgccttaccatgtgcttctgggggaatctttgttcttaagctacctccttatgacatacctggtaagaatgggaactgagcatggatttaactttaaacaaggaatgttaacattgaaacagttcaacctcgtcatccaatgcagggattgcatctctactgccccggaactggtcattcattattgcttgcctaatgagtccctaatgctttacttttatacagtggataaggaactataaagcatattggagcacggaaaaacaaatagacaagtataagacagcctattctaaatcttgcagtagagatgggttgcctaattgtctgccctgagatggaggcattataacattataattaaattaattgaaacaaagacattaaataccctgcaccaagttaaaaaaaaaaaaaaaaaa

SEQ ID NO: 59737 - DNA, 589 bp, Homo Sapiens
  misc_feature (435)..(435): n is a, c, g, or t
  misc_feature (461)..(461): n is a, c, g, or t
  misc_feature (499)..(499): n is a, c, g, or t
  misc_feature (540)..(541): n is a, c, g, or t
  misc_feature (549)..(549): n is a, c, g, or t
  misc_feature (559)..(559): n is a, c, g, or t
  misc_feature (581)..(581): n is a, c, g, or t
gagactaagtcttgctctgtcacccaggctggagtgcagtgacacgatcacagctcacttcagccacctcatcagactaattttttttctttttttgaagagatggggtctagctatgttgttcagactgttcttgaatttctggcctcaagcaatcctcccacgttggcctcccaaagtgttgggactacaggcatgagccactgtacctggcccaaaggctttcttgaccctccagttcacaaggatctctccattctgtacattcacagcacttacaggataggcctacattcaactggcacttcatcctatatgccttgtggcagctcttagagtattattttactgcacttttatataactcatgaattgttatatgaaatttctatggatgataagtccagcaaaaaggaatatttaatttttaattgngatctgattcatatatcatatctctncaattacaggctcctgggaagtggtaacaggggctttnagcttcctgggattttccaatggacttacaccccagtgctnnggcccccnggaaaatggncaggaagcatttgccggggaantggaatga

SEQ ID NO: 59738 - DNA, 592 bp, Homo Sapiens
tttttttttttttttttaagccttccattgattgaatggaaggtattgttctagatacttgttgaggcacttcccatttaagatttacttactttccccaatatatccacagggttggattagtaacttggatttggagcatgtctggtgataaaaatgcagaatgtatatgctctcacttttcatctacgtacacatatgtaaacacacgtgtacactgtggtaaatttccaaactgcccaaaaatcttcactcctccccgtttccacatcctgtgcatacgactttgtagatcctcctatcaaggactgaagtttatttcccaccctttgaatctggcctagactgtggcttagcttgcactggccaaaagaatatagcagaagtaatggtacacagattcatagtccttcgttcaagagggcttgaacacttctgctttctctctaagaacctcagactctggggtgtgaacaagcccaagttaccctgttggagatgagagatcacactgaccacaggccataaacctgtgagagaacccagccaagatcagacaagctattctgcagctgaccacagatgcatgagg

SEQ ID NO: 59739 - DNA, 567 bp, Homo Sapiens
  misc_feature (528)..(528): n is a, c, g, or t
  misc_feature (559)..(559): n is a, c, g, or t
ggtaaacccactccatcgtcatacatttctctgcaaatcttgtacacggatgcctcatccttaggaaaataaggtctgatagtataaactttggaggtaggagtcagtggaggtggctgaaaaaaagagatcatttgccccatcaattggcagcaaacgctgtgggaagaaaaaaaaggagatggattagtttggggaaggtatccatttttttaaatgggtgtgcactgcagattaccaacttatattaactggctactgcaggcagacctaaagaagaggggtgtactatgctttactaatagaaatacctctttgctgggggaggggagtgcttctgaatagaaattacccactctgagttacagctttagtggcatattaatggggatttaaatttacagtaaaaacaaaaacaaaaacaaaaacaaacctattccaattatgacaaatctatttttttttaaaacctatcttagatagaccatcttcctacgataagatggcagaacagaatgtcaggaaganaaggttggtctgaaaaagggtatctggccangaaacctt

SEQ ID NO: 59740 - DNA, 483 bp, Homo Sapiens
  misc_feature (482)..(482): n is a, c, g, or t
aacagaaaatggctaatgggcataccccatatacttaaactatcatcaacaaattataatgagtgcttacaccttttaaataatacacattattcctaagggcaaagcaaaggttgtttttaatgctttctcatctcatcacttcaaaggttgtttttaatactttctcatctcaccagtctgcaccttcctatctattgtctccttacaacctcatgctatgcttacattacataaaggagcctctatcaggcctgtcccagtcctaccatgtcccataatgccccatgttccaaaattaatccattctctcccatcatttcaagtcaagtttcccattctctcagtgggacaaaactcagctagatgttgaagggcaagaaagctctctccaaaaatctaaggacagtaccaacatatggaataactaatacgtctaatattcccaaaggttatctgcaaataaatactagtaacaaacnt

SEQ ID NO: 59741 - DNA, 431 bp, Homo Sapiens
tttttttttttttgggttctatcctgactcatgttttatggggggctgggtgggagggttctgtgctggctgaggagctctgctctgctctgctccttgggagacggcctagtggctgccggtccttggatgctggggcttggctggaggcacagcccccactttccaggggtcccctgcacctgccagcttcctcagcctcaggatttcgtgcttgtacctgcccaggtgctggtccacgtactcctgtagctcagaaagttgctcttcagccatcgtggcccggaccagcagctgtgcccgctcccgttccagctctgcctgggtgctgcgggagaagtcccggagcttctggtggatctgggcccaggatgcagcgtccaggccctgtggctctgatgttcccccctgggaggctccaccgggtctct

SEQ ID NO: 59742 - DNA, 534 bp, Homo Sapiens
aattgtggtttttgctacataaaaaactaatggaaatgatctgcctgttcctgtagtttacagattatatgcttcagaactgacgatatatatttaggctgcttttctgtgtggcacatttaaatgaaaatgaactcggggtgagccaccatggttgctaggcaatagagcgggttgatagagcacggtattaaactgaacccacattggtgttttacttaacatctatttgcttagcacctttgtcatctgtggtgtcatagaagggaaaggaggaggagacaggcagagtctggttatctgcagagactcaaacaagtaggagaaataatcatcccaaacaccaaagtgacatgagcattttcaaaaatttgaggttgcagcacagtcaactcatttaatgaagaacatgcaagacctgaagaaatgcataagcatagcagacatattcatggatgtggtagcaagaggaactaaagagattccccaggctgggttttgctctggtggttccagaaaaaaaaaaaaaaaaag

SEQ ID NO: 59743 - DNA, 496 bp, Homo Sapiens
  misc_feature (442)..(442): n is a, c, g, or t
  misc_feature (489)..(489): n is a, c, g, or t
tttaagatttttaaagtatatacctgcaatttaggagaaaaataagaatataaacctctttttagcatgcgtatttttttttaactaattgtaattttattgcttttcttcccctcaatttatttttacttcaataggtttttgggaaacaagtggtgtttggttacacaggtaagttcttcagtggtgattgctgagattttggtgcacccatcacccgagcagtgtacacggcacccaatgtgtagtcttttatccctcaaccccctctcacccctcccatccccaaagtccactgtatcattcttatgcctttgcttagctcccgcttataagtgagaacatacaaggtctggttttccatttcctgggttaccttcactttttagagtaatggtcttccaacctccatccagcgttgccttgtgaatgcccattattntcgttcctttttatatatattccatggtacatacatatataccacanaaaactg

SEQ ID NO: 59744 - DNA, 467 bp, Homo Sapiens
  misc_feature (1)..(2): n is a, c, g, or t
  misc_feature (301)..(301): n is a, c, g, or t
  misc_feature (308)..(308): n is a, c, g, or t
  misc_feature (466)..(466): n is a, c, g, or t
nnggaagtcatttcaaagctgatttattaaaagaatatcatgctttttccacttggggctggggccagcatttagcaaaattcagaaaggagacatttttttctttgctattcctcctcttgttcctttttaatgctctgttctggagtggtctcctctgtccctaacttatggttctacagccttggtacttaggagaatagatcccacctcactccttctatcctacttccaagtgcccttaaaatgtactcatccatctcccagcacttaggggaatctgaaaaaataatccatgctnccagggngaaggctacagggcttttgtgtccttttaccttcttaggccgaggcctccccagtaaaataattaataatggcctccaggcaggacagggatctaaattattcaggttaaatggttcagtcttaaaatggagggggctgatggccttcacaaacaggnt

SEQ ID NO: 59745 - DNA, 4930 bp, Homo Sapiens
aaataaaagtaaaaagatttcaaaataattcagacataaaaggagtgacattctgatacatggatggagctggagaatattatgcttagtgaaataagccagatacaaccttttgtacaaaaatacaaaattgtatgatctcatttatatgaggtagttagaagaggcaactctatggagacagaaagtagaatagaggttaccagggctgtgaggggagaggtgaatggggagtttaatgaatacagagtttctgtttggaatggtgaaaaaattctggagatggataatagtgatggttgaacaatattttgaatatatttaatgccacagaattgtacacttaaaaatggttaaaatggtaaattttacacgatatgtatctgtatctatatatatctctctctatatctatatatcttaccagaatacaaaatttaataacacactccgaaaacctttacagatgaggaaactgaagaaaactgtctacaggggaggagttaagaatttgcccaggattattcagctgggaatttgcattcgggatccaaacttagttctgtttcactacatattatctactccatattatctgttctgtgttatctgctggctttctgggtgattaaagatatgtcagctccgagaagaatgagtttatttgaatcattcagaaagttacatttaaaagtaggtaattgtagtttgatggaaggtacagtgtgaaaccctagacagactaaaggttaactttgaggatttctttctcagccagagtggtaatagtatgcatttgagaggggaggagagtagagttctaaggatgtggtctttggagacagtttcttgggttccagtccctgagctaccaatttgtgtctggggtgttatcctcttgatgtcttagcatccctatctgtaaattggtgaggataatgataacatctgataaggtggttgtgaggattaaaggaattgatacatgtgaaatccttagaactgtacctggcaaaaagtgtttgataaatgattttcagttattgtgccgatattattttagagttgatgtactttctcattaatggaaccaaacacttctcaagttaaaattacgtgcttaggactggtaagttacaaaaatggtaccacacgttttatctatttcaatttagaaatgtctgttgattaaatgtgttcgctttaaactactgaaacaatgtagacatttataaaatgaaagcgtattgatccctgttatctcattcgctacctttaacggtttggtgtatattcttccccaaattttcaaatatattcatatatgaatatgtatttttacatacattttataaaaatgggaccaagttatttggttctaacatggcttttttttaaggtcaatacaaagatctgttttattaaaaaataattgatattcctttagggctcactatatgcttggtactcttctaagtcattattttatatagatactataatatcgagagatggagagattaagtaacaactagttagtggtaaaggaaggattttaatttgggtacgttagcttcaaagtcctgatctcccagccagggatcatttttggtaaggcctgtgagctggaaacgttaacacttttaaaagagttgtaaaacaataccaccccacttccctgaagaacatataagggagactagataccgcctgccaagcctaaaatacttaccatgtggccctttacagagaaagtttgctgccccttgctctaagccatccagctgtacctctttggtgtaaggggggtgcatagtattccagtttatgaatgtgcattacgcagcaaaccaatctgttgtgattgacattgttttctctcctgaaaagaagtgaacatccttatgtatctttgaacatttgtgtgacaattttctatagagttggctctttcaagattttgaacatttctagttttaataggtgttgtcaagttatattaatttttagttaaaacaacaactgtattgaagtataatttacatacaataaaaagcacacatttgaagggtatgatttgaggagttttgacaaatgtatgcacctgcaccgctgcctggatcaagatctataatggttgccatcatctcagagtcctttcatcctcttttacagtcattctctcaactttttttttttttccctccaagatggagtcttgctctgtcacccaggctggagtgcaatggcatgatctcggctcaccgcaacctctgcctcctgggttcaagcaattctcctgcctcagtctcccgagtagctgggattacaggcgtctgccaccacacccagctaatttttgtagttttaggcgagatctcagctcactgcaaccttgacctcctgggctcaatcaaacctctcacctcagcctcccaagtagctaggaccacaggcatgtaccaccatgcccagctaacatttattattaatatttttttgtagagatggggttttcctgtgtcgcccaggatggtttccaactcctgggctcaaatgattctgccttggcctcccaaagtgttgggattacaggcatgagccgcggcacctgacttgtagtaaactctctgaattaatattccattgtaggcatgtgctacagtttttaaattcatttacccatggatggacacataggactgttgtcagctgttgataaagctgctatcaccatttgtatgtctttcctggacatgttttagtggtaaatattgattttactttgtaagaaaccgttaaactcttttccaaaatagttgtaccattttaaattgaaagttacagttgtaactgtgcaggagttacagtttcttcacattttcattgacacttcgtgttgccagtcttttaaattttggccatcaaatgagtattaagtatctcattgtgggtttgtgtttctcagatgatcaatgatgttggaacatcttttcatatgcttattggccatttgtgtactttttttggttcaagccttttgtccctttaaaaaattggattgtttgtctggttgagtggtaagaggtctttatatgttctgggtacatagtcacattatctgtcagattgtgttgccaatattttattgttcatttttgtttgattttgtgtatttttaatactataaagatcaagttaaaactttaatatgggaagcataatcagataaattatgtgaaacaaattgtccttaattcacgagtcatttaattagtgtaacaaaatgttatgcatttgcagaaacttgtaaactaaaaggatattattcatatgctgttaggtgtatggatgataacttttattaattaaactagttttgaaaattattgtatttagtaattctcttcattttgcataattcaaaccttttcatttattagtgagttaagccttaaattttttcttcaaaggataaatgagaatattaaaagtaaaaagtgaccttgatcttagaatggggtatgtagaaatgatgattgccaaacttagtttccctactttgacaatcaagtaaaattttttttttttttttttgagacggagtcttgctctgtcccccaggctggagtgcggtggcgcgatctcggctcactgcaagctctgcctcctgggttcacgctgttctcctgcctaagcctcccgtaaatttttttattatagaaatggatggcttttcagattatatatacttggtttctatacactattttatttttgtaaagtagcagttcttttgctcaacacctgaaatgcccccacaataaatttttagtttttcttcaatattcaagtaatacataacttttccttttcctgtttaacaaagaaaaaaaatatataaagcaagctgttggacctccattgggtgttgtttaccaccactgtaggtgatcgtggcattgtccacctcagtcttctcatggctgtggattcaagttatgaaattcctgaaggtagcattccaggtagtctgtagaacagcccaaactctctgaattagtattatctctgataggtgttttttttattctttgcttttttatttgagacggggttttgctctgtcacccagcctggatttcagtggcacaatcttggcttactgcaacctccacctcctgggctgaaacaatcctcccacatcagtctcctgagtagctgggaccacaggcacatgccaccatgcccagctaattttttatatttttgttagagacagagtttcactatgttgcccaggttggtctcaagattcccgagctcaagcgatgttcccatcttggcctcccaaagtgctgggattacaggcatgagccgctgtgcctggccctggtagttttcttcttatatctttctcctgttgatctcacttgattttcttactagtctacaggaaatttcacgtggagattctgtgcctgtcctctttctggaatatcttccttattttagcatctcaacatgctgttcagcttctggcttgaaaccacccctctcccatcccaaccaagttaagcagcttctttcctgcttagaagtaccataacttgtgtattaatcttttgtctttttctctctccttcccttcattttaagctcctttttattaatctgtagggcagagcttagaaaaaggtttttgtatattgtaagtactaataaaatatttgtgaagttgatttgggacttgggagacctctcttctgtaagcaactcaataaataattatttaagtaccatcctcacccagtgtactgttagctgctgttatgatattgattactgtaaaattttaaagtatatccttggtagactgttgatcaaagtcagaaagcttgagaaactctgaggcaaaaaaaaaaaaaag

SEQ ID NO: 59746 - DNA, 6304 bp, Homo Sapiens
tgaagaacatttatgaatctcttgatgaagttactataaaagacactttggaaggtgataacatgtatacttgttctcattgtgggaagaaagtacgagctgaaaaaagggcatgttttaagaaattgcctcgcattttgagtttcaatactatgagatacacatttaatatggtcacgatgatgaaagagaaagtgaatacacacttttccttcccattacgtttggacatgacgccctatacagaagattttcttatgggaaagagtgagaggaaagaaggttttaaagaagtcagtgatcattcaaaagactcagagagctatgaatatgacttgataggagtgactgttcacacaggaacggcagatggtggacactattatagctttatcagagatatagtaaatccccatgcttataaaaacaataaatggtatctttttaatgatgctgaggtaaaaccttttgattctgctcaacttgcatctgaatgttttggtggagagatgacgaccaagacctatgattctgttacagataaatttatggacttctcttttgaaaagacacacagtgcatatatgctgttttacaaacgcatggaaccagaggaagaaaatggcagagaatacaaatttgatgtttcgtcagagttactagagtggatttggcatgataacatgcagtttcttcaagacaaaaacatttttgaacatacatattttgggtaagtttggtaaatttcatagtagatattttacacattttaaaaaaatcttacgtgtgaattttaaatgattatttttaaattctagatttatgtggcaattgtgtagttgtattcccagtacataaccagatcctaaagctgtgtccttaatgacagcaaaggtaataaatatatgaacttaaaataattctgtcaaaatttactactttaaaatgattgaagcttttttgctttatcttttcttacagttaagcacttcctttgtcctagagacatttattcattctaaagaaaagcccacgatgcttcagtggattgaactgttgacgaaacagtttaataatagtcaggcagcttgtgagtggtttttagatcgtatggctgatgacgactggtggccaatgcagatactaattaagtgccctaatcaaattgtgagacagatgtttcagcgtttgtgtatccatgtgattcagaggctgagacctgtgcatgctcatctctatttgcagccaggaatggaagatgggtcagatgatatggatatctcagtagaagatattggtggtcgttcatgtgtcactcgctttgtgagaaccctgttattaattatggaacatggtgtaaaacctcacagtaacatcttacagagtattttgccttcctttacgaatttgcaaaaatgggtgaagaagagagccaatttttgctttcattgcaagctatatctacaatggtacatttttacatgggaacaaaaggatctgaaaatcctcaagttgaagtgttatcagaggaagaaggggaagaagaagaggaggaagaagatatcctctctctggcagaagaaaaatacaggccagctgcccttgaaaagatgatagctttagttgctcttttggttgaacagtctcgatcagaaaggcatttgacattatcacagactgacatggcagcattaacaggaggaaagggatttcccttcttgtttcaacatattcatgatggcatcaatataagacaaacttgtaatctgattttcagcctgtgtcgatacaataatcgacttgcagaacatattgtatctatgcttttcacatcaatagcaaagttgactcctgaggcagccaatcctttctttaagttgttgactatgctaatggagtttgctggtggacctccaggaatgcctccctttgcatcttatattctgcagaggatatgggaggtgattgaatacaatccttctcagtgtctagattggttggcagtgcagacaccccgaaataaactggcacacagctgggtcttacagaatatggaaaactgggtcgagcggtttcttttggctcacaattatcctagagtgaggacttgcagtagaagaactgtttaacctgatgcagctgtttatagctcagaggccagatatgagagaagaagaattagaagatattaaacagttcaagaaaacaaccataagttgttacttacgttgcttagatggccgctcctgctggactactttaataagtgccttcagaatactattagaatctgatgaagacagacttcttgttgtatttaatcgaggattgattctaatgacagaggtaaatattctattgcattttactgtggatattatctcattttaatgttctcaccaagacttactttatagacatttagagtttatggtaaactgttttacaggtggcaaggttttaattatatagatcagtaaacctgaatttatatcccaagaataattaggtcataatttttagggtgctgttcctttttccatagtaattccatacttttcccattattttgtatctagaacagccatttgaaatagactagttttattcatttgtagggacaaaaatgagatacatgtgatttcattaagggcacacataatttcccaaaagcctacttatttgacagtatagaaactgaggttaccattgtgaacccggaaaatctgagacaggtctcagttaatttagaaagtttattttgccaaggttgaggacgcgcccgtgacacagcctcaggaagtcctgatggcacgtgcccaaggtggttgggacacagcttgattttatacattttagggagacatgagacatcaatctgtatgtaggaagtacattagctctgtccagaaaggcagagacaacccaaagcaaggcctctccttcctctggggccttcctggtcacaggtatgtgagagacagatggttgcgttcttttgagtttctgataagtctttccaaaggaggcaatcagaatatgcatctatctgggtgagcagagggatgactttgaatagtatgagaggccgatttgccctgagcggttcccagcttgaaggggcccaagatattttcctttcacaccatcctcagaggaaaccagaaggactattacagggttaaaatcagctgtttatgcttcctataattcttgaacatccacaagtatgagatggctgcagagtcaccagaggtacgtgagccctttagtctgataaacatgccaagagtaccataagaattcacaggtaggatgttttttcagttaatgataataaaaaataagagaacaggtttgcactttgaagaatgtggatttgcaaaggtaagggggaatacatttagataaatgacaataagcactgaggcaaagaaatattggttatgtttgaggaaggctaagtattaaaaaaaaggtaggtgaagaggagtagtaagaatttcattctttaaaatgcaacagatgtttatgctgctttggttgtatttttagaaaaaaaaaatttttttttaatgcaacagatgtttaaatgtctacctctgtgccaagcactgtggtaggtactagggacacagcagtgaacaagacatactggtttctgtccccacagcttacaagttacatactgtacaagtacattgttcatattaggtactgctgcaggttctgggctaagaattttaacatttgaactgtgggtattacagtgtgtaagctgtagtgaactggtggaagaggattcaaagaagggtgctgtatagtaaaataggaaaaaaactaaggtcttaattaagctaatacagttaaaggaattaaaagatttaacaagccaatataaaggaaatgaattcctaccttttgcagctctttttacctctttcaggcctactcttttgagtatggctgacagtcactttaccattgtctttggacagagaccctggaaagttggttaaagcagttgcctattctccctaatcttttgtgacctactgctttgtaattttgaagacttaacaatcttagagcaagtacttttttaaaaaaatgtgattaaactatttcttcagactagaatatacacacaaaatagcagagctctgaaggtgaggaatgtttaaaagagcttaatgagagtttaacttcaggatagaaagcaaatacgtttgctttgcacacatgtgcacacacagtctgagtctgaaaacatccatcgtagaggacgagtactaccattttgtggctcagtaagcaaaaatgaaattaagttttcaattttttcaaaacatttgtagtctttcaacactttgcacatgatgtatcacgaagctacagcttgccatgtgactggagatttagtagaacttctgtcaatatttctttcggttttgaagtctacacgcccttatcttcagagaaaagatgtgaaacaagcattaatccagtggcaggagcgaattgaatttgcccataaactgttaactcttcttaattcctatagtcctccagaacttagaaatgcctgtatagatgtcctcaaggaacttgtacttttgagtccccatgattttcttcatactctggttccctttctacaacacaaccattgtacttaccatcacagtaatataccaatgtctcttggaccttatttcccttgtcgagaaaatatcaagctaataggagggaaaagcaatattcggcctccgcgccctgaactcaatatgtgcctcttgcccacaatggtggaaaccagtaagggcaaagatgacgtttatgatcgtatgctgctagactacttcttttcttatcatcagttcatccatctattatgccgagttgcaatcaactgtgaaaaatttactgaaacattagttaagctgagtgtcctagttgcctatgaaggtttgccacttcatcttgcactgttccccaaactttggactgagctatgccagactcagtctgctatgtcaaaaaactgcatcaagcttttgtgtgaagatcctgttttcgcagaatatattaaatgtatcctaatggatgaaagaacttttttaaacaacaacattgtctacacgttcatgacacatttccttctaaaggttcaaagtcaagtgttttctgaagcaaactgtgccaatttgatcagcactcttattacagacttgataagccagtatcagaacctacagtctgatttctccaaccgagttgaaatttccaaagcaagtgcttctttaaatggggtaagaactatgcagaggcggcggcacacacttttaaactgtccttcagttaactgtgtggccttcatatgattttactctcgtaactttaacttactgattcaaactcttaagccatgtgcgacaaaaaaacaagttttaaatacacgtttactatgccttgtatgtacacagcacactctatcaccttggaagctacaagctggtatcattaaatgctgaaaggtaataaagggaacatcttagtggtcttatctctacttgggtatatttttggaaacaatacttgtgatgtttctattactgcctatggctcctatgtaactgaaacaattaatgatctactgatttaaaaaaggcagttaaatctagagcattagttgccttgtgcagactcccatgacagccatgtcctagaataatggaacactctggaaatgggctagaatgttgagcagcagcctcccaaatcacagtatgcataaaagccaaaacagatgacagagctcagtaaggaagaccttactatttgtgacatccatcagaattttaacttgagaaactgatttcaaggtttgtttttaaaattcttatatttccttttccatttttcagaaaacactatttcaggctttggtctgacttactggttcgtgggcataaaataatgctattagtgactttaagaactaatgaggctgggcacggtggctcatgcctgcaatccaagcattttgggaggtcgaggccggtggataacgaggtcaggagattgagaccatcctggccaacatggtgaaaccctgtctctactaaaatagaaaaaattaagccaggcgtggtggcgggcgcctgtagtcccagctacttgggaggctgagggaggggaatcgcttgaacccgggtggtggaggttgcagcgagccgagattacaccactgcactccagccttgccaaagaacaagactccatctcaaaaaaaaacaaaaac

SEQ ID NO: 59747 - DNA, 512 bp, Homo Sapiens
tttttttttttttttttttacaacttttaacggtttatgatgttaaagtaatgacaaagtaaagtatcttttactattaaaattgctgcatttctaaatggcaggagttgtagcagagatgtaaaattggtgaatgtatttgtacttttaaaccataaagtaattatagatttaatgggtcagaacacattaaagtggaaaaatattatgtaacatgattctcttctaaatgagcgatggtattttttgaaagactatagggacattctgtggagacctaggacttagtattggtatgggatcattttatactattcacattgatcatagaatcatggagctttagagttggaagagcctgatacatcatctagttgaactttggcattttactatctctttccctgtgccttgcctggtttggaaattctggccgtttattgtttaaggcaaaacaagctataatattgtaagattggctaatttattaaatttttttgtggatatttaaa

SEQ ID NO: 59748 - DNA, 405 bp, Homo Sapiens
cccggctatgtggaaagcaacatttctgctgcagagaaaagctatgagcagtcaccacctaacagtgaccaatggaatgtccagttggggtgtgggagctttctgggaagagatactccagcagctgcaacttccatgaatatttagcatatctgagcacagagaagactacggccagtcctgatgcagctggcagccccttctgtgggcaaaaacatctacacagcatgtgtatgtgtgtgagtatatgtgtctaatgtttttaagccagtttcatgatcaggtcattaatctgataagcactcctagagctaggtatactctggcttctcctaaaggcttctatgagtcatctgacaatgaccaggcttaggaataggaatacaaatattggggcagatagct

SEQ ID NO: 59749 - DNA, 2065 bp, Homo Sapiens
aggtgggggccggggcgggatggctgcagcggcggccggggccgggagcgggccctgggcggcccaggagaagcagttcccgccggcgctgctgagtttcttcatctacaacccgcgcttcgggccgcgcgaaggacaggaggaaaataagattttattttatcatccaaatgaggtagaaaagaatgagaagattagaaatgtcggattgtgtgaagctattgtacagtttacaaggacatttagcccatcaaaacctgcaaaatctttacatacacagaagaacagacagttcttcaatgaaccagaagaaaatttctggatggtcatggtatttacacacacagtgtatctttctgaaattgtatggtgaagttatgggtgatctttactgttcagaatttaggaaagttctctggctgttgcatccaagtaaaattaaaataaaattggttgcaattttaaaatcaagttcttcctatttgctttattcattcttggggctgttttaagaagttgtgtttctggtgctgtagcatgttcaaagtttttaaattaaggcaaaataaacatggtctaatgaattcattgtataatttcagtttatcaaactttgtaggttgttcggaatcctataattgaaaaacagagtaaagatggaaaaccagttattgaatatcaagaggaggagttgttggtaatgtgtcattgtttgtttatttatttatttttttaaatgtattgctgagtatgttgaatgccttacttggtcggatttaaactaggaggcttttgcagaagtttctcggggtatatagcaaaggtttatgtttatcatttacatgagcacaatctttttaaaatgtatatgcacccaatctcactaataccttctactcttcatctatattgaaagccctcctaaagtaaggcttactgattgacaaattagagtttaaacacttctggctgggaacagtggctcacacctgtaatcctagtactttgggaggtcaaggcaggcagattacttgaggtcaggggttcgagaccagcctggccaatatggcggaaccctgtctctactaaaactacaaaaactggccagggatggtggcgcacacctgtcatcccggcttctcaggaggctgaggcaggagaatcgcttgaaccggggacgcaaatgttgcagtgagccaggattgtaccactgcgctccagcctggacaacagagcgagactccatctcaaaaaaaaaaaaaaaaaaaaaagaacgcaaacactttttttcagcacgcaactattgtgggatgaagtttataaacattatactgtttggccaagagtcagtgtacctttgccatctatccagtagacattgtttttcccttgaactgagctgtgtgctgtgttttcgcgtctgcaggacaaggtttatagctcggtgctgcggcagtgctacagcatgtacaaggtaagcgtggcgttctttctcaactcagagtccaaccacttacccctatctctaggctccagggttgtttaaagagaagtctataaatgactgcaaagtgactctgtatttgtcttagagaagaaaataatgaggcctttgaaacaggtagtgaggtttatgcctacatttattcagtaagtattgaactcccttctcttttctcagccttatagtaggaatgtgtccccattgatgaaaaagtgtatctatgtgctcaaggaacatacagaatgcagataattttatgatttaaaagtttcagtgaggcagggcacagtggatcacacctgtaatttcagcattctgggaggctaaggtgggaggattgcttgagcccaggaattcaggaccagtctgggcaatatagcaagaccccatctctacaaaaaaattttataaaagttagccaggtatcatggtgcatgcctgtagtcccagctacctgggaggctgaggtgggaggatcgctcgcaccttggaggtcgaggctgcagtgaactgtgattgcaccactgcactctaccctgggcaacagcgagattccatctc

SEQ ID NO: 59750 - DNA, 3124 bp, Homo Sapiens
tatttccatgcaagtggaagacggtaccgtctccccacatttgagaagactgttttgcatcactctttgctattgaaggaagcagtgatggtgaatttccttctgtttgggttccttgtgtctataacttcctttgtggtaaagccatcaggaagaatagtgggagtggggtatatggtcagggtgctcatatcctgctttagcctagctgcttcttacggagtgcaagggagaactctgagaagcagtatgtaaataccagggagctgattgctgaatattgtggtctcatctgaatattgtggtctcatctaaatattgacaccaggcaatgaagcagaaatagagtatgtgtccctttatgcgtgggtaacttaagcttctgtcatgtgggaagggggaccgaatcttccctgggaggaaggctccaaattctcactacttctgtgttacttgaagggggaagcataaggaacccagtttgaaggcaacattgtgtgccatgaatctgcttattaatcaacatgccttgttaatgtcctctgccctgaacagcccttactcagttctcatttggaaagttattttttggggttacatcctgtttgtttcagaatttaaaaccctccatggtgggtcacttgaggtcaggagttcaagattagcctggccaacttagtgaaactccggctctgctgaagatgcaaaaattagccaggtgtggcacacgcctgtaatcccagttacttgggaggccgaggcaggagaatcgcttgaacctgggaggcagaggtcgtagcgagccaagatcacaccattgcactccagcctgggcaacagagtgagactctgtcaaaatcaaaaaaaccaaaatacaaaaaactccattgttctgagagtttcccctaaattatcggaagacactcacattgaattggtaggacctatagtatagaggagaatggtatgtatgtcagcagtagagttccaatccaaattgcgctatcgcattagaaatacattaccctcccactccccaagttcagcaaattagaagagaatctgaagtttgtaggaagggaataaagctgctataaacatttatgtgcaggtttttgtgtagactcgttttcagctcctttgggtaaataccaaggaaccaggttgctggattgtaagttaagagtatgtttagttttggaagaaactgccaaactgttccaacatgactattttgaattcccatcgacaatgaataagagttcctgtagctcctcaccctcattagtatttggtgatgtcactcttgcattttagctaatgggtgaatagtggtctcatcgttttaattcccaatcccatagtgatgtggagcaccttttcatatacttaatctgccatccttatatcatcattggtgaggtgtctggattttctgtccagaattttagttctagtggttttcttatttttagaaaggaagtataggaaggaaggtttaatctgtcttaagcctgattatatgaaaatcaagaataggctaggtgtggtggctgacatctgtaatccccgcactttgtgaggctgaagtgggaggactgcttgagcctgggaagtcaagcctgcagtgagccatgactgttgctgcactccagcctgagtgacagagtgagaccctgtctcagaaaaaaaaaaagcaggctcattttaaagttgtttatattttattttttgaaggaaataaagttgaagagatacaaagggtagtgaagattctccttcccctcctgtaattcagctgtttagtttctattctcgcacagccctgttatcagtttctagtgtaagcttgcagtgacttttactttatttataagcaagtgttagtgggtgttgtcatttcttttaaaaatataaattatactgtacatgctattttgtattttggcttttctcccacctaaacaccctaaagatcattttctgtcagtatataaaatcttggtgatgccaatacccatcccttagattgtacaagcagcattttgccatgctttatcccatagcctgcctcctgcagtctcatctttttttctatatgcgtgtccaagtaagttgtagacatttttcacttttaatcctttcagcatacatgtcatgggaatttgtttttgtttttgttttttgtgtttgagacagtcgctctgtcacccaggctggagttacagtgacgtgatcccagctcattacggcctccacctcccagtttcaagcaattctcatgcctcggattcccgagtagctgggattacagatgtgcaccaccacgcctgactaatttttgtatttttagtagagatggggtttcatcatgttggccaggctggtctggaactcctggcctccagtcatttgcctgcctcggcctcccaaagtgctgggattacaggcatcagccaccacacccagccgtcattggagtttttttgagggagatttgcagtaaggtgaataaatgttaagtgtatcatttgatgaggttttttctttttttttttttttttgagatggagtcttgtatcgcccaggctagagtgcagtggcctggtcttggctcactgcaacctccacctcctgggttcaagggagtctcctgcctcagcctcccgagtagctgggattacaggtgtgagccaccatacccagactcatttgatgagttttgatgtaaaagcatgtaactcaaacccctatgtctggaacatctgtattacatctgaattttttcacctagtcaattcctgcacctctctctcctgtcccttcttccctcccctggcagtcagctactgttaggattttgttcactgtagattaattttgcctattctagaacttcatataacggactcacttatgcagtatgtattctgtaagttccttttactcagcatgtttgtatgttcatcagtgtgtttaagctttgttcctttttatggctgagcagtgttctatgtatgaatgccacattttaacgtttcacctgttaggtgaacaactaactggtgaacaatgggctgtttctagtttggggctatcatgaataaagttggtatgaacatgt

SEQ ID NO: 59751 - DNA, 498 bp, Homo Sapiens
ttaaattcacaaaccccttgaactttatccatgagattttctgatgacccaatgacttaatcctgctactgacttaatcaaaacccagtccctacagaagagacctgctcccccgtcacagcgcccccccggccccccatgccgcttattttaaaagcgcagctcccacaggctgcctttccttcagtttctgtccatgcccccagccccaggctgccctctcttggcggcaccgtcccaccccgcctgctgcactgagcccgctgggcctgggggactcttgctcagtagaacccgaggccagcaaaagctcttagcccaggatggctgcagcagcgacagtcctgaaggctacagagacacctggaaagggaacaaggagagcacgacagtccctgtgctgaggatccagggtggtggcggcaggggttagtgtacagtctcgagaaaacagggcggcggcagggggctgcactgacctctatacaccgagagggt

SEQ ID NO: 59752 - DNA, 550 bp, Homo Sapiens
  misc_feature (481)..(481): n is a, c, g, or t
  misc_feature (533)..(533): n is a, c, g, or t
  misc_feature (537)..(537): n is a, c, g, or t
  misc_feature (539)..(539): n is a, c, g, or t
  misc_feature (549)..(549): n is a, c, g, or t
aaaatacttgcatgctttattcaaaatacactgtgagtacatgtctatgctaatattctgtagtatcatttgaagtggctatattatcttatagaggtgccctgattttgtttttaaaaataaatatcctctgcagaacacactgtcaagagaatgagaagacaagcaacagactgggagaaaatatttgcaagagacatacctaacaaaagattgttattccaaatattcaaagcactcttaaaaacttaataagaaaaacaaaacaacaacaaaagggaagatttttaaaatgggccaatggtataaacaggcaccttatcagagaagacatacagatagcaaacaagcataatgttcaacattttatgtcatcaggtaattggaaatcaaaatgagataccacttcctaatagtataatccaaaatactgacccaccaaatgctggccaggatgtggagtaataggagctctcattcnctgcttggtgcaaatgccaagcagtataccccttggaataatttggcagttncctncnaaattaaacnt

SEQ ID NO: 59753 - DNA, 527 bp, Homo Sapiens
tttgcacttacatacactattgttcaaagtaacgggaatgataaaaattgccgacgcattcaatctcttttcctccctgaagtcttcaatgatttagaaatcttttctgtattgttcaggcctataaagttatctcaatccaatctgtaaccttttctaggtcataatcctctttgagagcaggaactgcatctttacatccacctactatctagtgtatggtatatggtaagtattgaataaaatgagcacaattctgcttttcagtattaaaatattaaatggccttctttgctaactattgaaaatatagtatcagtataatacagacatccacatttgttaggcgcacgaagtagcataaattcttccaatctcattttcttatcttgcacacctatgatgtgccagtactatgctaaacaacaggaatacaaagactgtcaagacatgtcccctgatctgaagaagcttacagtctagtgaaagagacagacaaaaaaggtttaaaatcaacagaaactcga

SEQ ID NO: 59754 - DNA, 593 bp, Homo Sapiens
  misc_feature (351)..(351): n is a, c, g, or t
aactcagaatatcctcgtattcacaggcaggtcttgccagacttactgtagaagaaactaatcaacatccctgggaagatgagaaaatgagtgctgaagatgaccttccttagccttcctcttccagaaggactaagaagcatgcgagctacatctctcttttccttcctgttccctgggctgccttgcaatacctggtggggcacatacctgccttccatggcagacctttggcaggatagtagtggcagatagaagagagaaagtggaaaaaaaattcccctgtaccctgctagtattccccattaagaaactgccttggcagcaaccaaggacaaatataaatgagtntgtgagtgttagaaaagcaagcctttctgcctggcacataccattacataagccagaaccacacagaaactttatgctattttacccttaaactttgccagtggtagtagcaacagcatctggtggcaccataacattaacatcttccctttaaaacaagattagaattcctaagatttgagtaagtatagagttgagcatatgtcttcataagacagcttccatttcagcttccaaaaata

SEQ ID NO: 59755 - DNA, 486 bp, Homo Sapiens
tttttgatcataaataaaatgtattatttattctaaacccaaataaaatgatacattatcttttctccttgccactctcttaaaatgtatacaaggaaataaaacattctaagccagaaaacatattttggtatcttagatttttcctttacatttatagaccaacttttcaaaaggaaaaaacaaaaccatggtactgaagcaattcaccatgagctgtacaatgagccacatcattcggttccaatcacagaatttgaacaagcagcttccaatctcagccttttacctactctagaccaggggcagctaacattttctcgaagggccagacgctaaatattttaggcctttgtgagtcacatggtttgtcaccactgctcaactctgccattgtagcacacgagcagccacagacaacacagaaacaaatgggcatggctgtcatccaatgtaactttatttatggacactgaaatttgattg

SEQ ID NO: 59756 - DNA, 3590 bp, Homo Sapiens
gaaaacttgtccctaagggactttgtggtcacagcagttctgatttccttgtttgaaatttttgtaaactttccaacttctttgttttgcactcagtacttaaaaataaatttaatgccagaagtaaaagtactattattttcatcaatcataagttatagataacaaaaactcagaaatttttcttgaacataggtagggaacttaggtgaaaggactgctttaattccatctaaaagataaaacctaatactgacttacaaatatgttgctaagagtttagtgtctccaagtaaaggtagaaattttacattatctatcaatgatatcggcgaaaactaaaattattaggaagtaagctaagaataatttatagtctagatttttaacttaaaagtggaaccaatttccaatggtttcttcccttagttcttgagttagccatactgtgaccattaaaaaacatctttaaaatgtatgtgaaaaaacctgaagaaaatgtggcaaagggtaagatttgataagaaatgggtctaggtttatagggaatgcattatagtctttatagttatgtgtgtttgaaatataataaaacacttttagatgaattctttcttttttttttttttcctttttgagacacagtctcactctgttgcccaggctggagtgcagtggtgtgatcttggctcactgcaacctccacctcctgggttcaagtgatgcatgtgcctcagcctctggagtagctgggattgcaggcgcacgccaccacaccagctaatttttgtatttttagtaggagacggggtttcaccatggctggtgttgaactcctgacctcaagtgatacgcccacctcggcctctcaaagtgctgggattacaggtgtgagccacaacgcctggctagatgaattatttcctttagaaattattttctgtgtatctgcaaaagtgtttcattttagtactgtgaaatgaataggccctatgctgggtcctgttggggtttgtgatttatagatggtaaaatacatttcacacttacaagatgaagcaatctacctctatataaagagcttgcctgtgggtggttgtagcaagtgtcttcttattatttcacaattgagggcaagagagaggtcagaccattggtgaaacccttagtgcaagcaagtccgcaaataagctttttagctacttaagcctaggtgttttattggcattgaaggccaagacacacgagcaatacttgcacaatcaaaagttctatttttccaagacatgctggtcacacaagaaaaactgagataacatataatttatttttccaagacatgctgatcacaaaagaaaaactgagataacgtataatttagttactgtgtatccactttggatccagattgcatatctatatctgtctgtaaacagacatatgcacacatatatatacctgtgtgtatgtatatatgcacacacacacatatatatttaaaatcacagtacttaattaatttgcctccaaaactaatggccacattaatgcctttgagctaagttagactggctggaatcagttggcaagatcctggtaaatggttttggtgtcaactaggacacaagccaggtgtggtggctcatgcctgtaatccttgcactttgggaggctgaggcgggaggatcacttgaggctaggagtttgagaccagtctgtgcaacatagactccatctacaaaaaataaaaaattagccaggtgtggtggcatgtgcctacagtcctagctatttgggaggctgaggcaggaggataccttgagcccaggaggttgaggctgcagtgagccacgatggtaccactgcactccagcctgagcaacagcgagaccctgtccagcagggtagagtgcaaaggatgcctgtggaatgggagaatctgttcagcatccatcctcctgcttccaggctaaacccatgagaagagtgctgtcaacaaaagaagtgttccctacagtggggaagaattgaggttagcagaaagggtaaaacaagaacaaagtaattcctagccatccgaagaggtggaatgggaaaggcaacacctataacaggaaggaaatactccatctggggctgagcctgtcttattctgaggcccaagcttggctgcctttctcttcattccctctgtgtgccacttaacagtatgcatttcaactttcttttcagggaggggccagatgtagaaatgcctcacactacagtggaggagacctcaccagctacctgtaccagtaagatgggattagctcaggaaacgttgttgtttgtttgagggacaagaataacatgaaagaaggagcaagattaacagaacagctgacctagagctgctaggcactggatggtcctctgtgcttatatacacaatgtaatacttgtaaggaaaaagcaaaaggcttggaggaggctgtggactacctatagttgacagtattttcctttgtgggggtggtggatgtgggacgtagaatgtaaacttcctaccttatacattgatgttacttcattgattatagtgaacactttatagactgaaacaagtctaagaaaaattcatcttgagctgaggagatagagatgacctgccaaagatttcacatccacaaagtttgtatgactgatagttttaataaaaaaaatttgtcagccaaaacatactgagagtttcttagtcgtattaactgatctgaaactgttgccactaggggatataaaagatactacctgtattttagtgataaaccacaaagaataaaatgagtttttaattagcatcatgcagccacttaagtattagcaaagaaaatttgtagctgatctttcagttctctgtaatatagaaaaacagatgctgcatctctagttttgcctgtgcctgggggatatttaaaacttgtactaaaatgttaatttcgccatggtagaggtgacggggaaacttgcaaaaaaaggggaaagaggagggaattgggtgcatagaagtgagcatgaggccagcagtagggaatgagtttacaataaataaggtgtgagagtggttggggggagtgggagaggtttgggggctgggaagacaagggaaaagaaaatgcaggtatatgctatttgtgttcattttgtctttgaaaatcgtaagtgtacagcatcattctcgggcagagtctgggaggacttgagttgactgctacagtttatgatcttccctaaacatcgacgttcctggaaatctttggcctctgagctgacttcttctctgttgcttgtgagccaggaatttaacagctctgttgtatgtgcaggctgcagatgcttctcttcagcttttgctatccaatgtgtgtgtgtgtgtgtgtgtgtgtgtgtgtgtgtgtgtgtgtgtgtgtgtgttggataaacttaaaaaacctgttgcttccatgcaacggcccacacaacttgggactcatggtcagcctcaccttccacattggctaaaactctacaggaaacagtttatggagtttaaggaaaaaaaaaaaaaaaaa

SEQ ID NO: 59757 - DNA, 558 bp, Homo Sapiens
  misc_feature (174)..(174): n is a, c, g, or t
  misc_feature (290)..(290): n is a, c, g, or t
  misc_feature (345)..(345): n is a, c, g, or t
  misc_feature (435)..(435): n is a, c, g, or t
  misc_feature (449)..(449): n is a, c, g, or t
  misc_feature (486)..(486): n is a, c, g, or t
  misc_feature (529)..(529): n is a, c, g, or t
  misc_feature (541)..(541): n is a, c, g, or t
  misc_feature (554)..(554): n is a, c, g, or t
  misc_feature (558)..(558): n is a, c, g, or t
catagggtctcgctctgtcactcaggctggagtgcagtggtgtgatcatggctcactgcgtcactgtagcctcaccctcctgggctcaagtgatcctcctgtctcagccctcccaagtagctgggccacaggtgtgtgccaccatgcccagttttttttttttttttcgtaaanatgggggtctcactacgttaactgggctggtctcaaactcctgagctcaagcaatccttccaacttggcctcccaaagcgctaggcttacaggaatgagccaccgtgcctggccanaatcggttacatatatgtgacatatgtgtaatacatgtgtgcctgtccccaggtntcagggcagagagaacacactttctcctactattttaccacacccttcttgctgggaggctattaaacctgaaggtctggtactatgtantggtgaagggtganatatggattcaaaccacactggggtttaagtccctgntttggcaattaattttaatgggacccctgggcaaggggaaccnccctttttgggncctgggttccctngttn

SEQ ID NO: 59758 - DNA, 513 bp, Homo Sapiens
tcctgattttattatcaaatagtttttaatgccaaaacatttaaatccatagtttggtatatttgttgtaagaattggtaacgataaaataacattagtaccaaagtatctgaaaaatgagttacataaatttacatttttttttttacaaattactaatctacatgtgaatttataatcaatattaaaattcaaaacactagcatgcacattaacaactgatttctaatagtgatgaggaaaacagttctgttacgtaaaaactgtgttgaaaacaaagaaaacaaaatgactatttagtgaaaaagtttataagacgattgccttataatagtaccaacattactggtaggtaacatctcaaaaattcaaaaaggagaaaggttcttttttacccagagaactacatatataaatcacatagtttttttttttttttaagttttcaaaatgagatattatacataatattaaaaatgtcaaaataagataagatacagggcagaaaagtta

SEQ ID NO: 59759 - DNA, 590 bp, Homo Sapiens
  misc_feature (526)..(526): n is a, c, g, or t
  misc_feature (577)..(577): n is a, c, g, or t
gttgggatttcagatagagtttggtttataaaaagcaaacagggccaacgtccacaccaaattcttgatcaggaccaccaatgtcatagggtgcaatatctacaataggtagtctcacagccttgcgtgttcgatattcaaagactgttttgctccattccccagtgtgtttctgtaaaaaaggacaaaatgtacatgatcatgacattacaattacttagacaactctgacttaacaagttaaagaaaacctttttactctaaagaagcattcatcgtgccatgttattattcatgtatatgagacctgctctacttcaaagctgtaatcttcttagttgataaacaatattcttaaacaaatgccttgtaaggattcttagtaaatgcagcagggcaattgctatagaccagtgcatcctcaggaggcctggttccggccattgctaacaggtttataaatggtttattaaaaagaggataggtctctcacaatgaaattcgctaatattagaagtgagttttncctttggtccaaataaccataaccaaatggagagaattggaaggttacccnttaaaattttaaa

SEQ ID NO: 59760 - DNA, 2003 bp, Homo Sapiens
ttttctcatagtccctgttctggtcaatttccggcgcagcccggcttgaaatggctcttgagcctacgcttttgagcttacttctcatttgcccgactattttctcatagttcctgttccggtcaatttccagcgcagcccagctgagttgggcgaggtctagaaaggcctgactcgcctcttggcctcaatgacttgtacccgctgcttttgcagacctcccggtcttcatggcaactgtgaaatgtggggtggggggcgtagggttgaagccattcgcgccggtagtccctgcatgtcccctcatgtgctccccagtgcgcacagcaccccagcctccgcgcttctggaagcagcccagaagggtcttggcaatcacgtccagctgtaagccatttcgcggtctcagattgcggacctccgcacgccccctggcaggttccctccgcctagggtggaaagctgcaaaggcagccccaactcttccaccacctcctccatctccggctcctgggcttgggaggccccgcgccactgcttcgactggctggggcgggaaggttgaaatggctttgagactccacttttgagcttactcctcctttgcccgactattttctcatagtccctattccaatcaatttctggtacagcccagcttgaaatggctcttgagcctccgcttttcagctgactcctcgattgctcaactattttctcatagtccctgttccggtcaatttccggcgcagcccaacccagtccggcgaggtctggaaaggcctgactcgcctcgcagcctgaatgacgttgtacccaccgccgatgcggacctcccagtcttcttggcgactgtggggtggggggcatgcggttgaagccgttcacacgggcagtccctgcatgtcccctcacgtgctccccttgactaattccctgccctacaagactcgggccagacatcagtgcccctagaaagcctaggctaacttttctgcacaacacacacttatgatgggtcagatgtgcctgctgcaagctcccgcccacctgtcacacctgtctcacaccacacactttgcaagtatttgttcacctgtctccagtactagactctgagcttcttgaggtcaggcactgtcttaccacgacgtggcttcagtgccaaaaacatagtatattcacagtttacaattactgaagatctactctaagctagttgctgttctaagatgttctgcatatatcaactcattgaattttcatatcaagccaaaggaggtactattaatatcccacttttactggggaggaatctgagacagaaataggttttgtgacttctccagtgtcatttgaaaatggcagggaagttggggttcaaagccagaagtctgactccagagcccaccctctaacaagctagacatattgcctctttacagtgtatgataagtgcttgccaaatgcatgtaagaactgactatccagctaagtttctccaaactagataactgtctttaagcagggaccttgctgcctgtgcccctcccagctctctctccagtcaccactacagagcacaatgcatggtgccttcttcacaagcaaataccttctcccttcttcaaatcctgactacagatccagggtagcaccatataccacacctccctaaaaaaagaatggttataggcagggcgtggcggcttacacctgtaatcccagcactttgggaggccgagatgggcggatcacctgaggtcaggtgtttgagaccagcctgggcaacatggcgaaaccccgtctctactaaaaatacaaaaaattatacgggcatggtggcatgtgcctgtaatcctagctactcaggagcctgaggcaggagaatcccttgaatctgggaggcgaaggttgcagtgtgccgagatcgcgccactgcaccccagcttggatgtcagagtgagaccccatctcaaaaaaaaaaaaaaaaaaaaaaaaaa

SEQ ID NO: 59761 - DNA, 577 bp, Homo Sapiens
  misc_feature (551)..(551): n is a, c, g, or t
tttataataaatcaaatttattttttaaaattttaaacttctcatagagaggtattgatggaacattcaattaaaatctttgtttataggactcagagatagccagatattaaacaaataaaaaaatgtttctcgtgaatatcaagttgactcttgattaacattttatactcttattaacattgcgtacattgtttgtttctattcaaccaatttcagaacttcatgaaaaagttgaatggtaggttgagtgatggggtaacacaatgggagccttttctgcaaggctggcatgtgaataaagtacctgaattcttctctgtagttattcctaatatactcagctagagtcctgctgtgccgcagacagctcttgaggatgtaaaattgctggtacaacagaactgcttggcagggacttagcagctgaaatgaagctgaaagacccctcaccacttgtttcacaatactggccacaaaagtaatgatgggaggacagctttgtagaaaggacattatccagctaatagcaaactttgtggatcccaatncgagatttccctgctgaaagaccaga

SEQ ID NO: 59762 - DNA, 4442 bp, Homo Sapiens
gggtctccatagtttagttttttccagaatgtcatatagttggaatcatacagtatacagcctcttcagattggcttctagtcacctggcaatgtgcatttaaatttcctctatgtcttttcatgggttgatagctcatttctttttagcactgaataatattttggttgtaccacagttcacccattcatatactaaaggacatcttagttgcttccaggttttagcaattatgaatcaagctgctataaacattcatgtgtaggtttttgtgtagacataagtttgcacctcctttgggtaaaatgcaaagagtgatattgctgtatcagatggtaagaatatgtttaattttatcagaaactgccagactgtcttgcaaaatggttacacctgtttgtattcccttcagcaatacgttgaagttcttgttgcatcgcatcttggccagcatttgtttttgtcagtgtttcggattgtcaccattctagtaggttttgtagtgctgtctcattttaatttgcagttccgtcaatgtaatttgcaattctatcaatggcatacgatgtaaagtttcattttaacaatcatatatctgaagaatattttcccagatattcatgggtgaagatatttaggaatgcatgtattgaggggagaaaacttgggtatatatatataaagagattgtcttatattttttaaactacccctcactaactagcagcgaataacatatattggaaattgttgtttttaattgcctgaatttcaaatgttaagttttccaagcattcactattgattaggttggaaagtttacatgctattgagttgtatcaatagaaacgtatatttttttccttttcattttaaaacgtttaaaaatttttttggagtgaggtctcattctgtcacccaggctggagtgcagtgacgcaatcataggtcaccatacctctaattcctgacctcaagggatcctcctgcgttggtcccccaaaaccctgagattgcaggcactggacaccatgcctgacccttatttacttttttttttttaaagtggagtctccctctgtcgcccacgctggagtgcagtggcacgatctcagctcactgctaactctgtctcctgatcaagtgattctcctgtctcagccttctaagtagctgggatacaggggtgcaccaccatgcccggctaactttttttttttttttttttttttgagacagagtctttctctgttgcccaggctagagagcagtggtgttatcatggctcattgcagcctccaccttctggtttcaagcgattttcctgcctcagcctcccgagtagctgggactacaggtgcccaccaccacacctggctgattttttgtgtttttaatagagatgggtttcaccatgttgaccaggctggtctcaaactcctgacctcaggtgatctgcccgcttcggcctcccaaactgcttggattacaggcttgagccaccgtgcttggccttaatttcttttgtatttttagtatttatggggtttcaccatgttggccaggctggtccctaactcctgacctcaagtgatctgcctgcctcagcctcccatagtgctgggattacaagtgtgagccaccatgtccggcccagtttacttttattagaaaagattcatttgctgatgtatattgttcagtatcttaatacttttttcatgagttaatactttcttggcaaagaggcctaatatcttgaggtttttaaaaatacccatgaatatttcatgtaagtgatttttgcttcattctttgtgtctacaatttgttatctaatatttctggctcctaacgattttcttttttgttttttttgagatgcagtcttgctgtgtcgccaagcttttcatagagatggggtttcaccatcatggccaggctggtctcgatcccctgacctcaggtgatctgcctgcctcagccccccaaagtgctgaggttacaggagtgagccaccgcgcctggccaacagttcttatttaatctttctcatgaaagtttaattggttataaccttattgttctgttatgtaaccttctttagtgaaggaaaaggtaatagaatatagtttgctcacactaaaatattttcaattgctaaatatagttttttttagggaatttatttttaggaatatttagatattcctaattgattaaaaaggctgaatcctgttgtcagaacttactatatttttctctagaattatatattttttagtggatttaaatgttctacattattttagcattttcgttttttgagacatagaacctaaatagcatgtggtgattcctggacaattcttaaagctttttttgagataaacatgagaggtctttatcaataaagaattttgactgtgacctaaaaaagagtattgattgtgcccattaagattgcattcactcaaacaagagttatattgataaagtgttagatgaatacctctcgtcattgatcattaaatggtgttccagttgacacagttaaagcagtttttatttagttcagtgagtgtatccccaagtttaggtggtcatactacactttagctttacctgagtactgtgttaagtcattcctttaaattaggttattggtaatacacacacacatatacacccacaaaatatacgtgttgagtatcccttatctaaaatgtttgggactagaagtgtattggaatttggatttttttgaattttgaaacatttgtgtattatgtaatgagatatcttggggatgggatccagatccaaatatgaaattcacttatgtttcatatatgtcttatatacatagcctgaaggtaacttcatagaatttaatttttttattttttattttttatttttttgagacggagtcttgctgtatcgcccaggctggagtgcagtggcgtgatcttggctcactgcaggctccgcctcccgggttcatgccattctcctgcctcagcctcccgagtagctgggactacaggtgccctccaccatgcccagctaatttttttgtgtttttggtagagacggggtttcgccgtgttagctgggatggtcttgatctcttgacctcgcgatccatccgcctcagcctcccaaagtgctgggattatgtgtctgtccaaaaaaaattttttttaagagacagtgtctcactgtgtgacacaggcttgtcttgaattcctgggctcgagcaattggcatctcagcctcccaaagtgctgggattataggcatgaaccactatgcctggctcagtagaatattttaagtaattttgtgcgtgaaagttttgcctacattttgacttagacccatcacatgaggtcaagtatggaatcttccactttgggcatcgtgttggtgtttaaaaagttttggattttggagcacttggggttttggatggttatgctaaccttgtttcatgatagcccaagtactaaatattaaaggaaaaatatccatgttctgcacaaaaagtgccatgtgccagtagtggcatgtttaccatgccactttggaaaatatttgttaggttaatttaccttacttagtgcaagcttcctgttctatattttcatgaaagaaaactgactgcgattttaaaaatattgcttctcaaaccttttggcttccatatttctttaattttccatatcactattaaaaattattgagggcgccaaagtcctgctaaaggattatatcaatatttaccatattataagccaaagcgaggttttaaagaaaacgttacagagttaagagtcgctttcttgtacatttttgcaaatgtcttttaatgttccctttagtgtagtgggaagaatggtgttgttttatgttttgtaaatttgttttactctataaaaaatggttggcttcccacgtttgcttttgcagtccatctattgcagaaagctttttaattaaaacgcatcaaagaagacctgactttatacggagaagtgataagggaggagtatgttaataacctttaaagataattgtggatttttttgatactactgtaaaacttaaaagtactcttacatcgaaattaattgggttggctgggcatggtggctcacacctgtaatcacagcactttggggggttgaggcgggtggatcacttgagctcaggagttcaagaccatcccaagtaacatggtgaaaccccatttctgcaaaagacacaaaaattatctgggcgtgatggtatctgcctatagttccagctacccttgaggctgaggcaggaggattgcttgaatctgggagtcagaggctgcatgagttgagatcacgccattgcaccccagcctgggcaacagagtgagactgacaaaaaaaaaaaaaaaaaaaaaa

SEQ ID NO: 59763 - DNA, 6206 bp, Homo Sapiens
ccccgttcccgattcctgtagtagcggctgtattgcagccgcctgccgaactgacccgggtctggggactggcccctctggcgccgttcggtttctcttattgccttcactgaggatgagtccctttgtggctctatgtggaccctgcggaatccaccggcgcagtttcatctagcgactggtcacccttgcaattatggatatttaaaagggtcagacagtgtggagggggagttcccctcctcactcccccttggtgcttgactccaggaataatttataaactgtggaatttttttaaatgaagaacttgtatttgatatgaactttatagagctatttataatttttttgatttaagtgccaaaaaattgtataaagatatatagttttatactattgtcaggaggatttaaattatcctaaaaaggtaatttattctctgtaacttcctcaatagcacctttgtgtcctggctttttcattttttaaaattagttttcacgattctgaagtaagtggtataaaaacagttaggatgagttcacccatgcctgactgcacatcaaagtgtcgatccctgaagcatgctttggatgtcctttctgtggtaacaaaggggagcgaaaaccagattaaggcctttctctccagtcattgttacaatgctgcaactatcaaggatgtttttggcaggaatgccctccaccttgtttcctcctgtggaaagaaaggagtgttagattggcttattcagaaaggagtggatctgttggtgaaagacaaagagtctggatggacagcattgcacagaagcattttttatggacatattgattgtgtttggtctctattgaagcatggtgttagtctgtatattcaagataaagaaggcttgtcagctttggatcttgtaatgaaggatagaccaactcatgtagtattcaagaatactgatcctacagatgtttatacttggggcgataatacaaattttaccctgggtcatggaagccagaatagcaaacatcatccagagttggtggatctgttctccaggagtgggatttatatcaagcaggtggtgctttgtaaatttcactccgtgtttctgtctcagaaagggcaggtttatacctgtggtcatggtcctggagggcgattaggacatggagatgaacagacatgcttggtccctcggcttgtggaaggactgaatggtcataattgttcccaagtggcagctgctaaggatcatactgttgtattaactgaagatggatgtgtttatacatttggtctaaacatttttcatcaattaggaattattccaccgccttccagttgtaatgtacccagacagatacaggcaaaatatctgaaaggaaggacaatcattggcgttgcagcaggcaggtttcatacagtcctatggactagagaagctgtttacactatgggactaaatggtggacaactgggttgtttgctagatcccaatggagaaaagtgtgtaactgctcctcgtcaggtctctgcccttcaccataaagacattgctctgtctttggttgctgcaagtgatggagctacagtctgtgttaccacaaggggagatatttacttacttgcagactatcagtgcaagaagatggcttctaaacagttgaacttgaaaaaagttcttgtgtctgggggtcatatggaatacaaggttgatcctgaacatttgaaagaaaatgggggtcaaaaaatttgcattcttgcaatggatggagctggaagggtgttttgctggagatcagtcaacagttctctgaagcagtgtcgatgggcctatccacgtcaggtcttcatttctgatattgctttaaatagaaatgaaattctatttgttacgcaagatggagaaggatttagagggagatggtttgaagagaaaagaaagagttctgaaaagaaagagattttatcaaaccttcacaattcctcatcagatgtgtcttatgtctctgatataaatagtgtgtatgaaagaattcgacttgagaaacttacctttgcacatagagctgttagtgtcagcacagatccaagtggatgcaactttgcaatcctgcagtcagatcctaaaacaagcctttatgaaattccagctgtgtcctcatcatccttttttgaagagtttggcaaactgttgagggaagcagatgaaatggacagcattcatgatgtgacatttcaagttggcaatagactcttccctgcacataaatatattttggcagtgcattctgatttttttcagaaattgtttctttcagatggtaatacttcagaatttacagatatttaccagaaagatgaagattctgcagggtgccatctctttgtggtagagaaggttcatcctgacatgtttgaataccttttacaatttatatacacagatacttgtgactttttaactcatggcttcaaaccaagaatacacttaaacaaaaacccagaagaatatcagggaactctgaattctcatttgaataaagtgaatttccatgaagatgataaccagaagtctgcatttgaagtttacaaaagtaatcaagctcaaacagttagtgagaggcagaagagcaaacctaaatcttgtaaaaaaggaaaaaatattagggaagatgatcctgtaagaatgttgcaaactgttgcaaagaaattcgacttcagtaatttgagtagtaggttagatggagtcagatttgaaaatgaaaaaattaatgttattgccaagaacactggtaataaactgaagctaagtcagaaaaaatgttcatttctgtgtgacgtgaccatgaaatcagtggatggaaaggaatttccttgtcataaatgtgttctttgtgctagacttgaatattttcatagtatgctgagtagctcatggattgaggcttccagttgtgcagctctggaaatgccaatacattctgatatattaaaagttattttggactacctctatactgatgaagctgtggtgataaaagaatctcaaaatgtagattttatttgtagtgttcttgtggtggctgatcaacttctcataacccggttgaaagagatttgtgaagtagcattaactgaaaaacttaccctgaagaatgctgctatgctactggaatttgcagcaatgtatagtgcaaaacagttgaaactgtcttgtttacagtttataggattgaatatggcagctttacttgaagcaaggtctcttgatgttttaagcgatggtgttttgaaggatctttctgagttttaccggaaaatgattccagcaatggatagaagagtcattacaccatatcaagatggaccagatattagctatttggaagtagaagatggagatatcttcttgaaagaagaaataaatatggaacaaaatcattcggaaactatgttcaagaaagcaaaaacaaaagctaaaaagaagccacgtaaacgttcagatagttctggaggttataacctttcagatattattcagagtccatcatctacaggattattaaagtctggtaagaccaattctgtggaatctcttccagaactgttgacatcagactctgaaggaagctatgcaggagtgggtagtcctagagatttacagtcccctgatttcacaacaggatttcattcagataagattgaggcgaaagtcaaaccgtatgttaatggtacatctcctgtgtattctagggaagatttaaaaccatgggaaaagtcaccaatacttaaaatatctgctccacagcctattcccagtaacagaattgatactaccagctctgccagttgggttgctggttctttcagtcctgtcagccctcctgttgtggatctcagaactatcatggaaatagaagaaagtagacaaaaatgtggagctacaccaaagtcacatttaggcaaaacagtttctcatggagttaaactttctcagaagcaacgaaaaatgattgcattgactaccaaggaaaacaattcaggaatgaatagcatggaaacagttttattcactccttcaaaagcccccaaaccagtgaatgcatgatggagtctcaccctgttgttcaggtttgagtgcggtggtgcgatcttggttcgctgcggcctccgcctcctaggttcgagcgattcttctgtctcggcctcctgaatagctgggattacagatgcctaccaccacacccggctaatttttgtatttttggtggaggcatggtttcgccgtgttggcggggctggtctcgaactcctgacctcgagtgatctgcctgcctcagcctcccaaagtgctggaattacaggtgtgagccactacactttttcttttctattgtccacatatatgccttttaattctactttctggaacatttgcctgactttttccaatcattaaaatctttatcaagagctttttttggtttgtttgttgatgatacctttttctatagtattgttttaatattctaatgttgaagatctctgtactctgtaggcattttcactctttagtatatacccaacagaaacacacacgtatgtaccacgcaacaagtataagaatgttcataatttattatctgtaatagcccaaactgaaaacaatctagatgtctatcagcagtcagtggataaattaatttatttttatagtagaatactacagagtaatgaaaaagaataaatcatgactaaatacaacagtgtggatgaatcttaccaatatgatattgaacaaaataaaccaatcaaccaaaaaaaagaaagctaaaaatagccattgatttacatccatgttttattcattctactctatatgtgttttattttatttcattttgtcaatttattgattgattgttttctcttaagttctgactggaagctctgtgtgcctatgttgtacaaatagactgataggtgtgactatagggtaacgtatcagattccttagggacccctgaatctccccatatgttggttatctccatatcttttctccttggtctctttagtctgtcagtttttctaaagagcagccttttaatttttttttgctgttaaggtgtacattttgttgctagcattctggaagcgtatctcagtgtagggaggttagagctgggactgaacttgtcaccatttgtaataggttttcacatttagtgtatagactttgtacacaacagttcactcccgccatcctctattactagtgactttgaatcaaattttccttctgccagagtaaaggagatgtagtcatatgaccatatggagatagggagtacatctggcactttcagcccctccttaaataaactgaaacaattttcatgctcatgtcgacttcaggatttgatacatactctgtctccagtatatgcccctttccagagttctcagcttccctctttactgtcacccacctgatgactgctagtatttctttttgtccactcggcgacatcagtttttatcattccatctcttttgctatccttcaaaaatgtgttgctgtttttagactgccattgtcttaatagcttattatttttgcccttgtgggtttatacctttctgattactttgctgtacactttaggatttcagaggaaggtattcaagtggtcatttatctgaaacttctgactaattttcaaacataggaaaaatttttccttggtaatagcaacatgagcttagagtgccacattgaagggactatctatccaaattttaagagtctattatggcatattaaggagaattctagaaagatgggaagaaagatgccataaattttgaccaaaaacataggttatttttctttgaaaagaatttgataattatctggctgggcatgatggctcatgcctgtaattcaggcgctttgggaggccagggcaggcggatcacctgaggtcgggggtttgagaccggcctggccaacgtggaggaaccccgtctctgctggaaatacaaaaattagctgagcatggtgttgcatgcctgtgatcccagctacttgggaggctgaggcaggagaatcgcttgggcctgggaggcggaggttgcggtgagttgaggtcgtgccaccgcactccggcctgggcaacagagcaaaaatccttctc

SEQ ID NO: 59764 - DNA, 535 bp, Homo Sapiens
tttttttttttttttttacttagtaaaacatacaaaaccactctctcatatttaagcagctagatggtagaatatgtcatcaactacatagtttaatcagcagaggccttcgacttgtagcccttaatgccaaattccatttcaaagtatttaaaatggcaagtatagccaatttagaaaacaatcacatggtactcacattggcactcaacccacttgaaggttctagactaaggtacacactaacatatatacaagctccatccacaatggacagagttctagaatctagaaattttcaaaaattcaatactacagaacaatgtttataattcaaagaggagaaaaaaatagggtgctaaaagtacctttgggaggtgaggaaggcaacagaacaaaggaaggcccacacactaacaacaagggtcagaagctgctggccaacccaaatctccccttttggggcagagagaaaagcagctgtatgactcttgaaaatctttacttgacctattttacacccttaagaaactcc

SEQ ID NO: 59765 - DNA, 4940 bp, Homo Sapiens
cgcccaagtccctctactcgcgagaatctgtctatgatcttctcccaaaggagttacagttacctccatctagagaaacatctgtagcatcaatgagtcagacaagcggtggtgaggcagcgctcgcctcctccagctgttgttgctgctggattgcctctgaacagggagtgtctgcattaaaaatgacctgtagttctctgcttcatagatgcttctgctcagctccctcctcttcctccatgggcggtgcttgcagctcctttaccacctcttccagccctaccatttattctacctcagtcaccgacagcaaggctatgcaagtggagagctgctcctcagccgtgggggtaagtaacagaggggtaagtgaaaagcagttaaccagtaacacagttcagcagcatccatcaacaccgaagaggcacacagtcttgtacatctcaccaccacctgaggacttgctggataacagtcggatgtcctgccaggatgaggggtgtggattggaatctgagcagagctgcagtatgtggatggaggattccccctccaacttcagtaacatgagcaccagttcctacaatgataacactgaggtacctcgtaaatcacgaaaacgaaatccaaagcagaggccgggggtcaaacgacgagattgtgaagaatctaatatggatatatttgatgccgacagtgccaaagcacctcactatgtgctttctcagcttaccacggacaacaaaggcaactcaaaagcgggaaatggaacattggaaaaccaaaaaggaactggagtaaagaagagccctatgttgtgtggacaatatcctgttaaaagtgagggaaaggagctgaagatagttatgtacaaccgagacacagcacgagctcggtacctgactgagggcagccgtggctcagtgaaagatagaacacagcaaggctttcctacagtaaagctggaaggccataatgaacctgtagtgttgcaagtgtttgtgggcaacgactctggacgagtgaaaccacatggattttatcaggcctgcagagtaactggacgaaatacaactccttgcaaagaagtggacattgaaggcactactgttatagaagtcggccttgatcctagcaacaacatgacactggcggtggactgcgtagggatattgaaattgaggaatgctgatgtcgaagccagaataggaattgctggttccaagaagaaaagcactcgtgccagattggtttttcgagttaatatcatgaggaaagatggctccactttgacactgcaaacaccctcttctccaattttgtgtactcagccagcaggagtgccagaaatcttaaagaaaagcttgcatagctgttcagtgaaaggagaagaagaagtgtttttaatcggcaagaactttctgaaaggaactaaagttattttccaagaaaatgtttctgatgaaaactcttggaagtcagaagctgaaattgatatggaactatttcatcagaatcatcttattgtgaaggttcctccctatcatgaccaacatataactttgcctgtgtcagtgggaatatatgtagtgacaaatgctggaagatctcatgatgttcaaccattcacttacactccagacccagcagcagctggtgctttgaatgtaaatgtgaagaaggaaatatctagtccagcaagaccttgctcttttgaagaggccatgaaagcaatgaaaactactggatgtaatttagataaggtaaatattatccctaatgccctgatgactccactcataccaagcagtatgattaagagtgaagatgttactccaatggaggtaacagcagaaaaaagatcttccactatttttaagactacaaagtctgttggatcaactcagcaaacattagaaaacatctcaaacatagcaggaaatggctctttttcatcaccatcatcttcccacctaccttctgaaaatgaaaaacagcagcagattcacgccaaggcatacaacccagagaccctgacaactattcaaacccaggacatctcacagcctggtacttttccagcagtttctgcttctagtcagctgcccaacagcgatgcactattgcagcaggctacacagtttcagacaagagaaactcagtctagagagatattacagtcagatggtacagtggttaatttgtcacaactgactgaggcatcacaacaacagcagcagtcaccactacaagaacaagcacagactttacagcagcagatttcatcaaatatttttccatcaccaaatagtgtgagtcagcttcagaatactattcagcagctgcaagcagggagtttcacaggcagtactgctagtggcagcagtggaagtgttgacttggtccaacaagttttagaggcacagcagcagttatcttcagttttattttctgctccagatggtaatgagaatgttcaagagcagcttagtgcagatatttttcaacaagtcagtcaaattcagagtggtgtaagccctggaatgttttcctcaacagagccaacagtccataccagaccagataatttattacctggaagagctgaaagtgttcatccacagtctgaaaacacgttatctaatcaacagcagcagcagcagcagcaacagcaagtgatggaatcttcagccgcaatggtgatggagatgcaacagagtatctgccaggcagctgcccagattcagtcagagttattcccttcaactgcttcagcaaatggaaaccttcagcaatcgccagtttaccagcagacttctcacatgatgagtgcattgtctaccaatgaggatatgcaaatgcagtgtgaattgttttcttctcctcctgcagtttctggaaatgaaacttctacaactaccacacagcaggttgcaacccctggcactaccatgtttcagacatcaagttcaggagatggagaagaaactggaacacaagcaaaacagattcagaacagtgtctttcagaccatggtccaaatgcaacatagtggggacaatcaacctcaagttaaccttttttcatccacaaaaagtatgatgagtgttcagaatagtggtacccaacaacaaggtaatggtttattccagcaagggaatgagatgatgtcacttcaatctggaaattttttgcagcagtcttctcattcacaggcccaactttttcatcctcaaaatcctattgccgatgctcagaacctttcccaggaaactcaaggttctctctttcatagtccaaatcctattgtccacagtcagacttctacaacctcctctgaacaaatgcagcctccaatgtttcactctcaaagtaccattgctgtgttacagggctcttcagttcctcaagaccagcagtcaaccaacatatttctttcccagagtcccatgaataatcttcagactaacacagtagcccaagaagcattttttgcagcaccgaactcaatttctccacttcagtcaacatcaaacagtgaacaacaagctgctttccaacagcaagctccaatatcacacatccagactcctatgctttcccaagaacaggcacaacccccgcagcagggtttatttcagcctcaggtggccctgggctcccttccacctaatccaatgcctcaaagccaacaaggaaccatgttccagtcacagcactcaatagttgccatgcagagtaactctccatcccaggaacagcagcagcagcagcaacagcagcagcaacagcagcagcaacaacaacagagcattttattcagtaatcagaataccatggctacaatggcgtctccaaagcaaccaccaccaaacatgatattcaacccaaatcaaaatccaatggctaatcaggagcaacagaaccagtcaatttttcaccaacaaagtaacatggccccaatgaatcaagagcaacagcccatgcaatttcagagtcagtccacagtttcctcacttcagaacccaggtcctacccagtcggaatcatcacagacccccttgttccatagctctcctcagattcagttggtacaagggtcacctagttctcaagagcagcaagtaactctcttcttatctccagcatccatgtctgccttgcagaccagtataaatcaacaagatatgcaacagtctcctctttattcccctcagaacaacatgcctggaattcaaggagccacatcttcgcctcaaccacaggctactttatttcacaacacagcaggaggcacaatgaaccaactgcagaattctcctggctcatctcagcagacatcaggaatgttcttatttggcattcaaaataactgtagtcagcttttaacctctggaccagctacattgcctgatcagttgatggccataagtcagccaggccaaccacaaaacgagggccagccacctgtgacaacacttctttctcagcaaatgccagagaattctccactggcatcctctataaacaccaaccagaacatcgaaaagattgatttgcttgtttcattgcaaaaccaagggaacaacttgactggctccttttaactggatatgtaagtattgcattttggcttcttattgaaaagcatcagattttattcttcttaacagatttaggttaagtaatagtagttctaatcttttaaaatgtggctttctcacaagatgatacttttttactctgaataaaattattctgaatgatagcttatggtcatatagttaatacagaccaggccgggcgtggtggctcatgcctgtaatcccagcactttgagagaccaaggtgggcggatcacgaggtcaggcgatcgagaccatcctggctaacatggtgaaaccccgtctctacaaaaaaaaaaaaaaaaaaaaaaa

SEQ ID NO: 59766 - DNA, 142599 bp, Homo Sapiens
gatctctttagttactagccttggatcagcccagaccccagcttgccatctcttctttcatgctctagccttcttcccatactagctcctgtcaaagttgctccttggattcccacttagcatttatctcaaaaggtcaagcacaaagccgcttgctctccatgtatttgatgcaacaaccatgtgctgagaacttgctttctgcaggatggggatttgatgagccgatgattgatgattttctaaaggaaataagcaaaggagaacaactggcctgcttttctcaaggctgtgtgcgaagaatgttgccatataatgtgctcatttgtaaaagcagtaaactgagtcacagaataaagaatgattttatttttacacttccttgagaatcgataccaaagacagaaatgtcacataaaattttcaaatcctgcaccatactggaacaactaccttgagattgcactacctttacaagctgagcacatcaatgcctgagaatcattcattgtgtgtctgagagaataaataactgtacttttgcaactgaatattgattcttcagcattctgtcatgttagacacaccatttcagttgaataaagcaattttttttttcagtattgcaaggagaaaaaataatagctgtaggacagaatttcatgcctcctaatatatcggttgcataaatgggagtttcagttttaaatttaccagtaaccatgtctctcttacttttgttactctccccagtaatatccatgcatttaggatttaaagtgggggagaaggagaatcacagatcaagggaaaactgagtttttcttttccaggctgaaggaaaccagaaattaataattatataatggattttgtaattgtcctttttctcataaggactgacacctcagccgccttgtccatggggcagtagaccagtttaccaacatcttctgtttgtaagacaaaacaaaaactctgtagaacctcattcaccttacttaaagtattcatttactgggagctttatattaatatattccatgctaggaagttgagcaattcaaggggtaacagaactttttcaggcttcaaaaagacgacttcccattttggagcttcaagatcatagctgtggaaaggtcccaaagaaaagtcacctgctcttctgttcaatagagaaacagtgcagtccttagaggcaacaggagaatggccgctctatgaaactactacacgtgtgtatatatatatatgaatacaaaaatatctgttgattttatttcatataataaactactctatttttatgtgtggtctttgatcaaaaattccagttcccatccttgtttagtttggctgcactcactggaattctatggcagaatcctgtacagatgaaaattcatataatctttatcctagtttacagagacttcagaaagtgagattactgaatatctgtttcagaaagttctttccctatttttttctttgcaggagttcttcctcaataattttatctttttgttcatttgctttaaaaactatgtatacgcgaggattttgattaagtagtttctctaccaactttccaggctgcaataattgtcgttgtcttacactttgttcaaagatcttatatgcaaaatgtaaatatctgaaaggctttccttttacttatttatgaaataaattcgttgagtctgtgttggtcaaggcccacactggtgccgtggagaatgcttgcagtggacatatacgtggagctgcgcagggcattcctctgtgcttgtttcagcttggctctggctctcttcccttaggtttgcttaatcatcacgctgttagcaaagtagacaaagaagtaatggcagaagggctacctctgtctctttctttgctcttttttttgggggatgggggcaggtgggaagcagggaaacttttcccggaagtcctccagagttttcttgtattttatcattgaccaggattttgttctaataccattgcaaaaacaatcacaaataaaaagatgggattacaatgtttggtttagactaacagatttagatggagtagatgttaggaaatcaaccacagtagctacaataggcatgcaaagaaatcataaagtgcaagatagaaagtgataaactgtaaaaaaagacacaactaaagtgctttgggtattaaacctggagaaattatttccaactaaggattaagaaataactgacttgtgaattgaagcctggatttaggcacaaaaagatgaaaaagggtacttgaatttgccaatcaagaaatgataataagaaaaaatgaggcatctatcaggatacaaatcacattaggctgaaataaaatgtataggaagatgtatcagttagctcttgctgtgataacaaataactcccacatctcagaggcttgtaaccacatccatttatatcttgctctcagatctacttcttgtctgcagctctgcctgaccctgttccaagtgtcttttcactcctggacccaggctgaaggaacagcccctatctgccatatacttctcttgtggcagacagtagaaaccaaacctatggcgaagtttctaggggcgcagtgatcggaggtattccctgtgagatgaagccaaatttgtgatatcttgcaccttctaccaccaagaaagaggcataacagctggtgagtttttgagctctggaggcagtggatgtcatagttaggtgtgctgttctcgtctatgttccaagttatctttgacccacacaattttgcaaagagttaagaacaagagaaagatctgcagcctgggcatggtgactcatgcctgtaatcccagcacactgggatgctgaggaaggcagatcacttggggtcaggggtttgagaccagcctggccaacatggtgataccccatctctactaaaaatacaaaaattagccgggcatgttgtcactcacctgcaatcccagctactcgggaagctgagggagaattgctttaacccagggggtggaggttgccctgaaactagatcatgccactgcactccagcctagatgacagagcaagactccataaaaaaaaaaaaaagaaagaaagaaatctgcagagcagatccaagctagtacttaagctgctctacaacttgagaacttaggtctaccagatcagatggtggatggcgtgtctgagatggcctctggagtctccagaagcctcaaaaggagaagcactatgcaggcctttagactttggagagctatgccctcttctgccattaactcttctcactgggagaaacagcctatgtctccccagacttagagctcatctttgtatgggcggttcctagagagatgcccagagagttataggtgttcagctaatggtggttagatgtatgagcctatggagtgagtggcagagaggcttctgcttggctttgagaggctttgatccaggcttctttatctgtatgttcgtgctggttacaggcagtcccatggcccacagtccaccactgcaaacaaaggaaagactttctaggaatgatcatcgcacaggtcatgccttttcagtcattaagcctcttccacaggtagcaggaagctgggagggtgtggctgtgaccaaggaagaacctggcagatcgaatttaaatccaagatgccggcccttggatcggcctgacccaaattcactgtggctctgttattctgactaattttccctggagtgtaggctaatctgtgaaaagagaaaacatacacttgcctatcatgggaaacaggtgtttgcactgtgaatcgctccacaccatcacaccgaggcacgttctcaaaagggggcggatgtgatgttttttgacatctgataatgttgaggatatgaccagacttgctccctttcagctgagaaacaatcccctctcctctgtggcaagtaggaggatgacagccaactttcatcttccctgacaagataactcagacattttcctcagggaaaggcgattgatcattgggttcggctggagaataatgtggagtgaatgaaagcactcacagaactccgttctttatagctgcctcctttgaaaacatgcgagaactcacagaatagtcttcattagatgaggagcccacttgggatttttacttctaaaggctcttgagtactaagggctgtgacaagaggccatttctgctccacaatgtagaccaaaaaagctctcctcagccccccaaataccgcccctaccctaactactctggtcaacatggatctctctcctctgtgaactcctcaaagctctttttgcctgaaacttactgcagaacattcattatagatatcatatgagatcatgtgctgtcttcttatatttcatgtcatttctggtagatttaaaacttctcaagcacaggggacctatcacatacttttttagtcatctctatggggcccagcgcaaagcagagtatgtaaatggtgctcaataagtaatctgattgatacagtcacaagcacaaggagtaaaaagaatgtgtgagacattaatcatattatgtcaatttccttttaggcaacttcataaaaagccattaccaatttacaattgagcataataataataattattattattatttgtaacctagataacaagcaatgctccaaggcccatgacatgaacactttcctgccaagctgaagctggtccctttgcttggggtttttaacaataggatggaaacatcatcaccttcttaaacctaacgaaagtacatctacacaagaacttctgtgtactgttctgttatcataccttaaaatgataactgagagtttagagacctgcaggaagcatttcaaagagtcaagtgattggatgaattattttggggccattaattgacatattaaaattccttacttagactactgcaaggctggtaagagattaaaaaattataaaatcatgaagataaaaatagagtgaccacagaattaccaaagaagtactataattctaccacctaaagacactcagtggccgggcgcggtggctcacgcctgtattcccagcacttttgggaggccgaggcgggtgggtcacctgaggtcgggagtttgagaccagcatgaccaacatggagaaaccccgtctttactaaaaatacaaaaaaattagctgtgcatggtggcacatgcctgcaatcccagctactcgggaggctgaggcaggagaatcgcttgaacccgggaggcagaggttgcggtgagcagaggtcatgccattgcagtccagcctgggcaacaagagtgaaactccgtctcaaaaaaaaaaaaaaaaaaaaagacacttggcaaacaataggcttggagacccccttatttaatggtcaaatgactaaatatataaacagatcttgaaaggattggaatcaattaatggtgcatagagccatagtatattattaaggaaatcaggaatacttggagtgcttgtatgaagggcgtattaccatacttctcagacacatcatactgagggaataagggtattggacttctttattattatatgtcttcaattcttatcctcagtctgaaattattttctcttttttttctgaattcttacagaattttatctgtgccaacaatataatctgtatattttcttcattgtattagcaatacatgtcatgtattctactagatttagaggtctttgatgacagaaataatgataagtatgatgatgataataataagagccaatatttattatactcttactgtgtgccatactttttggaatttattgattcagtctcatttaatcacattgcattgatctttgcatgtcttttaggtctactcacacttggaataaaattatctgtgaaatcaacaaatggtaagcaagctcgatggtttgttttcccatcaggtaacctggaaacacgggcagatctgattgaaatgcagattcctcactggttttttcctccctttataatttttcagaagcctcttttaccaggcagggaggggcaaatcttctgagggcatatttccctcccaggccctagtgcattggtatctacctagtaggttcgtagcaaatgcctcttgacttatatactccacagcactaattgtgaaaaggaggtagcattgtcattagcacaaatgataatagcttggggacacagttgcaggttatatacagtgagatgctaccattgcagatttacaatgaaatcaatatacagtgtcccatgaagataatgaggtagaaaatgcatatataattcacatgttccaaataagctctgtaatgagtttgagaggtccctgcgtatttctaatttgtctacatctgttgaaggtgggtgggttctaaaatgtgggcttgaaatctctgaacaccatgaaaatagtaaaaaagaaactgtgagtgttattccaaagctctaaaaggcttaaaaataaatcctaaacatcctcaagaaactcccactcttagggaaattattaacttgtgagtaatgtgaagacattctcagcagattcccagtcacatatcctgccatctacattgtttactctttagagtgagcccttcttatatttctcatggacttccaaatacatagaatggcccaaatagaaagaactgctcttcctgctcctttttttataccagccctcatccctcccagctccagcttggcattttcctgggagtgcagtcttctgagggaacttgccttgggccaatggaggctgggaggaaagagacgaaaaggatagaggtaagagaaccatgccaaccagtctttgagctcctcattaccgtgagaaattctaaaatgacctggctttgtagccatctacagaatttcctttaaagagaaagttggaccttgtagagtttcctccttttctgattaggaggggactcttagatcctggctctgagagtttgcgaaagtttcttttcagcggtgggtggtaagtcaagatggctgaattcccgagctttctggttatatgtgaaagttctcagcctctacccaagcctttttctctgccaagtggtgcgataaaacttgtgagaacaggttttccttgtgaggtagctgatgcatctgcatccatttctggcagaaaaccaaagcaaaaagggatttagagaaacattacagaacatcataggggcttcatatgcatttgcttcagaagtttcatgattattcaagggaatgtgttttttgtttgacctttaccctagccatctctcatagctctcacactaactctaaccctgcataaccatccaagacccagggaagccactttcatttggatgaattataagctttttgccaattcaacatgatcagcgtgtggcccagttggtctttttcaacaatgagcttccacaataatagggccttcggtctcaaaggccttttccatgagttatcacttttaatcttaggagagaatcactccatctgtctctaaaattcattcattccaacatctcagttaaagcaaatttttctatattccatcctttgtctttaataagaaacagaatcgaaagagaaataggtatccttggctttccttcagaactgaagagggaacacagctagctcttgcactctccaggggcctctcaaccagcctctgatggcagcaccataatcagtttaacctttgctcacccttccactccccaagacagcagccatggagactgtcagtcaccgagaagctgggctcccccaccttcctcttctcagttctgctgggaaaagcccataggataccagctgcccaatacatgcttggtggacaatccaagcaagcacttatttccccttagaaagcttcaagatcaccaaccaatgtagagttataaagtgctttactgattatctcattgaactcttaatactgtgaggcaaatgtctttgtcattttgtagagaaaaaaaatcagaattttagtgagattaagtaacttgtacaaagtcaagttacttggattgaacccatgtcttttggctcatttacaattggagtacatttacaatatccttgctattcaaagtgtgctcaatggatcgtcagcattacctgtgatccttgggcgctcctcagacctactgaatctgcattttaatcagatcccaagtgatttgtgtgcacactaaagtgtgagaaatactgttgtacagtgtaactatctccagccagagggaagttcagttgaggccccaaacgcagagtgacctaataatgagatggatgtgtccctggtgggaacatcaaggcaagctctaattttgtattattcatctgcagttagtttcaagatttaaatctccccaactcttccaagttgagtgaaacaaaatctcaatctctatggcagacggatatctgggtatctgtccaatatttcctgagggggaacggggcattgttttcgtgttaatctttttgaagctccctaataaacacaggctcatcacttctgttaattcgggagtcctggctgatgtgtcttttaagaaagcccatttagcttgaatactcttggagatattcaaagataagacatattgattttttgcttgaacaaaagctgcttttgattctcaagataattggtagttgtaggggatatggaagggctggagaggagacagctgtaaagtccccaaggggaacaggaaagaaagctgcctccgacttcattctgctgttctttgcacatcctctactagtgagggctgcataggccattcagtgcctgtctttaagatgtcattatttagataaaaatatgtctggattcttttcaccttctgtctttcccaactttccatagcagttgtcaggaaaccaaatggcacaatttcaaacactgggaaagtccagttatccagaatgcacccacaccctgccactccatgccaagaagtccattaagatcatgtttctgctcaaggaatactcactgatactctggaaaactcaggcggttaagagccacaggtcctattgcacataggtgacacttttgtgaaaaaattttggccccccaagcttaagctgtttaacttgggcattggaactctgaaatccagactcttcatgacaaaataactctgagggggagctgtttcttcctcctattgggagtgccctggacctaagtgaaatgtggcccagtgcacaggtgtgattcttctcttctgttctgggtaccacacgtgggactcacaagcatgattcagcccacttggataactctgttaatagaagtatgtgattatttttcacatcatctttcttatatagtagatgtttaatttgattggttgtacataagtatgtattacttcacctttttctgttcttgaacaaaaatagtacctctaaccacagtctttctagaatctagtccaacttggcctctttaagaatctaaatctaatgaatccattccactattcataactcattctaccacttggattctccattctaaatctctgggtcttccattgacaccttctagtccaaatctatgctgatagaaagatggattctctccaaatgtctactatgtgcttgctactcctgggcaagttgggaccatcaaggctgatcattcaatctaagtagaaagcttgtattagagactccattcaaggaaccaaatctcaagattgtcacaaatctgtgcaacatgtaagccctatgcagaaatctggagacatttagcatttccctatattggaagaaatgcttaccataagatacaaaagtaagtaatttttttattttaaaaaatgaatataatttgtattatgccaaaagacaaatcatatggttgtcccttactccagtaaaatctctagactgttacagaatgcccagctctgtttctgcaagagtaataagagttctccttgggttgaatggtcacgcttggtggtcccaactcacccaagagcagcaagcacatattaggcattcagcaattatttgttgaatggataatgacatgattggaaaagaagtgatagatagattaactggatttcccaaggcccctcttctgcccccactcccacctgaaacacaaatacctaccatttgagttgctttcacttacccaagagactatcagctgctccagattttggggagttttagaccaaaagcttagtaaatatttcctaaatcaaaaccacacaggcagagttcattcagtctactaattgagaactattgctttccatagtgagacacgcagcagttttaagaaagaaataggccttgagaggaaaatatttgtaaagggaacaaaagcaaatgctgttgtgtttgccaatgacatcttggagaaccggtgggtattaaaagagggaaaacaaagaggcctgatattattatatgcctttctttcaagtacacacatacatacaccaaactcagcccagccctttttagggggaatgtttctggcagaaataattactctatacttagtgctgctggagttgtggccccacggcgaaacaggaggtacaaggaaatgaggtggagctgctggggaaaacgaatgggcaatgagcaatttacaaagggctcggtttggtctacttggagagaggagtgtatattttagaatatcacatgtaattaacaccggaagaggggaatgaaatggttcacaccagtgattccagggagcttttgtatgaaacagacgaaggggaaaaaacctgattaggcactggctttaagtacagtttccttgtatttcctttttcctctttaccatataataacatagcttaaaattagttctgacagctaatcagaatgagtggctctttcttttcctggagtggttaacaagtactgtgcattgtgccaacactgcacactgctcaatggatataagaagagaagaacgaattagttacttggtggcatgcagctctgcatctctcttcagttgaatcagagggatcctgtggtaccagggtctgtgatgtgtccgagggcagtgtgggaatgttgtcatccagcactgctacatgggcgactcctcctccctgctggcccgaatgcttacctcccagccggctccaatgcctcccactcacagttacttcggcttctgatggtgcactggaaatctgtactgtaaagatggagtgttgaactaaatttaggctgttgaatgataaagcaggaagtagctcaagacagaaatacaaaatcaaatcaaactcactcttcaagagaagaagctgggacccaggaggatgtctcagaacaggacaaatatttgcatgtgatcggcagaggtgaggcatggtcatccaggtgagcgggcaggggctcccctccacaaggagtctcctttacttggttgaagagagtttgttagtcttacggagttgcttttctagtttgtaatgcaaaaggatgatcattgctaaacaaggatgtgatagaatggagtggagttaaagagctctaaggcttcccaaatgaaaactgtacaaaggcacacaatgattgccccaccaactaaaaataatagcagcagcaaaagtggcccaaaggtgggatctgggccaagcacagcccacagaattccaaagtcagccctagagttgcatcatgtttaaaatcccaagtatctctgagactgtggctcccaacatgtcccctctgaggaagggacccaggggaagggttctgggcttaacaggaaaacatggcaagctgaggcctggaatgtgagtgggcagagcctcctaagtggagaggagccatgtccaagccaacaagctgggcagcctgattatgccccagtaggctcttggctggcctccaggaagttctcccttttacgtcagctgttgagggaggagtaggcactcccattctcaaggccagttccagaggcaagtgagcccttgaaattggaatgagacttctttagtgcagacagacgtcctagcatttcagaactgtgttttattgcatccatgcaagatggtcaaagaggaaaaagaaacctttaaaattgctttaaaaatgcacaggctatattttggctagatggatacttgtcctgctttttatttgttgcaataaaatacacacaacataaaacatattttagtcattttaggatatgcagttcagtggcatcaagttaacccataatattcataagcatcactgtcaactagttccaggacactttcattaacgtaaaagagaacttgttatccattagcagtcactctccattcccacgtcccccccagcccctggcaaccatgaatctactttctgtctctatggatttgcctgttttggatatttcatttaagtggaatcatacagtatgtagccctttgtgtctgacttctttcacttagcataatgtttctaagattcacagaaaatgcagcatgtatcagtatttcattcctttaatggttgaataatatttctttttaagtagataactcattttgtatatccattcatcagtaaatggacatttgagttgtttatgccttttggaagttgtgaatagtgttgttgtaaatattcatgtaaagatttttgtttgattgtcttttttcagttattttgagtatatacctaggagtggaattgctgggttatatgataattctgtgtttaacttattaatgaactcccaaactgttttccacagaggctgtaccgttgtacacactcaccagtggtacatgaggattccaatttccccaaatccttgccaacatggtgttttctgcattcttaattatcattgccatcctagtgagtatgaagtggtgtccattctgggtttgatttgcattcccctaatgactcaggatgctgagcatcttttcacgtgctttttggctatttgtatatcttctttggagaaatgacttttcacgtcctttgcccattcttaaattggatttgttgttgttgttgttgttgttgttgtcagaggttttttgtttgtttgttttgttttgtgtgtgtgtgtgtgtgtgtgtgtgtgtgtgtgtgtgtgtggcttttttttttttttgacggagtctcgctctgttgccaggctggagtgcagtggcgccatctcagctcactgcaacctccgcctcctgggttcaagcgcttcttctgcctcagcctcccaaggagatgggactacaggcatgcaccaccacgcccagctaatttttgtatttttagtagagatggggtttcaccattttggccaggatggtcttgatgtcttgatctcgtgatccgcccacctcggcctcccaaagtgctgggattacaggtgtgggccacctcacccggccgagttctttttgtatattctggatactggaaccttaccagacatgagatttataaatatcctctctcattctgtaggttatgtatttactgtcttgattgtcctgtttttaaagagaacatactaaacaaagcacttaggtgccattgggaaaagaataccaaacaggatagtaacaggcataaaagttttgagctaagggaagtctcctcactgtcatttgttttctctcctggctatcaatagacagctcatatccaaagcttccttgaactaaccatagtgtgttgggtcgttcttgcactgctataaagaaatacctgaggctgggtaatttataaagaaacgatgtttaattggcttatggttctgcaggctacacaagaatgatgctgacgtcacctggcttcggggaggcctctggaagcttacaatcatggtggaaggagaagtgcaagcaggccaaaggagaggcaagagaaggaaactgccacacacgtttaaatgaccagatctcacaagaactcagttacgattgcgaggcagtaccaaggggagggcgctaagccattcatgagaaatccacccccatgatccagtcacctcccaccaggccccacagccaatattgcgcatcacatttcaacatgagatttaggcagggacacacatccaaactatgtcatatagcaacaatacattgtgtgaagactctatgtgccagccacggctcataggtatggggatttagtaacacatgccttatgtgtatttgtctcctgttcttgaagataccttgcaatgtaagggttattatttctattgtatagatgaggaaactgagaagcagatatgttaatgagtggacaaagacctcactgctcacaagtggcagagtcaggacccaaactcaggtctgtctgacttgaaagccagaacttatcctactcactcaccagtttggtacattttgctctggggtccttagggcctccatgagtccatttggggcctttctggccatagagaggaggaccaacagagggtttgggtctctggggccagcacacactttaattagggcaaccctgcttcgatctcttttctaatctgtgacttttgaatatgattgtgtttgggcaggaaaaaaaagagaggtttctggtgctttaaaacatgtttgaaatccactgcgaaatcatgttacttcatggaagaaaatcccaaagctctcgcagcctcttgtaaaatagaggtttcattaaaggatggctttttctaagccttatagatagaaacgtggtattgcatttgtacacacttgcagtcacacatgtgcacaaatacacacacacacaacctccctccactccccaattcctgcgcagtccaattccctactccagacagaggatgccagctccaggggaagttgcctctgaacgcccactcaccagaaaaaaaaggtggctcttgccagcaattgcacccacacttcccagcagtcctggctgttgccattcattggtcaggtatgatgctgcctgctcacctttgacagccttcccagcagccaaccagcccagagagtctccaaaccagagccaccattcttgcgaagtgagttcccacccacccgagagggagatccttagctcctcatcatcgccagtcatgatgatgagatactctggaagacatccattctgtggaaaccccacaaggtgaggccacgtctaaatagcttacaggtgagtgtccttcctccctgcctgaccactggcttggatggagaggcggttgcatggccaggtgagggggccgcggggctgtgcactcccacatcacatttctgattttccagacagcatgtctcagcagggtgctgatctgggcctggaaatccccgtccagagtgttgatctctgtcttgagctctttgcatttcccttgttaggagattagggctgtccgacaagttcgtcggaggttattgcaggcgtctgaggtgccagtgtgggagggtgaacagttgccgagagggtgaggggctttgaagtgggtgggcaggaaggtggatttgtgaagtttctcagaactgcaacttggttttctgaaaatttatcctgtgcgccaataaattgttgccagatgtctgctccaatacagttctagcgtgagatcacatgaagacatttaatgccattaactgctttggtcagaaatgaggaaggggtgctggggaggcttcctgcccactaggtaaattgggatccaagagcagaaagccttttttttcttccattcctagttttctatagcttaaacacatataggacattttatttcattttgctctcaaacattacccaactcaccgtggcgatttattaacaaactcctaaggtagacagtgattcctggacccttaggccctgacaatgacaaaaggggctcacaacctgcagaaagaaactgccgaacaggcaggtgccagcaagttgtgttttccaaatcattggcaggtgcttctcatctcttaacccctgccagtggcttgcctgtgaaccactccttctctaatgtagcctaaactttcccaagtttccaaccactgaagtcactggtagattcaccacccaatatggggctcctgctactgcaggccactggtaagatacagatagcattgcagactcagaggctgagggatctccctctgaagacctagataatgcaaatccaatgagacgcagatgagagcaagccgggctttgtcctgccctgtgctgccttggtgcacacacccacgcctggctacgcccgactcacctatccagatgagcagcggcagccccaggcagaggtcatttgcaatcttccacagctgtggaacattgaatgccatgaagtttagaaaacgcccctttctctctctcacctattttcctttagaagcctaggggtccaattgtaattgagttttttctttacaatcagggagttttttctttacaatctttaccctgatacagaataaaacgaagggttttagcacagcccagcctgcatggtttcccagcatctcaggtatttacacatgtggtggtgcctagtcttttggtggcgtgatccagcagggagtcatggaggaggggagaggacacctcccccgcccccatatccccacactattggctgctccccctgccactcagcaaagcctgacaaccctctgctaccctcgccacagctcctcttcacttgccagggatgaaatcagcccacaggcacctagtgtgaacccaaacgtatctgagacagatctcaatccgttcagaaagtttattttgccaagtttaaggatgcacccttgacacagcctcaggaggtcctgacatgttcccaaggtagtcagggcacccacgcctggttttatacattttggggagacatgaaacatcaatcaatatgtgtaaggtgtacatcggtttggtccggaagggcgggacaagttgaagcaggggagggggcttccagggcataggtagctaaaagacaaatggttgcattcttttgagtctctgattagcctttcactgaatacacaatttacctgtgagaggagaagagaggaataatcactatgccttagtttggaaacaacagggcaaaggaagccatcagatatgcatttgtctcacttgggcagagggatgactttgaggtccgtctgtcctttgtccacaaggaattttcttgttagcgaatcatgaagcagttatctcattgtagctatcttatttaggacgaagtgggaggaaggtcccagcttgacttccctttggcttactcattgtgggctcctgagatttattttcctttcacactgacaaacactgaaaaccatcccaagacacaagaaaggggaaaatgagttttcctgggggtacatggaagccccagaaggaaggagacagcagggcgaagtggcagagcggtccatgacagtaggtcaaggcactgaaagtaaaccatctatatcatgattttttggaatgtcctagctgttaggtcttcctattgaaccaaactgacaaatctcagggatcctgggctagaaatcccatggatttgatttagaatgatctccagaaaactgttccctgaggactaacaagatttcaaccggcagcaaataatagatttacacttgagggtatgcccttcacggaatcaggaagctagaactgccccccgctcacatcgtgtgagtctccctaaagctttgctgcagctctgaactttcgtaacacaggccgcaggcatcatttcacaatgatcacagagcacaattgtataccatgtgttagacatataaaatatggttagtgcaaacatgctcactaaattaactatggcttgccaaattaattcctgtaagcaaagagaaagaaattcaattttctaaccaattatgcttattgatttctcaaggttaggcctcaaagaaaaatgcagaaagggtaaaaattgccataggactttatgaagaaactgtatttgaaatatgattttatttctacttcagcaataactgtcattcactttatctatcagtagatctggggtctcacttttaggagaaggtgtattgtgtgttcacactgggatacagacagatctgggtatgtttaggatctgaggaataggcttacagatttggggtcttaagagctttttagtaaataaattatccaactcctccccacaacccaaattaagtaactcatctgtagcaagtagcaaaatgtacacctggaagtctgtcttgtgatccctacattctttcggtgccacagtaatatgtttaccttgtgatcataattcacacttgacctaaatctcattgtgaaccaggaaccaagatgtccattttaaaacattcttttttgagggggcacaaatggcacatttgttaacaagacacgaatttagaaataattctttggaggtgtaagattgaaaaggtgtaatttataaagtgtcatttaatttattaaaatatgtgcattcaaaacaaacttccactttgagagagacaaaaggaaaaccaattctgtttagcacctttggtagaaacccggcctcatgtttgcacacacccactcccgcacccacacaccctccttccattgccctatccctaccaattctgtgacaaaggtcaagcttttgagcatggtcaccatgtaataaagtctggactatttcacccaatgccaaggttgctttggcaaccaccattctcatgcctccaatatttcctggggtataagcacagcctgaccccagacggcctgtgtgggtggtgctgtgggggaggggtcttattacaaatggtgattattgtcccctccgcagacctattaaatcagaatctcttggggagggatcagaaatctcattttgtgttttttcttgttgttgttattgttgagacagagtcttgctctttcacccaggctggagtgctgtggtgttatctcagctcactgcagtttcaagctcctgggctcaagtgatcttacctcagccttctgagtagctgggactccaggtatgtaccaccatgctcggctaattttaaaaattaattttttttttttttttttgcaaagatgggatctcactatattgctcaggctggtcttaaactcccatcctcaagtgatcctcctgcctcggtctccaaagtgctgggattataggtgtgagccaccgcacctggctaagaatcctgtttttttttttaacaagttctctaagtaattcttctgcacaataatgtttggtaaccacttccagaagattgcaaataaattgatttgtaaaggaactggacccaaggccttgacttcaggctcatatttatctcagcaactgggctgtagtctctaccaccatcctccaacagcccaatgacaagaaaaagaaatgctcaaaaatgtgattaaatgggaagcaacagaataggtgaaagaaaaatccgagtaacaaatgctagactgctgaaagtggaatggtttttaactctcctcagtgactcaaagacatccaagccatcattacttgcagagccgttctggtttgggtaaccagtagtattgacatacatatatactttaatgtggatgctgacctaagtcaaatgaaccatgagaacagcaaaatgaagcaaaataaaaagtaacagtgggattcttcttcaaataaatatgccttattaatgtatggattgtcagtaattaccaataaatatataaatataggggacacagctcgaaattttttactgataagggtgcatagtcaaaagtattcaggactttgatagtggagatcgatttgaaaggtaaaaaagttaattacaatatggtgctaatatatggtcatacatgaccaatcttagaagatatctgtgttttaatagaaaatgaggcttagtctgaaggaatccatcttcggtggtgaattttgggctctctggttggcaggtagatgagctatgaggcagagaagcttttaccaggataattatatccagtaagaaacttctagtggttcttaaccacacccttggctgggatcaggaattcaagacagttatgatttttcagtggtcacccaatcacctttccttctccagtgggattcaaaatgcagtcaagtcagttactggtgggttctgcaggtagtgtgaggacaagtttattatagaatgcattactgtagtagaatgaatccatttcattatagaacgcacattttcatgtacatttaaaggacactattacatttaggttaccttccttccccaaaaagtttcagagaagtttattcctctttatattttgtgtaactttataaattacataaggaatagagcacatgacttgtattaatctaaaaatacatatacacacaggatagtgcaacacagcagaacatgtctgcgacattcactttcttaaccccccacagaagaactttctgagtaaatggaaataatgttgttctctagtgcatgaacattaaatccaacaaagtcgggttatttttccacactgatatgtgtgttttttggcattcatatatatatacacacatacatatatatgtatgtatgtatatgtatatatagtatatatgtatatatagcatatatatgtatatatagtatatatgtatatatagcatatatatgtatatatagtatatatgtatatatatgtgtgtgtgtatatatatgtgtgtgcgtgtgtgtgtgtgtgtgtgtgtgtgtgtgtgtgtattgtgcgagatccaagaacgctgtcttagggcctggattgggacccctttccagtaacaacctggtaatcgcccccactgcactcagcctgggcagcagagtgaaaacctgtctgaaaaaaaaaatgtatttgaatggacacttccacaaagatgatatatggatggcaaataaatacatgcgaaaaatatttttttcttttcttgagacagggtctcactctgtttttcaggctggagtgtagcagtgcaatctcagctcactgcagcctcgacctccgcagcttcagccatcctctcacctcagccttctgagtagctgggactacaggtgcataccaccatgcccagttaatttttaatttttttttgagagatggggtctcactatgttgcccaagctggtcttaaattcttgggctcaagtgatccacctggcttaacctcctaaagtgctaggattacaggcataagccactgcacccggctgctaaaatgttaaacatgattagtcattagggaaatgcaaattaaaaccaaagtgtaataccactacacatctattagaatagcttaaaaaaaaaacacaaaaaccaacaaacccaagttctggcaagaatgcaaagtgactggaatgctcatataatgtagtagccatacagaacaatacagtctctttgggaaacaatttggcagtctcaaataaatttaaacatttatcataaaacccagaaatcccactcctaggtatttacccaagagaaatgaaaatttatagctggggatgctggtgtgtacctgtagtcccaactactcaggaggctgaggtgggagaattgcttgagtccaggagttctggatcagcctgagcaacatagtgagaccagtccctgtccccaaaacaattttttaaaagagaaaatctatgtttatagcagctttgttcataaatgagaaaaattggaaaaaaacccagatgtacctaaatcagagcataactaatatgtggtacatccatcagtgaagtgttatttagcaataaaaaggaaatgactattgatgtatagagcatcatggacatgtatcaattgtcttatgctaaatgaaagaagctaaactcaaaaccttcatactttatgtttccatttatatattttgggaaagttaaaactatagggacagggacaggggaggtggctcatgcctgtaatccccacactttgggaggccaaggtgggaagctcacttgaggccaggagttggagatcatcctgggcaagatggtaacggtgagaccccaaatctacaaaaaagttttttttttgtttgtttgttttttggttttttaaattagctgggcatgttggcacaagcctgtagttccagctactcagttggccaaagcaggagaattgcttgagcccaggagtttgaggctgcagtgagctgtgatcgtacaactgaattccagcctggataagagagtgagaccccatctctaaaataaaaaaattcataataaaaaataaaaactatggggatagaaaacagatcagtagttgccagggacagggcctggggaaagtttggctataactgggcccagggaactgtggctgagggaactgttttacatcttatgagacagagttttgctcttgttgcccaggctggagtgcagtggtgctatcttggctcactgcagcatccgcctcccgggttcaggcaattctcctgcctcagactcccgagtagctgggattacaggtgcccaccaccactcccagctaattttttgtatttttttaatagagacggggttttgccatgtcagccaggcttgtcttgaactcctggcctcgggtaatccacccgcctcagcctcccaaagtgttgggattacaggcgtgagccaccttgcccggcacggctcggctttttactgagattttacatagactacttcacttgtaagggtcaaccctgtggtctcaccaattcaataatttttagaaaacatttatttgtactttgcttgggaaggaaagctcagttatttacctatctcttcatttccttttgaatctacagtgtagctgctacatgtctatttcatgcttccaaaaatgccaaatgtattttgaaaagggatccagtttagggtgatcaaatgtcttagtttgcccagaacagttccgcttttagtgctaaaactctcacattccaaggaacccctctatcctgggtaaaccgggatggttgaggtagccactagccccatggggctgtttaagtctccaaattttaaaatagaataaaattaaaactttagtttctctgttgcattagccacatttcaagggctccatgactacacgtgagcacctcatgggacaacggagagacagaaatttccatcattgcagacggttctgttggatagtgctgagctagagggtatttctggtaatcgcctagaactaacatcctttaaaacagtgccctggtcaagtgttaagcaatctcatgtgatgtggctggcacctcagtgaatgcacagagcgtactgggtcagcaaagccgcagtgaaaacttttgtcttttagagtttgcatatcctgatgcatcaggcttctgggactatgtcctcatcttcttagagcccaggaatttataaaccgttgttggcatttagtggaaattggggacatggcaggagaaatatttaacatgacagcaagaaaagataatttggctcttttaaactgggcatgaggcatgagggtcacactaattttgttcccatttatagattttttttccttgacatgcagcatagcagagaggatcaaattgagtcaaactgagttagagctaaaggagctcaggcacaaggaaaaccacctttggaatgaacagcttttaagtccatttcatccctcacccaaacaatgggctataaagttggatgggaactacaaagtggtcacagtcatagggagatgtttggcaacatctctcctcccccagggcaaaggcaaattagaaacagagacggagacaaactgcttgtctgtttaaagattcagtgctgaaggatgtaattgtgagcataggggtttatctgtttcataacatgttattgaagacctgcagaattctgtccttgctcttcagtcattcacagtctagtggggactctaacgtatttactaattttaaaaaatataagatttaatgtagccaatgacgatttatgaagatagcaatgataatgatgatggtgatagtgatggtggtgatgatgataataagtaacatttattgggcgctttccaggtgtcaagctctattctaagtgctttacatgaagaagtacaagacaatactctgggaatagagttgctagagggatcctcaagtgaaaatacagcattctatttttcaagatttctcagaaatgcagtatataaacaaagcaaaatccttttataagtcatttagagaaatagcacagtagagccatttcggcaataaattttatttttttaaatgacctttttattttggaataattttagatttatagaacagttgcaaagatagtacagagagtccccatatgataatggatttttgagtcagacagccatggccttaagtcccagttctgctgtttatccactgtgcgtccttggaccagttatttaaacactcatatcctcagatgtggcttccttgattataatatagcacaataacccttgctttagagggttgtaggaaacaaaaagtgagagaatgtgtgtaaagtgcgtgcacatacttaagccatattgacaggcctaataaacattagtacttatttttatttatatagatggtatatttgttattaaaaaataaaataatatgttacaataatttaaaatgggctgatgtttactaattacacacacacattccttctctctccaccaccctgcctcaaagagacaggtaatgataattcaccaacttgcgactttaggtcaactgcagtcgctcttttcaattcctaagaaattgcaggggccagtgggaaattctgagttgttacagtcttaatggaaagccccaggtcaagagtgaagacttttcttcagtttaaaagctaatgttggccttaagacaactgtgaaatatgtttggaaattgttctcaccaaatgttttctggaaagaattccggctgctagcaattgaaagcctagtgatagatttagcacctcggccatgctgaagaaacactgcagaagttgttccggcaaacacattttctagcaatggtgtacttgttgtgggccacatgggcattctggccaggttgtggctgtgaggacagacattctccaggtgcttccgatcctaaaacctaatgcttactgagcgcttatgacctcagagcttctgtctttagtactccacgagcactgtctcctccaatccacacagcaatgctgtaagttgtgtattattatcatcatcctcatttcgtagttgaggaaactgagacacagaaagtttcatgaacatgcccatggccacacggttgggaacaagtgaagccagggtttgtttgtttgtttgtttgtttgtttgttttgtagagatggagtcgctctgtcacccaggctggaatgcagtggcgtgatctcggctcactgcaacctccacctcccgggttcaagcaattctcctgcctcagcctcctgagtacctgggactataggtgccagccgccactcccagctaatttcttttgtattttaatagaaacggggtttcgccgtgttgcccaggctggtctcaaactcctgagctcaggcaatccacctgcctcggcctcccaaagtgctaggattataggcatgagccaccatgcccggctgaagccaggatttgaggtaggtaacttaggacttaggactcacactctcggccaccatgtgtaaatcttttgccttgattagctttggaattcacacttcttcagaagccagcatttcactgcaggccagcagcctcatgaaattataacagaaaacgattcgagagcccctcaagtcaactggtagctgtcagacgtttcctcaggcatcctctcattcatggcatcctaaggatgacgctagtggtagacaacagacccttgaacagcaagatcccaggctgcaggttagactctcctacttggccacgtagcctgatggcttctggactctgtgttctctttttgctcctgatccagtgctcattttgaaagttacagccagatggatgaaaacagggattgtcacatttgccctattcaagggccaaggactacataaaaactgttttctgttaccaaagtggtgggaagggtattgtcatgcaatgaatccctgaaatgaggttactggatgcagtgcagtaattattgctctccagaacagaaaaaaaaaaaaagctacctccccagcacttcaagcaagttcattgagaaagcagcctcatggtttgaggatagccttgaagataaatggctacactccatctatgacctacgtagaccttttccaaatcattttgacatcactccctctgaatgttagaaggtaaacacaggaagagaaagggcaaaacatggtggaaagaaatttcgacatcgttcaaccaaagtatacaagggaacaggtactggagtctagggtcaggagacagttgctctaaccagctgataatcagctgtacttctgtccacggagctcatgtctacaaaacattattatactcagcaggccagggttcaaagaaatctttctttgaaaataagagagagaagctaattttattttacactggtgtgtgatttattttgggcacccacaaaacaaactggactcatgctgagtggcctaaaacaccatgagcattctagaggagattggtggaaaatgcttagtgtccatgaacctcaaccaactagataatgtgaagcgatcccagatgatttattaatctgcaataatgcagacttgtttagcaaggagaaaataccacggaggccgatgggtgtgaccttcaacttcagccgttttgtaaacaagtgttctatgaagtttcgttttattttcacacagtttgaggatggctttctatccgcagggcagtaaacgattaaccaaaatagctccttttaaccaaatgagtgtgaggaactctgagcaatctggcagctttttttttttttcaagataaggagattttaaaaagcacagcaacatttttcttgcttttatgaaacactgccctgtgcttccaggcagaaaagcaaaaacttttgaaaggtcatgtgatgtcatttcagcaatgtagaaaaaaaaaaatcaactaacaaccaaaaaagataatgatctttgacagcgtgttttgtgtttttgtttgtttgttgttttttagacagagtctcactctgtcgcccaggctggagtgcagtggtgcaatcttggctcactgccacctctgcttcccaagttcaagcgattcttatgcctcagcctcctgagtagctgggactacaggcacctgccaccatgcccagctaatttttctatttttagtagagacggggtttcaccgtgttggccagcctggtctcgaactcctgacgttgtgatccgcctgcctcagcctcccaaagtgctgggattacaggcgtcagccaccgtgcccggcctgacagcatgttttaaagcagaatgtaagtatgtacacattcatgtgtaattctgaaaggatttcactttgaaattgaatgccttaataaagacgacttgtccgtgaagggctaaattaatctttgagctgtgttgtacaggaaatcaaatcctggtctatcataggagccatcattgacatcttccatgagggcaagtgtgggcagatatagaaagaagcaaataaagccttttcctcttcccagggaaaggagttgcttcagaaaaacactggagaaggccataaagtgcttctataaggctttagaagagtttccatctgcttcgcctcataggatcgtgccgtgtctcacactggggacactgaatttttctggttttgagagcaatgatcctcaactggaggtgattttctcccccaggaaacttttagtaatgtctagagacatttttggttatcacactgggagcccccatggtactagataaaccaaacagatgaatctagcatcacaaaggcccagaaaattaaactgtcatcagaatcatcgtgtacaaaagtcaggccaggacccacgtaccaaacctaagcagggtggctgactactaaaataaaatatttaaataagacttagagtctccaaatagtcaaaatacaaaatgtccaggttgaaaacagaataaataataaccttggcagattactcattgcagatttgctcacactcatttggttaaaaggaattattctggatacaactgaaaagtaatagttatatcaagaatcaggaaaatcacaactttaatgaaaacaagataatcactgacacagaggtgaatcagatactggaattatctgataaagactttaaggcagttattataaaaatgctttaatgaacaattatgaattcttgaaacaaaaatagaaaatatcaccaaagaaactgaagttatttaaaaagtaccaatgggaattatagaactgaaaaatataataacagaaataaaaactcactggatgagctcaataatagaatggagatgacagaggatagaatcaaagaacttcaaaatagatgaatagaatttacctaatctgaaaaacagagagaaaatatcctgaaaaaaaaatgaacagatcttcaaggagctgtaggacaataacaaaagatcaaaaattcgtatccttggattcccaaaaggagagcagaagatgagtggtattgaaagggtatttgaaaaaaaaaaagaaaaagctgaaacctccccaaatttgctaaaatacatagacctacttctttaagaagttgaacaatcaaaataggaaagcccaaaggaatccatgtcttgacacactgtaattaaacttctgaaagcgaaggatcaaatcttgaaagtagccagaccataacgacacatttaccacagggaaatacaaactcaaataatagcatatttctcatctgaaaccgcagaggccacaataagtgacacaacatttcttaagtgctgaaagaaggactgtcaacagtgaattctatctcttacaacactcttcttcaggaatacaagggaaataaagacattctctgatgaaggtaaatttaaaggatttgttgcaaacctaaaggaagtagaaaagaagtgactcaaactgaatgacagtgatcaaagaaggaaacttgaaacattgggaaagatgaaagaacaatgtaaaagtcaggaatacagacaatagactagctcttctcaggaatttaaaacatccttttttttttttttttttttttttttttttgagacggagtctcgctctgtcgcccaggctggagtgcagtggcgcaatctcggctcactgcaagctccgcctcccaggttcaccccattctcctgcctcagcctcctgagtagctgggactacaggcgcctgccaccacgcccggctaattattttgtatttttagtagagacggggtttcaccgtgttagccaggatgttctcgatctcctgacctcgtgatccgcccatctcggcctcccaaagtgctgggattacaggcgtgagccaccgcacctggccaaaaaatcatatttaatgattagaacaaaaaattacaatagcatctgagattcaagactatgatgtttaaaagtgggcaaagataaagggattaaaacagaaataaggattccatgcttaatttgaagtggtaaaatatcaatgccagtagactgtaataagtaacatttgtatattgtcacacccagagcaactgctaataaaattacataaaaaggtacgttcaaaaacgctataagtaaatcaagatggaatccttaaaagtgttcatgtaacacacaggaagaagaaaggaccagaggcacaaggagaggaaacaaagagaaaatgaataattacacagaagacttgagccctaataacaactactttaaatgtaaatggtttaaatacaccaactgtaaggcaaatattggcacagtggataaaaaacaaaacaaacacaaacaaaccatgactcaactatatgctatatacaagtaactcattttcatttcaatgaaataggtaggttgacagtcaaaggactaaaaaaatactgtgtaagcattaattattttttataaaagaaggaatagccatatttatttcagataaagtagaatttatccaagcaaagaaacttctagaaacaaagagcgatgttacataataataaaagaatcaacctactgtaagggataatgggaaggacagctgagaaaggaatgaggccaatagacccaagttcaggcaagctgatttattgtcagtgctgccgggctacatcctgaccaaagccgaggagacagccaggcttacagactaccacagggctttatagggcgaggaactgggtcagggttggggagctgagttgggtgagtaggtgggctgagtcagggttggggaactgagctgggtgtgcagaagggctgagtcggggtgagggagatgagtcgggggtgcaggtgtcttgaccgcatcctggagatgttttttgccagatttgttacgcaaggtgaacagacatgttaactgcatcctgtaactgcctggacagttactggaggggtcagtgaagaggggtttgtctttagccctgggggagctgtgcggaggtcacaaaggactgcattgtaagacccatgggaagggagggaaaacagtctggtcggagtgaccctaacattccagccttttaatagatgataggaaagggggtgccattttttgtctggctgcttcaggctgagagggcagtgactaggagaaaggctggaatgagggggtggctttagttttgaaattgttgatactcctggagtaacattatatcctgtatggttccatgggcaaaggctcagatacgattctgcaaaaactgggtgaagaagtgtattaagcaaggcctgaagattaggaggaagagaaaaagaattataacaggtccaaggagagggagtaggcagggggcccaggtgctgagagaccaagagggccaagagggccaggtagaggagctgctttccctgattttttgggtgcatctttgaacttgttttactgcattctaaactaagcctgactggttaaaataaaagcagcattcttcatctaggaaaaatgcagagtcctcctttgtcagcggtgagtaggtggagacctctgtgattttgtaaggcgactgccgctagggagtctagctgagtttgtaaggtggatatagacgttgcaaggtcatctacaccatttgaaaggtcctttgataaggttttatggtaataagaggaggttgcgattcctgctactccagtgcctgtggctgctgtgatgcccaggcctatgagtagtgggataagctgtatggcccggcgcctgtggtgtgggatttgagtatttagggtttggagaggcaggttttctcctggagctatgcctattttagggctgaggaagaccagtgtacaggtgcctgtccagttggtggggagacagaggtaggtggaggtgctgcatagaaagaacacaccttggctagggaggcagaattggaaatgtatggcaaaaaggggatgtaaaatgttttctgagcatcaggtgtggagggaggaggctagagccactccggttaggggttgaagggggtgtgttgagttgagctggctagctcctactgatgagttttctaagtgtagaaagaaacattttgtgtcaataagtagtctgtttgagggtgtgttaggcagtgggatttccacgcattcggaagtggggacggggtctagacaagtgctccaccctgcgatttctatgcagggcctatgtcggttattgcagaatcctgatgtttctcctgtgacttgggcctgaggggggttggagattttgagagtttgtgtggggtttgttactgttactgtttggatgcctgtcgggggagtgagtgtcaggatatagttgcataagctagaggagagggtgcctaggggggactcctgaggaaagttcacattttatgcataggaatgcttgttggctgagttttgagtctgaagtaagtgctcttaagataaccttgcgttctgaagtatgtgtggtaagattgagtttgtaacttttgagtgcatttactcctccgaaactttggtagcgggggtggagggttatactgatgaggacccagtctttgaggggaactgggaaggcatcctttgatatggtttctgaggggtgtacacagaaccagcaggccttggccagagaggggttagtctgattgagtatcctatgtgcctgttgaatggcgcgctgaaggtgggagcggtagtgagaaggaggaggagtaaatagacagagagcaagtgtaaaggtaaagaattcggcttcatctggagtgaattcctgtaaatccccttgaaatataagatcggtgatccagtcaagtgccgtgagggtgggatgttctgggtaggaccatgaaattctgtgatgcagtgaaggaagagggtgaaacggcaggacgggcaaagacaggacatttaggaggggcaactcttggtggtggttattatacctgctataaggaggattgtgaggcaaaatgttacagatatgaaaattttttgtttgaaactccacccaggaggtgagacggtatatagtcatatggcaaagagtagagtaagtagggtgattcctgcaagggcagcgtaatagatgatttccattaataagcgtttggatacttaatggtaaggggtgataacttgtctgttatggttcactggggaagagtggggtcttctgggatgggcattaggtggagttgagtttttccaagaagagtgctggagtatttataggaaacagctggttggttagtcagtggcgggtcagcggcaggggctctttttaacctggaaagatggtaccaagagttgtgtcctgaaagtttggctgtggtgggggtagtgagaaggacttggaaagggccttcccacttcagtttgagactcgttgaagtaagggtttttaggaacacatattctccaggaaggagtgcctggtcggtggggccttggtgggattttgggagggcctggtctgcttgttcgtggaggggatgacggatgagggagagtgttgggaggtactctcctaattgagagttaggagggagtctgttttgtaagaggaaagggcgtccgtacattaactcaaatggactgaggaaggagggggcttttggactggctctgatgtgagccagcgctatgggtaaaaaggaggtccaaggttttttgatctcaagtgtgagtttggttaactgagttgtgagaattccgtttgccctctcgacttctccagatgactggggctgatatgggatatggaggcgccactgaacgccaagggatggggagacctgttgggtaatttgggagatgaagctaggcccattgtctgattgtatggggctcgggagaccaaatctagggataatttctgatatgagaatttgagagacttctgcagctttttctgaaggggtaggaaatgcttctactcaacctgaaaaagtgtctacgagggtaagaagatatttagattttttgacgggaggcatgtgggtgaagtttacttgccagtgctcccctgggagtgttcctctgagctggtatgtaaggatgaggagagggcagagggccccttgggaggaagtaacagagcatatacgacagtttgaggttatgtcctttagtgagatgaatagatggggggaggagaaacaagggcgaaggagtaggtatgggggcatgcactgatatggaagggttggtgaagaggtgttagaatttccttgctttgctcttggggaagaacaggcttttgatttttgattatccagtccccttgaagggaggctccttgctgtagtagtgaagacttttcagtgggagggtatctgggcgggactgctggggtgacaaggaggatgggggcagggagaggagaaagggagtcctgttttgctgcctcgtcggtctttctatttccttttgagatttcatctgatcctgcttgatgttctcgacagtgtatgactcttgcttcagttgggaggtgtgcggcctgaaggagttggtaaataaggggggccgttagtaatgggggttcttttggcggtaaggaatcctttctcttgccagatggctgcatgggaatgaagaatgtgataggcatacttagagtctgtgtatatgttgacccatttgtttttggagagggttagggctctggtgagcgctatgagttgtgccttctgggaggaggttcctgggggtcgggttttagcctcaattacatggtttaaggtaactactgcatacccagcaattttgggagagacgggggctccggaagatgagccaactatgaatagttggtcatctgggttagtgagaggctcggaggagatgttagggaagtgtggctgcaggcgatccagaatgtcagtgcaagaatgagtaggaggggaagaggatatggggagtagggatgctgggttgaggggtgcgcttttggtgaggctgaattcaggattttcaataaagagggcatacagtgactgaattccggaaggagagagggagcttaacacccgggaggagaagagatcctgtaagttgtgagagctgtggacagtggtgctttggctgaatgttagttttttactttccagagctaaaatggccactgctgctaatgctctaagacaggttggccaccctctgacagtgttgtttgttttgagaggtatgccacaggggtaaaggaaggaggatttcccttttgttgccctaagaccccgagagctattccttggttttcggtggcatagagaacgcagggttgggagatgtcgggtaaggacagggcaggtgcagtgacgagagtggtttggagtccacggaaactgggaagtatgttgtgtgtggggcttaggggttcattgagagggcctttggctgcttcacagaggggctgagccaggagggcaaagttgggaatccatgtcctaaagaaacctgccagtcctagaaagagagaagttcattttttgaggaaggcgggggcaagctgtttattaaggttgcttgtgctggggtcatggctcgggccccgggggagagttggactcctaagtatgttactgttggggtagatagttgggcaaacaacaaatctctattagcatttataatttacctgctaccatgaatagtgctgagggcacagagatgtatcagacacccctggaggagctcatagtgattggctgcatcagtgaaggttccaataggaaaaggcatttccctcagctgagagtttaatgatgggactattagcacaaggatgggcaaaggtaagacagttctgtaagaactgtggaagtacagatcagctgtaaagggaatgagccatctgagacgggctctgtgcacattacgagggtaggtggaacaagtacaagtcccgccgacttgccttgtcttcaggtttaacatctgagagctatattggttagctgtttgtttagcaacagcagctggagaacccctctcttgtgtcaaaatgaaaccacacttcagcagacttgttcaccataatctcaaggactctgtgccctgtgtccctatttcctgctcatcgctgctcaacctgcagacgtcacctaggagtgtcgtccaacccctcccgctgcagctggcgccatggtgtgtgtgggggtgtgtgaatctgtgtggggttggggcatttcttcagaggccagccctggtcagttgctcccttagttcagttggcgtcccagctttgggacatgagatagtcactgttgcaggttccctgaaccccatttcataccgaaggaaattaacaccccagagaagctgatggctgatcagctccaggtcctgaagcatatacaggcttggactcaagccccttgccctgactccctgcgttttgtaccttatcccttggtgactggccaagaaatgggttatatctttaccaggaaaaactgttatttgtgccggtggccatgactactttactgtgggactcctttcatccttatcttctcctacgtggtgtctggagtttcccatgacttactcaatgcattcatcgttagctcaatcttccatatatttagaatgacagaataatgtgcaggataatttaggctccattagtactttgtgcatacctctattatagtacttatcacatcatgctgtaattttttgtttacatacctgtctctgccacttggcagtgagttcctccggggctcaggctgtcttactcatttctgtattccacctcctccccacaacccagcagctgaacacgttgaacacagtaggtttttaatgaatgagccggctttagggtaaggctcggtagactggtacacctggtattccacatattcatttattcagcaaatattttcataactgctactattttttaaattgccaaataaaaattgtatacatttgtggtgcacaacatgatgttttgaaatctgtatgcactgtggaatggctaactcaagctaattaatatatgcattacctcacctacttatcctctttttgcggtgagaatacttttttttttttttttttgacaaggtctgactctattgtccaggctggagtgcagtggtgtgatgctggctcactgcaacctccacctcccacactcaagcaatcctcccacctcagcctcccaagttgctgggactacaggtgcacatcacaaaaacataatttttgtgtttttagtagagacggggtcttgctatgctgcccaggctggtctcaagctcctgggttcaagtgatcttcccacctcagcctctcaaagtgctgagattataggtgtgaaccaccatgcctcgccaagaatacttaaaatctactctgttagcaattttcaagcatacaatacattattactaattatagtcaccatgttgtacaataaacctcttacacttattcttcctgtctaactgaaattttatatcctttgaccaactttccccaacccccactcccacctccgccccaggcccgtggtgacctccattctactctctgcttttttagactgcacatataatgaggtcaaggagtatttgtctttctgtgcctggcctatttcacttaacgtaataccctccaggttcacctgtgttgtcacaaatagaagtttcttctgtctgaagactaagcgttattccactgtgtatccgtaccatactttcttcattcatttatccatcgatgaacacttagggtgagtccctgtcatggctattgtaaataagaatgttgcaatgactgtgggagtgcacgtgtctctttgacatactgattcattttcctttggatatatacccagtcgtgggattgctggatgatattatagttctatttttaatttactgaggaaatttcataccgttttccataatatctgtgctaatttatttcccaccatcagtatatcagagttttcttttctccacatctttgccaacacgtgttttcttttttctttctttctttctttctttttttttttttggataacatccattctgacaggtgtaaggcgatatctcattgtggttttagtttgcatttccctgaggtttagtgatgttgaacattttttatatatctgttggccatttgtatgtcatcttttgatgtctattcgggtctttttcccattttttaaattgggttatttgttttcttagtcagcagatgtttattaggtacttactgtgtgtccagcactatgctaagctctgggaattcaaacacatcatatgtgaaccctaggagataatgacgtacaaaaaagactaattcctaatcattatgcaacatgcagggatgcatagcaggttaaagaagacaggagggagctgtttaagatggccaggttgtggtggccatccaggaagggttcctggaaaaggaagctgctgagctgcattttaaatgagggttatgacgtaaccagtcaaagatatgttgagaggaggcatcagggagaggagacagtaggagtaaaggtgccggtatgtgacatagccaggtgtgggtgaaaagctctgtcaatgcagtgttgttggagtgacatccaatgtgggatgccacacgaggatggagagagccagtgggaagtgggcaggttattaaaagctatgaaacttggatgtaatgctgtgggtgatgctgatgtagtaaaacgacatgagctggtgggggatgtggcatttcagagagaatcactcactgaccttgtgaaaaacagcgttggggcatcaaactagattcaggaaaaccagctaggttgctggttgctatggtggtggcaagagatggaggccacttgaacgagggcagttgtagaagggatggaaagaaagggactgatttgaccctgatgtaagaaatgaacttggcaggatttggtggttaactggatttgaagagtaaaaaagcgggaggacacaggaagctcccaggtcgatggtgaggccatggtcacaggacagagactagagaagaaaagcctggtttggcggaagtcagtgagctcgttttagacgtatggagtttgaggcgtgtctgtctccttcaggagattccaacaggtagtcaaagatgtgtttgaagcttggtggggatagggagagggcctggaccagaggtatataatttgtggtcacaaactggaaggcagtggtagaaattatgatcatggataaaatcactagggtgagtatgtgttgggagacggacggtaagctggaccagctctctggggaatgccaacacagaaggagctggtggaggaagaggagctcattaaacagactgagaaggatagtaagagcatgttgggagaataagccttgctcatacgtggcttccttagggctagcttccctgacgccctacccacaccaggtctgatactgccatcccctctaataagtctgctgtgtttgtccttcacagaagttgccatagttataaattaacacttgtttttgttgttgcttaatgttcatctttcctgctaaaatataagctccatgagggcagggtttgcatcgctcttcttcctcggggaatccccaggacctagcagatagctgttgcttaataagtatttgtgaaattaaagaatcatgttgcggactcccaggggggtagagagtttcaaagaaagtcactcttagtaaccaagtggcctgtgtagtatccaaatcaaagtatgaaatatgcttatttttaaatgtttaaaatttcctgtgtaaaataataaaagttttgaacaattccttcccacttctcctggatatgacgtgaagccctcagatacttggagaaaggaaaaggcagacaaacagcacgcttagtatgtattagtttataacgtgcaactaagaggtgacattcattgctctccaaagctccacctggtctcatggtggggaacagatgttcaggctacttcatgaaaatggatctggttattcaaccaggaacacaaattatgatgtgaatatggttgcaatgtagatttttcattggcaacaattttgtgaaaagtttataagaaaatgcagatgttgaattaagaaatagttttatttcttaaaatattaaaatatttcttaagaaataaaactatttcttaattcataatccttaactcataatgtaatccttatatacatatattacatgtaattattaaatccttatatacatatacatgttatttattaaaatatcattttattaattattaatatgtattaaaatgatattacatgttattaaatccttatatattaatgtcattatttattaaaatgctaacaattcattggatcccaatgtaaaacactaaaactcttacaaataaatttaaataattttatcaatatttatgagaggccccatctgtgggcaatgaggctaacgtagagaaaaaaaccatctaggtggtgaaaggccagtgtccaggtttggacacacacatctcagagatttgggtctttgtcttcccctcctttcctacctttgcgtcaatccttacccatctgcagacttagacttgagatttttttttgtataaaggaataaaacctctaaatcaacaatggtgtctaaaatgaaaacacccttggagacattcattcattcatatgtgcaccaagtttcaaaacatattgatccttttctgagataattttctgatgagaggagagaagaataaaagggactcggccgggctcggtggctcacgcctgtaatcccagcactttgggaggccgagatgggcggatcacgaagtcaggagatcgagaccatcctggctaacacggtgaaaccccgtctctactaaaaatacaaaaaaaattagccgggcgtggtggcaggcgcctgtagtcccagctactcgggaggctgaggcaggagaatggcgtgaacccgggaggcggagcttgcagtgagccgagatcgcgccactgcactccagcctgggcgacagagcgagactccatctcaaaaaaaaaaaaaggggcactcagtagggagaggagaaatatcaaagtgggagtctgagagtgtgcagagcaacattgttcctttgtaggcaggtacactggttgtattagggttctctagagggacagaactaataggatgtatgtatataagaaggggaatttattaagaagtgacacacaatcacaacaacaggccgtctacaagttgaggagcaagaaagccagtggtggatcagtccgagtctcaaaacctcaaaattagagaagccaacagtgcagccttcagtctgtggccaaaggcccgaaagtccctggcaaaccattggtatacatctaggagtccaaaagctgaagaacttgcagtccgatgttcgagggcaggaagcatcctgagagcatgggagaaagatgaagtccggaagactcagcaagtctagtccttccacgttcctctgcctgctttatcctagccacgctggcagctgattagatggtgcctacccagactgagggtgggtttgcttctcccaatccactgactcaaatgttaatctcctttggcaacaccctcacagacacacccagcagcaatactttgcatccttcgaaccaatcaagttgacactcaatattaaccatcacactgagttcagacggcagctctgcctcttacaaagtgttgaacacatccttttagcagatcgggcttcaatttcctcatctgaaaatgtacttaattcgtaatagtacttacctcatagtgttatttagagtgctaatcagctaatatgtgtaaagcaactggaacaatgtttagcaaacagtaagtactataaaagtattagcttctgttattatttgcaatttagcccaggctgtggagttttgtacagagttttatgtacccatttcccagatcaccccttcctttgagaatggtttgctatggtctatgtttgtgttccctgcaaattcctatgttgaaatcttaactcccagggtgatggcattaggagaggggagctttccgaggtgattaggtcatgagggcagcatctccatgaatgggattagtgaccttataaaacaggcctcagggagcttgtttgccccttctaccacatgaggactcagccagaaggcactatttatgaaccaggaaaccgacccacattaaacaccaggcactctgtcagcatcttgatgttggacttccagcctccagaactgagaaataaatttctgttgtttccaagcttcccagtttacagtatgttgttatagcagccccaacagatgaaaaaaaaaaaaaaaaaaaaaaacatggttacaatgcagaactccatggcgggctcaggtttgctctcctcccatctcccaatcctgatattgggagtctgttgactcttaggaggtgggtttgtttatggtttgtcctccttgtccagcctacagttctttctgctagtacttttaagccctggttaagtcattgaaaagcaccaattacagacttacataactgtgtcaggagcatttctctgagggatttgctcacccctcggagtcagttgcccagggaaacaagctggcgatgtcacaaggcatccacttctagttcttcctcagttcccttctgtggaacctgagtcagagcctagtccggcatgctgcctagcccagccacgtctcatcctattcatggcagagcggggactctcaccctctcccagcaatgtctaaagtcaggtattttggggtcatggccatagtaaggatggtctcctgtgctgcttcttccctcccagggcacagaaatgcctatgcaaatggagtgtctaggacagccctgggttactcttggttctctagggtatagttacaaaagtgaaaaaaaaaagaaaagaaaccattggagctgctccctggaggatcaaaggttgttgcagactttctagaatctcagagacctcaggagcaaaattacaacacacttttcctttctactgttcatgccctaagcacacccatgatctggtttatcaacctgctcctccttttctcaagagataaggttgcaacttccttgttatatgcaaatgaaaagaaaagagactacagccatggaagtatttcgctagattttcctagtatttcatgcttacttcatttaaccatgcccctgccccagtgccctagtgaaacagtacaatgtacagctcttgcattgctacctgcccttctcaaagcccacatgttgtattttatgcaaatctacagattatctatcattatctaaatgcaggcatctgaaaaccagcagtaatcctgcctctgaagtttatcaggaaaggagcttaaaagagaaccaaattcagcctgtgttggaactctcagtcccagaggggtgtggtttgtagctctccggcctgctgttggacttaggctgtgacccacagaaggacgccagaaagtactcaagacattcacggtgccccggtcagcactcgccatgacgaagacttctacatgcatataccacttccttgttctgagctggtatactttcctcaattattacatctcacaggaaggaaaagacgaggtgaaacccaaaatcttggcaaatggtgcaaggtggaaatatatgacgctgcttaatctggtaagtccatatgtccgtaccaggaaccgatccatttctctagaatatcagtgctgccacacatatcatctttggattttattaaatacacaattttgttatttgtcttccttcttcaccgttttgtgagttttgggttttttgtttacttaacaatttgctctgataaacccaatttggaaattatctatagttaacatttctatgctggctcattgttaaatgctctcttgaaaaaaaaaatctcatcttggagctcttttcagatgagctcaaagaggggaccatgctaatggtttcaccatgggattaactacaaatgcaggaggcattttgaactttgcttggggaagtctgtgaagagaaggcagagtggcgtatggtgtgtaggaagtgtaatttccaatgaaggaataatgccattttacagcacacacagactaacagatttatctaagaaaagcaaacacattttgccatgttcagctcccacctcaattttttataggttcaggctccatcttaaaggacaaatcacccaaccgaatggcaaatacacattttcaactatttaaaaaccaatcttatgacttactcctttcttgtcttcctaacctggctgactgcattctgatgaagtgtgaatgaatgggagaaaagcagattatgaaaaatactttgaggaatagcttaaaaaaatacttttaaagttaaaagctaataatggggaatcatttggggatgtgaattaatatttgaggtttttgactaaaatcttgggtgccacataaacatctgttttcagaattgtaatcctcatttgacaagcggagaatgtatgtggtcagaaactgtgacactctgaaatgctaaggacgtggaaatggagagagttaaaatcaaagaggcccaaagtggctgcttcctcctcactggttggttagtggcctcttgatttgggcctgaaaaattggaaccctgaacacagctctagtgtctttgaaaacttcaaggtgactacttgtttcaatcatggaattttatgagaaaaacaaacagaaacaaaacaaaaaatgttttttgtataactagcagtgccacagtaaacaacaacaacaaaaaaccacacacacacacgcgcatacacacacacccctaaggtttgtgtctctattggctttctatgaaaaacagtccactaaaagggaagtgtgtctgtagttaggactgactttctaataaaatccaattccagtatgaatgtcctacctcacactatgtgtggctaagaatagatttatcaccacactcattaactagctcccttacctctttgtatacacacacacacacacacacaactgatcctgactttttaattctagctcacctacatttccaagagcccttattttccaagagtgagaaaagtctcttatcttgtcaatgatactatcatttcctagtgttaatcccaattttgcttccctgattgatcagctaccaaatcctattagtttttccttttactaagttcatcctttcttcttcaaccttactactgtctctctcattccaggcttatattaagcctacctggatgaccatatcatctctttactgtccattcatggtccaatccagccacttagattccaaattaatcttctcaaagcactggttttggtttgttttttaataccatgacctggatctaaaagtgtggcctgccgctcaggaaaccacagtggctccctcctgcctcatggacccaatgtcaaactcccgattcaagagctcacctgcccaaccagcctttcgggttccctctccctgggaggctggtctcttctgcagtaaggactgcgtctcactagtattggtccttgggcttcctgctgtcacttctctgcccggtgttctctctatccttagaagaaaggcctacttacctctctccaccacattgcttctttcatagaacattgggaatcacatatactcctcccaaatccttgctgaccaactccagtccaaatttccttttcctttctctgattttcacagcatctctcagtctctgctgatttatatgtagtattgttttctaattccctctctccctgccatgtgagtcttaacattccaatcaaactttggctccaaaacagaagttttttttaatcttaggtccttgccaaccctaactgtctatatttctaccttgaattcagcacagtggctggcacaggatacccagatattaaaaagctgcgacttggtacgttgacgtgacctcagcctttctgcatcctcaagcagtccctctcttctggtatcttctggccctcgtaaataagctgagaggggcttgcctgtggtgattttctttctgagctccattaggagtcatcttgaaagtgtgacctaatgaaatgcttcccaactggtgaagatgggttgagtgtatttcagaggatcgatttaatgtagatttcgaatatgttgcttaaggtgaaatattggacctgcaaatgtctagctcttgagattcatgggctgattaatggttgtgtctcctaatgattaattagtgttcattcatgactaattaattggtggttgtgtttattaagtcataaaggtctcacaacttacgctcacattcttatatttattttacctcaccttggggaagttagtatccagtcctgattaccagaaaatttacacccctcctcgtaaacagcttgaatttctaattggctgagtatcatttttgtcccctttgtaagagcaaagcccccttttgtgccagttggcactgtgagcattgccccagttccccttgaagctatcccaggggactggaaggggagacagacaggagacaggagacagacacgagttgcactgagctactcccctggggttggtggtagtggctaaggtgccattgagaattggtcagggtgacccatttctgactaaggagagtgaaggtaggagaggacagatgggagtctctgcctaataagagagtaaactgacctcagtgaaggggccactgattccctgctgggagggagaggtggtatttcacaatggttacaattgcgatctctgggatggtacctcagtcccactgcttactgcccccgagaccctgggctaggcacttctttgtgtctttcatttccacgtctgtcaaatagaaataaaaatagtacctaaccatagggtagccatgggggagaaatgatctgacaggtgggaagcgctcagaatggcgtcagcagggtgttaggcagtggacagtggggagagaagatggggaggtgatggtgaacttctctgggtagagaaggtgatgcaggagggtgacttagtagaacatcagtctcctcactgagcacctaggttgttgcggggtggaggccagcaggagtcatccacccccttccccttcatggctactatttctccctccccgagctgcatgccccatcttcccagctggagaaggaccactgtcgagccactgctctccctgctgtagctgcccgcaggcaccaggccgtcctggtggtagagtctgcaggctccagcagacagccatgcagaatggggaaccccagaggctaggcgtgagaccaaggcagtgccatgggtgtcctcaagcagcttaggttggctcagatcatccagtgcctgagtcctccacaaatgctatgtcccttgctctctgtccaccccatttccatccagggactgtccctaatcccagagaatatgagctagggggtttagggcaaggctcagcagccacagcttggctcgcagaattcattcagtttattagggtttcctctttttaaagataagcttccttctgaaacattgttagaggtggggccacataactgggatctccaggggagattctgagtgggcccctccctccccacgcccctgacacccccttcaacaacagaagcatgacctttccctcccttttcataagttgcccaagccccaggcagctccgtcgtcatcaccctcaacttctcatgatgacaacagtggcaataccacataagtccttggggttgctggcctggggctgggggaacagaggagctgggaggcctctatgggtctaaacttcaaggcagcctgtgaacagtgagaagatggggttgaatttatagtatggcacccacttcaacacttgggggaccaaccttaagtaataatctatggcactatttatttatttatttatttatttatttttgagatggaatctctctctgttcccccaggctggagtgcagtggcacaatcttggctcactgcaacctctgcctcctgggttcaggtaattctcctgcctcagcctcctcagtagctgggactacagcatgcaccaccatgcctggctaattttttttgtatttttagtagagatggggttgcaccatgttggccaggttggtctcaaactcctgaccttgtgatccgcctgccttggcctcccaaagtgctgggattacaggcgtgagccaccgcacccaacccctatggcactcttcagcaacgtggagtcagaaatacacttaactatttctgcctcacaaagatgcacttcaatagctgaaagggtaaggactgagagaactatgtgatagtcaccaccagcacccaaaataaagcagctataaattattgagcaagtaactatgacagcattttggtaggttctttggacgcagtatagagatgagtgattgaagacctggcttctgaaaccagaacactggctgtgctcacttgctgtgtgattttgagtgacttgcctaacttctctgtgcttcagttttctcatgtgcagtggatactctgataaggcacccagatcctcatacctccccagcgctgaggtactcagtccccagctctcaggagtgttggctgctgatggtgcaaagctgagatcccctcccagaattgccctcagcagaagggagctgcctcgaccaaggtttaggtccctccctggcgttgctgcctgccataactggcatccaatatggggtgcaaatgctgcactcccggacagctctgaacgagcagctcagctcagagctcctcaagggatcagctgattccatgcaactgcccagcacttagcctcccccacttcaatccttctccctttttgcctctcatagatgtctgagagcgttcttcagtgaacatcctgcaggcacatctcagaatctcagattgtttcccacggaacctgacctgcatcgtgtaaaataccaaacatacagaaaaggtttctctccctcctcttcctcctcccccttctcctcatcatcttcttccacttcttcttttcctaattccagataaagacactaacacagagctttccctggcctgtattatgttctgatacctcaccgacaatttctgtacctaactgacattccgtgaatgttggttgaatgagtgaatgaccagaacatggttctaacaggcatgaggccatcccatcatgaaggtgttttatcccacagccaccctactgctgtactgaagcccgttgtcctcagctatgcgacattggccaagcattctggtacttctttccaacctgtcccttgatgctcttggtctcatttttctcttcattattccaaactgtggttctgcacattctttctcctcctgtgttctttattgcatcctttaatctcagtttcttaagttaaatgtgtatgaatgatgacagaaatcctatattccatacgaatacagatatacttggcaaagtacctgccccaaacacaaccaccactgttatataaaggactcatcacagcccccaattgctgttttcttctggtgtagtcttccaccgcaaattcttgcatcatttcaaaggagagaaataagaaagtcccgcctggctgagtcaggcacagtcctgagttaggtgttggattacttgactcatccaataagacttgtaatgtcttgctcaggaaacttgtggaatctccctccctggaattactttttaaatagaagaaattctcatttcctaaggtagtttaaagagagagggctctggcttaaaggcaagagataagcttgatgacttggaaaggctaagcttccacgatttgaagatttttgtgggtttgtgaaaacacatgaatgtaaaaactaaatatcctttaactgcagttttttgaattgcattagttatttaaaagtgtcaattcagctttgtcgcaggtgttagtttgtcagctagcaacagaaacaaaagacagctaacgaactcagaagcagcatttcaggaaaaggcacggaacacgcagtgggaacagaattagggaagaaccaggagaaaggataaatcagggagcagcaggtctgaaataaacttagaataagtagatgccgttacgtctgggcttttctgggcggccaaaatagctgtgaaatgtaaatgatagtaattttgttgtaagagtctcaaaagaagaccagttgtggcgatcatattttaatgctactgtatagtttcctagggctgccgtaacaaactaccatggactgggcttacacaacagaaattgattttctcatagttctggaggctggaagttgaagatgtgggcaaggtcggtttctcctgaggcctctgtccttggcttgcagatggccgccttctccctgtgccctcacgtggtcttccctctgtgtgtgtctgtagtcctcatctccctttctgataaggacaccagtcatagtgaattagggtgcaccatcgtgacctcattttaacttcatcaccactttaatacagtcatattctgaggtcctggaggttaggatttcgacatatgaatttggtggtggttggtgggggatataaattagcccataacagctaacattgcctcccctgatcgctccgtctgttatcgtgagtcaagctcatcctgagttttataaacattgcatcgtctttggagaataagcagaccgttcgggtgggatgggctgatccacacctgtccctgctgccctcctggaagcctccccatggagcctgggagaggctctctcgctctccgtgtgccccagctgctcctggcagccccttcacgccccagctcttgcaggtttcttttccttggcggctccctagtgcctccctcctgagcccccacgcgggggttccacctgcttgtggtgaattcggacaaagacgcctcaatgttgagtaagctcgatggcgacagggctgcctggcacacaccgtgggcacctagagaggcccgtgtgccataagcctgagaagtaaccgtgagctggggtggagagggagaggggattgacaagttggaggtgtaaagcaagtttttattgatggagaaggcccggaggatctgagtaatgcgttctttcccccaatccgatttccacatcctgtgactgggagaggcaggagaaagtcaggaggagcttgactcacgatgactctaggaagctccagcctgaggaaagcaggtcacatggacttcacacgccgggcggaggcggcctctccccagagagggaaggcctggcccaggctcaggatgggattaattgccctgctgatagaacagcgcaggcctcttcccctgggcccaagcctgtgcctgctcttcctaactacagcagcagcctggcctgctgcggcctgagcggctggaagtgaaaccagggtgaggcgaggctactggtgggggagggagagaggagggaacttctcccaactccctgtgcaaatgactacacatccaaattctgcagccctgagggtgtgaatgtcaaaatcaccagcaataatgagaagtattagggtggcaaccccttcctgccatttaaagctgttgccccacccctccctgggacacccctttctggttcgaaagctcctccaccccagggcccatgatttcctatcttctggctcttctacccccggccgttctttagtacctttatgtccctttcccttcctgtcccttagacaaggacctttccctgctgtctgctgcctgcttttctgttctcccctctcctctctccctttcctgcaatcttgttccacaggagggctcaacagcctgcatctccccagccccgcctctcttgagactgcagggtctgaatttccaaacggaagttcctccaggcaggtggttctcagcctcagctgcccgtgattagaatcacctgggaggattttaaaaatcccaacccctaggccctagccccagactgattacattagaatctctgggggtgggaaccaggcagcggtggtttgtgaagtggtcgttcattctcccacctggagataattgtctctcttctgacctcccacaatgctttatctgaactacgctcagaaacctgataattttttttattttttcgaagtctagctcaagaacaggactgctgggtttgacatctaccagccaggaagctttaggcaggtttgtttcctcgtttgtaaaatggtggtgggcgggggagtctaatgataggacttggctcgtaaggttgttatgagaatgaaacacagttcagtgcctggcacataccaagtaatgaataaaagtccgctttatagctttgagtagtaagatttttgagggctaaacttgggtctcattcagtggttctagctttagcctacataaagattaaataatctttttctacatttaaaatctatattttatattctgtaaagtgtatcttaataaggttggccaaaaatttcttttttttttttaacttttattttacattcaagggtacatttgcaggtttgttatataagtatagattattttgtgacccgggtaatcagcttagtacccaataggtagtttttcaatttctcccctcatcccacccagataaacaatctttaacaagctctggagaagcttcttaaaaaacaaactcttggaccccatttccagagattttgattccgtagtctgggataggatggaggtcctgcatttctaacaagctcctgggtgatgggtgtagctggtctgacccacctctgtatcatttcctgcctacgccctcagcccaggagcagcatgtggctgactttgctaggtctttcctagagtccagagctcaaagattgttccccaacagccaccttgatcaatccccagcccagctccccaggctctagaaccttcctgacttataccctaaaagcagagtccagaccacccctcttgtaccagtccagggctttcaaggatttggatggattctgtcgcaagcctaacttaaccccaccccccaaactccatatcttcatgacctaccagttcttaaatgagaaaccacagaactgtacaaagcaacaagaatgtacaaagcttgccttccatatcgtattactttcttgaaaaataccctccttctctttctcctggctttgggggccacacagcacttagtaacccaccagcgctcatggcttgctctatccccttggatttaaattgctgccacggccagattgtctcggtgaggcctgcaggtgccctatttaaggaagaaagtgcaccggctcttcttcggctgagcaaggcacccttttgtgtgcctttcttgggagagcacagagattcgtggtggtcctcttgacctgattccagtttctctagtgagatttcagcactaggcatttttcctaattttccttcccaggaagactcctgactctgtccaccctgtatctgcctctttgcctttgagctgtttatttggttcttccaacctctgtgccgtcaaggtatccatctccttacattccccttttaggctgactctttattttgtttccatgttagctcaagtccattacactaaatactgtacacattattgtcccctaaacaaatttgctcaatcagtcttagcgagcagggtcaggacccaatgagctggaagcccagcccttgaattggctctcaaccaaaacaacccaacagccctctccctctcaaagccacattactctcagagggatggagttttccatcagtgaagaaggtattaattaaagtaaatgaaaatgccctcatttgttgtaatggatttagctcttgcagaccattttctacggggtcacctgcctggatgatgtgctgaaaagaaccaaagggggaaaagacattaagttcctaactgccttcagagacctgcttttcaccactctggcttttcctgtatccacggtaagtttcaaagatgtgtacataatctaacagaaatgtgcatatggacagacgcttctcctgggcagccaagctgtttgggagcccataattggaaaccacacccactgcatttacaacaatgtcctgtctgaggactgcgccacattgcccagtgtctttaggaaatatggcacattagtgatcagctttatcactagcttttgtacctctgcaaaggcttggtacaaggtccttattgccgtctaatggggaagtttgaaagacctttcttaatcaaaatacaactgagacaaccttggttccatcagggtgatgggaatggagagccctggggagggagatgacgaattttccccttttatacatcttgtttcacttgctacgataagtatatgttacttctgcaagtggaaaaccatcaaataattttttttttgaaaagagatatgagaccttcaaaggtggcacatggaaaagacaaccgaggagagaaagacagcctggtgtggggtacacagtgggtgcctcattcatgttgctgagtggatggatgtcaggaagaagtgagacatatggcagggacagtaagctggtatgctgatgccatccacatttctatgacattgttcatgttttccattcgttagctagaatggaaataaacagagatcaggcatgctggctgcccagcagggcctataattagaaatgactaccttcttctacctgtcattgtcctgcttcctatagtacagaacttaatttaaatgcaaaatgcaactctccaagccctagtgagttctctgataacaaagcaaggatacctattactttgcaggatacctctacctctgcccacgtaaaatcttctaatgaccaagctttttggttttggggggtaggggaggggtttgagataaagtctcactctgttgcccagactggggtgcagtggtgtgatctcgattcactgcagcctcaacctcccaggctcaagtgatcctcctgtctcacctggctacttttttgtatttttggtagagacatggttttgccatgtcgcccaggctgatctcgaactcctgaactcaagtgatctgcctgccttggcctcccaaagtgctaggattacaggcatgagccaccaagtctggctatagccaagtttttaaaatcaacagtgaagtctgtttattttttgaggcttagaaatggagtgtgtgaaatgtcagaagataggaagatcagaagtttaatagtttttaacttccttatctatgcgttgacttcgtagcatagaggatagatgctttgacaagagaggcaaggagtacaagaggagatcaattcaaagttctgagcaccagggagatccagccctcagtcagctagcttgtgcattttccagggagattggcacttatggttctcaggcttcctgcttcccctagccatgcctatttagagggtggacaaggaacgtgtatgactcaagctactccatgtgcctactctcagcattcctggtgaaagtttagaaaaagaagttattggttaaaataaatgactaatggtctgggaatcctgtttattcatatcttctctgcctgccacgatgacaaataattgatctctaactctctggcacattgaggaatccccagaaagagcagatatagcaatgaaataaagggaagaatgcttattgtagaattactgtaatgtatatgtactacattcctataatgtatatgtaagatatctttaaaatggttgtctgtttttatttagctgtgtttccttgattatcttagaaagctctgattaaaaacaagcctaatgatgctattttttgtgttttattttccagtttgtatttttggcattctggatcctctttctctacaatcgagatctcatttaccccaaggtcctagatactgtcatccccgtgtggctgaatcatgcaatggtgagtgaggggaaaattcagtgaactcagaacaccaatagcctctgtactgaaaactccacagtgccttatctatgtttccaaatgtctcaattcccagcatccaatctacctcatcactgtttatttaaagggcatattgaaggtatgaaatgaacacaagccagtgctataattacagtgagtctactgagaacacaggagatgtccaggtgagagtctgccatgttgcttaggaagtctttgaaaagacacacagttctgagaggacaggcctgaaagagaagtgacttctgcaaatatgtcataaacttccgatgtgtggatggaatgaagtaagctttaaaaaaaaagcccaccccaacatccaaagaatatctcatagctgagcagcagctacttaagtaacacactttgtcacgattctgcatcacaaatgggattaacatttacatatttctaggaatacatttccatttggttttttattcaggcttgtgttttggagaggccgaatagtaaacagaggctgttctgagatttttaggtcactggaacctgaatatcagtaacagggacccaaacaagcaaggctggcatgaggttgccaggtctcggttggaggaggataactgaatcatcggcacaatgtgaacaaagtaattgttcaaatacctaactcagcttctcaatacttacaaatgtatctccacatcaaccaggagattataaaaaggtctcagattctgtgaaggtaatgacatttaaatacccaggggatagccgggtgtggtggcacgctcctgtaatcccagctacacaggaggctgaggcaggagaatcgcttgaacctgggaggcggaggttgcagtgagccaagatcgcaccattgcacttcagcctgggcaacaagagtgaaactctgcctcaaaaaaaaaaaaaaaaaaaaacaaaccaggggaaaggcacaaggaagtggcatgtcaagactcctcaaaagttcactcacagactttcttccaccctcactcttgcccatctttccatggtcttaaaactcacaagatgaccaactcagaaaagcaactcagtccactaacactgcccctgccacaagccccagtctccagaaaaaaactaatttcagcttaaattttgtgctcagtcagttattgatgattgactgactaatagaccacagctctgaactcttttggagttcaggaccagaactaccttacgtaagtctgacctctcaggaaccctcctcctctcaactttttcttgtcaaactcttcaccttcccagtttcccatgaatgttaatctgagacactgatgtagtgaatattcctgctttttttttttttttttttttttaagaaatggtactttatattgtccaaagcatgtttttcaggtatgggctcatttaattcacacagccttctttagagaactactataatcctgatttttacaaatgaaaaaataagataaaataaaagctcagagaggataagtgatgtgcctgaggccactgaactcataggaggcacagctaggatggaaatccgaggctaatgcacccttcgttgccttttgctgcagtaagtccagaacttgtgattcgatctggttttgtttcctaattcaccaggcaatcaaaaggacctcgctttgcttgatcaatacagcaaagtgtgaattcttacttaaaaaaaaaaaaagaatcctcatctgtatgctactaaaccaaaattctaagaaaatgaagagatttgaaactactggctgagctagctgttactaaaataataacaaagcagagtcttataagtatcttttatgtggtgccaaatgcacctagcaaacatcttctcaaggtttgtgtgctcatcttgtagcttttttcacaatgactaccatctcccccccacttcagggttgatgtaaagttggatttctttcaaatagttatgatgatggtgtccaatatttgtgaccttgctaaataaacagccatatggatttgtgataattttggaagcagagagctggataacatacatcacatccgtgagctaattagcaaggcagatactgtgcaacggagatgcttaaatatttttgtgcctcacaagctgaggggtgctgtggaccttgccccttgccctttggtcattcaagtaacctgaatccctcagagaaaaggagcaagggtcaaaggaagtggaacaatggtgacaaggagagaagaggaggaggaagctaccccaggtcatatacagatgtttctgtgtttctcttagtttgattgaagaaactctcaacagatccatcttaggaaaaatgttggtatcagcaaaattggcctcaggtgtccctaacacagtcattcccaaacttcctgccttcttttggtgtctgctccaaattaagtgtcctaataagtatatctcatctctgtcttctagactgtgttccttgttctggacattttctgtcctcactattaaatgttcttggcctattgcctcaaggaatgttctctgccaagttcttaaatactagtgtgaactcatggtagaaatggctgctactgtgtcagtttgttaacatttcccacattttgccagtgcctgtccatgacagtccaaaggaaggaatacaattctgggaaatcaccactatggcagccagagtaatgacgggcagtccggctgggcatttggtactaggtgcctctgcatggggctggccctgtcccctgtacagctcctttttcctttccacagtagaagaacaattgccttccatcgccagtgccatgctgtcctgaaagcttctttcatttctcaacactccctgtgtttgctattttagccttagctttggaatattttccccattgccatttatgatgctgccccagttgttatgagtagtatctgtcaaagtaagaaataccactctccccttggacacagtgtggttgtaggaccttcatgattaatcaagtctttggactgctcccagctcaacccttgcagctcattggaaacttgtcattgcagcaggactgttctaagcacattgtgtctctaacagacattttcctgcctttgttgtgtattcagactaaatagaaacatcagtgagatatttgcatccaccgtggacagggcaccttaattaaagtagatcaatctgactgttttagtgctaagcagttctccagtcttcataaaacaagggaaagaacagcaaagtagcccttcaggttttgccaggaaaacattaactcctcaggtcttatctaaatgcctactaaagatagaatcagagcagacagatttaaatagcagtaagaggactctcagtaactgagaaaattatcagatcctaacccgaggggagctgggggacttatttctctggaaatcaacctaaattgttcaggtcgccccaaaggagaggtgaaatagatcagagaactcctcagagccccttctatctttgaaaatagtacatgattattgagaacgtgtgtgcaaacttcaacagctgtcaaggactgcatgaatgtaaggtattctcatgtaaaacttaagaattcccagccaagatccactagcttattctcaatccatgatcacagagtcttagaactgaaaaagtttcattgatgttaaggggggtttcaaaacaatctgctattgagagacaggaccttccctggctctttaaattggagaaagtcccagatacagccacctagttatttaatatgttgtcatttattcacttgaaaaagagcagttaagtaccactatgcgtgtgacactatgattgatatttattgagggttttgacatctagcaatcttaaatctggttgagtctaatgtacacacacgaagttgaaatagtgagtgaatgcttacacaaggcagtggcatactggtgttaggcggagggacatggttattgctgaaggaagaacatggacaggaggggttctgtgccctacctgtcctggcctgactgtaactcatgagcaaggcatggctagttggcctggatggcctttgagccgtctcccagggatgtgctgggaagtcaaaatgcccagggagtaaaacttaaaatcttctagtttctccctcagtcatagcatgcaagatgatatcattagcattctgacccaatcacagatttttctctgccacccataagcttggtgtgaaattgttgggctgctaagtgggggtgagtaaggtcagccactcttcatcccaagcattgcaaactcctcccacccttcctgattcctcaccctcaattcagccccagccctgggcataggtcacccacagtctacataccttggtacaactcagtggttttcaaccttgagggaagaggctcctctgtgaacctgaaaatatctatagactgtttttccaggaaaatacaaatacccataaaattttgtgtacaattttaggaggctcatgagccctccaaattccatttatgggcctcttacctagaacacctgacataactgaacatacacttgaaaagaaggtccccagatgatttccattgctgagttcaaatcaaaaagacaaaatgaagaatcactcatttgaaaatcactcatatgtgctttgggctattgtgtccttatgtgggtgacaggaaaaacatcaaatatggtccctaatcttaagaaatttaaaagagatattatatacctaatctaatatgcaatatagctaagatgtataataataagcaagacatttgattttaacataaggaagtgctaaaaagtatttatcagatgcctgctatgtacaaggccctattctaagagctgaaaatgcagcaatgaacaagaccatcgaaaagatctgtccttgtggactatacacacatcccagtggggaagataagcagtaaacacacaataaatagggcgagagaacggagtggtgtgtgggtgggtgtgtttgtgtaaaaaaggcaggtttaatagcgtacagggaaattatggtggccaagggatgcctctatgatgagctgatattttaataaaaatttggatagggtgaaggaaacagccacaggacattctggcagaagaaaggctcaggcagcagaacagtgactttaaaaagcctccaaggaaatactggcatctctaaaaaacaagaagaccagcatggctggttcagattgaggagggaggagataagagggtgtagccagggttcagattatgcctcatgtgacttgcaaggagtttgcattttattctgagtatgatagaaagtcacctcttcagggacaccttctttgtccctccctaccatacatgtatatacttaataatccatatggcaaaaagaaagagaaaatatttttagcctaagccacagggaaggagtatggatacagaggcttgggaggtgcaaggattgtgaataaggaaatcaattgttccatttaggcacgtgagttttagatgcctattagataatgatgtcaagacgtggaacaggcagctggacatactgcttgctgtagcttggacacatgtagggtagctttctgggatggtgacatacatctgattatcttcattatgcagattgtttttaaagttaaatttaataaaatcacctagggggtagttatggttagataagatattccaggagactaagtcttggaatactccagccttcagtgtttgggaggaaggggagggagattcaacaaaggagatcgtgaaggaggtgccagtgagctaggaggaaacccagtgcagtgtcgtctcttggagctcagtgtaaaaatgtttcaagaaggaggaagtattttatgtccaaagctgctgagaggtgaatatgatgaccttgtaagaggactcgagtcagacctttccactggacttggcaatttcgtactcgctggtgacctgttcaagggcagttttgagagtgtgtggggggaggatagagccttggttatgctctgtccttgtggactatacacacatcccagtggggaagataagcagtaaacacacaataaataaacaaggtgagagaacagagtagtgtgcttgttgctattacaaattaatgcaaatttcgtaactgaacacagtacaaatgtgttatcttaacgtttggaggtcagaagttcaaaatggattgtatgggaggaaatccatgtaccagcagagtggcattcgttctggagtctgtggaggagactctgtttccttacttcttccaggcagaccacttaccttccttggctcatagccctttcctcctcctccttcaaagcacaccactgcagcctctgcttccaccatcttcacatcaccttttgttctgcctctgccattcccacctccctcttataaggacccctgggattacaatggacccatccagatgactcaagatagcctcttactcttaaaatccttaatttaattacatcttcaatgtctcctttgtcatgcaaggtaacatatcaacatattcacgggttccagggattaggacatagacatctttggggaccattattcagcctcctatgctataagataacaccactgaatgcaaacctaggtctctgcattgtaacccttttcaccccagttttgaaaaggctgtcttacactacatatagcaaaactcatgtaataatgacctctattctaagtattttcttttttaaaaaaaaaagttttgcagttacctatcaatagaaaaagtaaggcactacatatataatttgatagagattgtatgatacagatgcaaagtgtggtaaaagtagaaaaggtaaagctcagaatggctggtcagagaaggaggtatcagatctcaaaggatattgataagtagtgatcagtaggatattgataaaggtgacagcacattcccaaatattgacagtgtcaaattcaggtttttccaaaaggttcttctactcctcctcttcccttccacttcccctctctgcccctgttccctcaaagagaattgctggctaaacgtcagtcttccaaggggcccaacaaaagacattgcttggcatctcgctagtgaacagtaggcctccctttgcaaatgtcacttgatatgagtcactacgccagccccatctcactccctgccaggtgagcaggattgcccttcctccatactgcctaaaggaatattggcctcaatcatattctctgcaacacgggcctggaacatgagcagggcaagttgatcagaagaagagaagcaagagagtaaaggctttatttactccaagacatgggacagcatgctttctgaactatcacagagcagaccaatggattgtgaccagatgttcctttttgcagccagaatcaatgccccaccttgccccactttctcaatgtaccaacaccaccctgaagtgcttcatgtagggtattaaaaagccactttctttctttattattatttatttatttattttattattattatactttaagttttagggtacatgtgcacaacgtgcaggttagttacatatgtatacatgtgccatgttggtgtgctgcacccattaactcgtcatttagcattaggtatacctcctaatgctatccgtcccccccccccaccccacaacagtccccggtgtgtgatgttccccttcctgtgtccatgtgttctcattgttcaattcccacctatgaatgagaacatgcggtgtttggttttttgtccttgcgatagtttgctgagaatgaaaaaaaagccactttctttagagaccatggagaaaacctggaggctgtgtttcacgtagctacacatacggggattctcgttttaaagagtgatgctgcatgactctgcttccactgccaaagcattaacccaacaaccaatattcattaaaatctcatcatgtgctgggcacagagtgggcaccatttggcctagcaggggataaaagacaatattcccatcatgaaaatataaaaagtcaaagaacaagccacaagatgctgtcaaagagtgcagaataaggtccaatgaatgccatgagcatacttctaaagggaaggtcacttcccactgcacagattagaacagatgatgaatgagttggagatttgagctgcagttcaaaggttggatagaaaagacagcaagtgatgtccaagtatgaggaatattgagccgaaggagagaaatgtctgagcccaaggcaggctcagggcaccatgagtaagtagatcagtgtatttgtttcctaggctgccataataaagcaccacaactggtgctttattaacagaaatgtattctcacacagttctggaggctaagtgtccgaaaccaaggtgctggcagagccatactctctcagaaggctccagatgagaatctactccatgccttcttcagcttctggtgttgccagcagtccttggcttgtagacacatcactgctgtctctgccctgtcatcacatgacatttcccctgtttgtgtgtctgtctttacctcttcctccttgcagatatgtgcctctgtgcctcttctccttttttataaggataccaaccagattggtttaaggtcccctactccagtatgacctcatcttaattaattacatttgcatttgtttccaaatgaggtaacattctgagattccaggaatgacatgaattttgaggacactatttaacctagtacagttagtttggcaagagcaaaggtatcaaagaggggaaaagatatcaaagaggagaaacagacgtggggtcagatattgaagggcatgaatgctaaggattttgtttctattctgtaggcaaaggagattgatagaaggttttgaacttggaatagtctctaccttcaagtgctcataattagagagtaaaagattggggggatttaagagatgttgccatcatatagggtgggttagcgttggaatcacttccatgacttactaaaaaaaatcaaaaatcaaaagctctccctgaatttcagactctacatttcttttgtagggaaacactggaaatatactgtatattatttttcctttattctgatttccaggcaaaagaagaagagagtaaaaatatatttctgatacacacttaaaatgcccattttggttctgttaatacaacattcattatctttgtaaattgcttgtaatctgtgttggttgtgatctgagtcagtgttagttgctatcaaatagtgagccctaattcatcttcccttgtgttgcttcctggagacataaatgtcaacctagaatcatagagctgaaatgcctcaatctctacaaaccgctcaccttgcagaagaggaaactgaggtttgagtagtttattcaactttcccaagaccacagaactgattagtgatagagctgggtctagaatatgatccaaagtcataaacctgtgttttctctaatattcatgtgcttaatacatcccttactcaaggcaagcccagtcccatagtcagaaaaaaaaataaatttcttcctccataatctttgtataaacacatagccagcatctactatctgcatagttttcctttactctattccttaactcactgttaattaaacttttttttgagataattgtagatttacatgtaagtgtaagaaatcatagaggtcttgtgtactctttgcccagtttcccccaatggtaacatctcaatgcattttttaaatgacacttttccaaggtagggcgtatgaaatgtctttaaaatcacaatctcaaaagcaactgtttcacatcaagtcaccaaactgtgattccccatcccttgtaccattaaattattattattattattattatttgagacacagtctcgctttgtcacctaggctggagtgcagtggcatgatctccactcactgcagcctcagcctcccaagtagccggacttacaggcacatgggcacatgcaacgcctggctaattttttgtgtttgctagagatggggtttcaccatgttgaattcctgagctcaagcgacccacctgcctcagcctaacaaagtgttgggattacagatgtgagccactaggtccaacccccttgtaccattacattctaaaatctgctcttgccatattctagaccaggtctacatgagaaagagaaaacatgactggcaacaatgaccagcaaatagtattgggaaataacttctcatgtgagtctagggagaatagagatacataaactaagccaatgtatgaatgtctccatggcatcccaaggggaaggcccttgttcagagcattgccaaacatgtaccaaagctcccgagcagaaataaagtggaatcattcaccacacccagatatttacttggatatcatttcaggttttagcattacagtgttgttgatgggtggttccttgttttgaaacaactttctagccacccttttttaaaaaattcattccactaacttcctaacctagagtaggtcagaatcttttccgtcatttacctgggaaacactgagacactgagtgccttaaatgccacagtgaaatcagaagctaaactgggatgaggaagcagagttacctgaataatcacaataaagccattttgcctctcaagaaatcttaagctaaacagaggaaagtctaatagtgaacacgtccagaggacgaccagtccactggtggttttccatagctaggaccaggcactcactgtgtttgctttcttcatctctggagagcagggaccaggatgatgaaagcatgccttttctttttttcctccttttaatcccaattcaaagaacttccaatgtatgctcaagagtagcatatttttaaaattccattattcagtgatttcctattatcaacaggctgctttttaaacagaagaaaaccagtaaaaaaaaaaattctaatttctcaatcaaggtcaaaggtttttagtgatcaaaaaagtatagatgtcttctgagaagttactaggaattttagtaattaaaattattcagtgaccttgagggcttgctggtgagtccctctcctgtgtgaatcaaccagtgctcacatccttggcaaccatgtgtaacaccccaacgggaagaatgacttgatgctggagaataaccaggctggagaaactcataacagaagatcctaaatctctctgaaatactaagagcaaaaactaaaaatctaagtggaaggaaagagccaaactcccatgatctcaagacagacgtgaaaaatccccgagagcagcctgctgggcggatgagagcgccttctctgccaggttagtactgacactcctcttcctaattaaatagccagcacagaaaaggccctgccatgcttctggttgcttaataaccccagaggcagacacgctgtaggctgtggagttccgtccttgccttgaatagggagcttctgacaggttctcaaccagcccccacaccttgttcctggtctcatcatcttctctgcctactaagaagccacttatgcctaattggaaatttgaatttgtccaattcctctgtcttcctcccacctccaggtccttggattaccagccagtggaataattctgcagagcatttcctggtagtcctcttgatagtgtaattacacttgcccatgtattacacgtccgtcacgtggatccttagctcttagatatttctcatcttgagtttctgaattttcagctctgccctttatcttcctctcccaatccaagatccaagtccatttatatagagaaggtccttgttttgccatctccctcctcagtctcttcaactctttcaacctatcgttggcctacctaccttagcttcatcccctttctgtcactctcatgcatttgctggatttatcatttcctctaaaactttacaatggggtaaaactaaagaggggtgcagaaatgaggacaagaaagagctctgtctctaggaagctcatgcatgttaagccatgtgagagacagggggacccgccagtatctactgaagtgtgagtaaaaggtctgctcaaatttgggattctgttgattctcactcagatcactgatcttagggattctacgttgagtgcagagtgtacttgcaaacttttaacgggggctgacaattaaaatggccccagatgccatttgagagcacctcgattaacacaaaaatctctgggtgtgttggtgcatcctccctctatctgctcagagaaccagcaatgtaattatgttggcattgaaacagaattcagccctgatgataacaggcctactgatcaggagcagtaggatgtggccattgcttgcaaatgctggttttgctatcatcttaggacatgtgactctaagagatgataataagatgagatttccttttttacccatttcatgcttgacaatgaatattattttgtagcagtgattggcagaaatagtaaaatacttaacctatctaacagtatttaataaaggtcttttgtctccaattggcacagggagtttagtttaaggcttatatatgggaacattttaattaatatgcatactctttctgacatattttaaaataatacttcactaacctaatgtcagagtcagaagcttaaaatatcatcaggatcacagaaattgtaagtgtggcaaaaaaaggcacttcagaaatatttgttgaatatttgacaactgaaagattgagttgcctgtccaatgagaatgacccttagatttagtggcttcttttttttcagatggtgacgtttagagcacaatgcatataacctaatcatcttcaggtacaggtcatcaggaaatggaccatctggtaactcaaatctattcacaaatgccccttcacatttttaaaatgtctacttgggctaaaaagttgaaagggataagctactagaaataaaggtgttagagcttgatccctaaaagtcagattggtgtgaggaggagcaaaatttcttagctctatgtccaagttgtaaaaataattgacaagtttgttttctagttcatgaaaagaattaagtaccagaaaacctcaactctgattccatttctgccattgccttgctgtgtgctttcagaaaaattaataaacctctcttgatattgggttcctttaaacaggcaaagtatgtttaccatccttaattctccgcattgttatcagaaacaaatatattacatgtgcaatataaagtgctatcagtgatacattaacgacccatgcaaatcgttattgacttggaatcaccatcgcctcttctccattctcctctgcgttgcaggggataaacccggagccacccactgttgctagaatccctttctccatatggttccaggcaacagtcagccaatgagaggcattctcatgaggtgtggaggaagagaatccattattccctagtgggtagtttcaaatagatgtgtgggaagattgcagacatgaggttagcagtggcttctggaaaagcacctaggaatcacacacttcatcctgcgagtagctgagatcaatgatagcagttcatgaagacttttgacacttgtagcagcttcctggtgagctcccatgaatcacccccatctggttgaaatttcctttatttttcactgcccttcccttttcaacagcttcctaagccttgaaacccttcctccttggaatccctggatgggcttctgttttcccaagtgaaccctgttgatccatgaccttaaaattcatggatcaacagcttgcttctgaatcatgccaatgatctttaatgtgaggagaaagttattcattcaaaggaaaaaagtcctgagtgatttcgtttctggccatatagcgaaaccgtaacatgaaaaaaaaatatttcataagacacccaaaacattgaataaaaatatttcttaaaaatctttttaaaatgcttggcttaccaacaagaaagtaatggaaattcccaaaactaaaataaagcagaataaaaggtaccaagaagagtgaggtaaaggcaatatttgaagggataaacattgattatttcccagaatgtatgcaaaagtaatcctcggattcaagaagtgcaaaataaattccatacaggactaaggctggactgaaaccactctcatctacctactgtgtgacacgacagaaaccttagacagaaaagaagacccaaaaattaaccagattaataggatggatttcctaaaaagaaaccatggctagatcgatagctgatttcttcatagcaatagcaaagccagggatggaataatagctccaaagtgttgaaggaaaaaactgtcaacgtatttactcactgaaagtgtcttttacaatagaggcaaaataaagacattttcggacacactagagcagatttccccacccacaagtcttctctgaaggagatgctaaagggaatactctagaaagaagaaataggatctcagaacggaggtttggatactaaaagcaatggaaaagaatttgtccaacatgtagtgattaaaaatacaaaaaatcccccaaaatgagctaaaatgctgagcaaaaatagagtgtaaaccgagagggggtgattggaatagaggtattctaaggtcctgttggagtgttggggggtgaggggctacagatagtgacctatgtcagccatgaccaggttaaataagcacattataatttctaaaataaccactctcataatacacatggagggtatgacctccatgtcagtagaagaggaaatactgactagaaaaaaatattaatgggaatttgaatccatggtaagacactatcctgacatataggaatacattggaagtggtatggggtagattagattcatgtgggagacaacatagtgaaaaggccttttgtgcaagcttatgttccttccctgctggaagcatctctacttttcttaaaggcacagatttctacactatgcaactaatcactaattccagttaataatgtagtcagagccaggagcagtggttcacgcctgtaatcccaacactgggaggctgagccgggtggattgcttgagcccagaagttcgagaccagcctgggcaacatggcgaagcccatctctacaaaaaatacaaaaattagccaggtgtggtgatgcatgcctgtagtctcagctacttgagagcttgaggcaggagaatcgtttgagcctgggaggcggaggttgtaaagagccaagattgtgccgttgcaatccggcctgggcgattcagcaaggttcttatctcaaagtaaataaataaatagattaaataacatagattggggaggatcatgtgcaggaggtcagagtacatttcagaggaaaatgcaaagtttctaaaatactcattttaaagggataggcatcagcaaagaaagagaactagtgattaaagaattcattttgttcatccttttattagggacaggctgctatgtaataatgctaaattgtgattatagatgaatttgctggagtgttgtcctttctgatcctctcctggaggagaggcccgtagggtttctggcaattaagaaaaggctcttgatcataacgtgattgcttgaggtgttcaaattgcctgcctttcaggctaggcaatgtaacaattaaggatgagtttgtatttgtttcctggtgcatgctgtttatttagtttgcatattattaaagtctcaggattgggttttaatgcacccaggattgcctgatttacttggctgttagtatcagcatggaagttatgcacacaagcctacagaactacctgggcctcctcaggaggggagaggtgaaatccaagtcctatttgttaattgggattttccgccattcagggatttaaccagaaaccaaactctcaggtctgtcccaggcctgcactggctgcctaatgtcccagggtataaattcttccaacacagtggctgttttttaatttttccccaatttcccaacctcttttattcttgtgaatcatattggggccttttgtccctttggccttactggaagcagaatggcacctgctgcttgagcaattttctgagtcctgttctctggcctccagtctttggaactgaccgctctacaagatgaaagtaaagatgtggaaagacaacccttcttcctaccacccgaagcagaggcaaacctcaagtcatagcttcattttcctgagccctgcactgtttcttacaaagatttacagaggtgggagaagggttggctaattgggagttcctttggggcagatgttgtcactcaagcacacaagtgtgcttcttggaatggaacataacccgagtgttgccctcagacctgtacttaggatctattcttattctgatcattcatcatattctagtcaccaattatctccatgttaccaaattctgggcacctgtttttgcccccatcttcctcacctctcagcagcactgggcacctctctctccttgaaactctgcttccttaaccctttgatgccacactcccttgttcttctcctacctcggtttccgcttggatcccccacttgccctctaaagggtgatgttcttccaggcttcccatgggacctctgctttgctaatgccctttccccagtaactggcatccattcattcccatggcttttgttctttccatgtgctgagtgtctagctcagatctcccttgagttccagatttgcatagctagctgctacctgaccttgctactgtatatatcagtaggtatctctgaatcaacatgtacagagctgaatatattctattctcactgaatatattgtattatattataatatctcactgaatacattatattctcatctgttctgagcatctccatctcaggaaatggaaccatcatcctcccaattgcccaagacagaaaccagcattgaccctgccacctccctccactctatccattccattagctactctcatccattctacctccagaataggtagcaaatctgttcactttctagttccactgccaacaccctcgtggccacatttatttctcacctaaatacaacatctccaaactggtcctccagctttcattttcaggcctctacagaccatggcaaaatcgattgcaaaatgttatttccctttttagtactcagcagtggcttcccgcttcacttggaataaacctgaactccttcctatggccaacaaaacctggtaaacctgggccctgcttaatgctgcagacacagattgagcttctctccccctggcactccatgttccagccattccaggctttactgtgccctgcagctcttgaagttcattctcctacaggaccttcgtgcgtactgcacccttgcccaagatgctccccatctgctctcccatggctcagctgtagcttttagaacacatcttggacgtggtcttctcagaatggcttttcctgactgccttccatgaagtacgtgcctccacttgtgttctggtacctagattcctgtttgttttccttcatagcacatattgtgattggtatctgtttccctacttgctcacaggaaatcttgcccattgactgtaaggtctgcaaggccagggaccacatctgtccaccttctgatccttagcacctcacacaatgcctggtatgtggtaggcacttaatgattatggcatgagagaatgaatgaagacttcatctcttacttcagtagtttctctatgaccttgactgaccccagagttcttcttcctttggggtggagtgaggtgtgctggggccaagaagcattagaggcagagggaaagcctttagcaacccaagtgtcagcgtctgtagctgacactgtatatttggacactttggagtgttcttttatacagaaagttataaatgaggacactgctaggaagcttaccagtgccttgaaatatctatagggcttttggttgttatatctgagacacgtggtctaatcatgactgacttacgttcaaagagatgcatagagtcataattacatatattttgcttgaggcgaatcaatgtctgttctgattggtgcggtagctaaaagcatatactctctggcagaaagttttctaggctgatactttcctctgtacatccaccgtggtcagatgttaattaggtaactgtgtattcatgtctccaaagaattagtgaatcaaagaaaaaaggaggcagagtctgcaattaagcagaggaataaggacatgatcatggcagtaaccagatgaaagagaggccatcaggggaagaggagaaacagttgaaaaaagaaacagcccctttctgtctctgtgaaagcctgtgataggtcagtttccctcctcatcactattgctgggctgctgctggccctgggagacatacctgatgctatccaaccaggggttcctgttgatgggcaaagaagctaggaatgaggttcatttgttgtgcatatgaaaagtaaatccatgcctgtggaattccacaaatagaaacagaacaagtgttttcatggctgctatggaatttggagttttaacagtccaatagcaatcaagtttcttcttatgttgagggcagaataaaaagagaagcctcataaaaacagaggagatttcagcgtttctcttccttttattagaaactaatttacccatgaaaattcagcttgaaagctaaagtgccctacacaaacaaacaaaacaaacccttgtgctttttgtgtcttctgaatttggaaaccaaaaagtgcacaatcatttcagaggggtattctggagagctcgcctggtacaaattggttatgaataaaagcatgtgtgtgtcttcagcatctccctctgaacacaactaggaactcctaaaagccacattgtattattctgtggtgagaaggaattttgtgacctttggagaaattttgtttcagtttttcctgagaagaccatgataaggaagtgagccacatttcttggccatgggaatttgtctcaatgccccaggcttgcgttctcaggagtgtggtgggttctaagcaagtgggcttcttgccaactggtcctgcgttgcaggtgcccaaattttacacttacaaacttgttaagattcccagccaacctcggggttgtggaactgacggcagtggcctctggggagcatctctatgctgaccttccctcagtgttcaggctcctggctccacatccaagaatccgctgagcaggaggttgagccctaaaggtcccagacactcaacaagaaatggaggacttagcctggaaggaaggacaggctcattggaaacacaaggggcaagcgcctggcctgcatgcttaccaacagccttcttgtctggaaacctagtagatttggtgctcatgcctgaataccactccacaacattggacacatctctcctaaatagttctttccctcttttccttacctctggactttctgaccactcttgtcaatcagccttgcaaaatgcttttgttttgcctatttcttaaatcaaggattctcaaccaggatggattgtgccctgcaggggacatttggcaatgtctagagacagctttaattgtcacaactttggggagtggggaaggcttgctactaggtagaagccaaggatgctgcttaacatcctacaatgtgcaggccagcctaccccccaccacaaagacttatggattctaaaacgtcaacagtgcagaggtttagaaaccctgactcaactggtgtgtctccacagcgctttctcctatatgctttattcttcctccaactcatatactctttgggttatctcatctattaccacttaacccagtgatgtccatactctgatggctcccaaacctctgtctccagctggatttctcctctgagtgtcaaactcataaatttactatgctactggacatctttagcttgatagcctatagatggccttctgcttttgttttgttttgctcttggattcttagcaagaaaaaaaaagttcatggacgggcggggtggctcatgcctaaatcccagcactttcggaggccaaggcaggcagatcacttgaggtcaggagttcgagaccagcctggccaacatggtgaaaccccatctctactaaaaatacaagaattagccaggtgcaatggcacacgcctgtaatcccagctacttgggaggctgaggcaggagaatcgcttgaacccaggcagcagaggttgcagtgagccgagatcatgtcactgcgctccagcctgggtgacagagcaagactctgtctcaaaaaaaacaaaaaagaaaaaaaatgttcataattgaaaaagtaacctctcacatgtagttatatgtttttaataatagggaattaaaattaacttttattttgaaataacaaaacacaatttagtggcacattctgagatcgttagatacagcttgggaatgtcacaaaagctgttgaagggaaatccttgagtcttttaggataggaagatttttgccataactcattctttgatttaaacaaggacttgtggtctttcagtgtgaactccaaaggcttgatgtggtgctgcctactgtcgtctaacactttcagagcctcctctacataatgctttaggactcacctagtcctagattgacactgtagggttacaatagatgtaagttgaaatttattaatattttttgagttcaaagaccatatcttatatacctttcagttacctagaatgctgaagcagaactgcttctcgagagatatttgatgggtattgaatgaaggcatttcctaggaaaacaacttcttgtcttttacttttaggccctactcttagccattcccttctccactggcaagaggtacacacacacatacacacacacccacagagagagagagagagagagagagagattgactaaccctaaatcaactgattatgtgcatttagaaaaatcaccaatgagtagatgccattctcacaaaacagcctgcacatccctttagaaaaccctcataggtcagcaagggagagaaggccagaggcaggaaggagaaagtgtggaaacatctgtcatgggatcagtcatgcggaaggtttggaactgtgcccctgagtttgtgcttacagggtgctttccagaaccactattatctcccagggaaaccagctgcttacacactctgagcccttacttgacatcgtgatgagatattggaaacgaagggatagtgccctgagacacagtttcccaaaagtgagagtagatcccatgcttcctaaacttcctctttctttaaaagaacaatctccttcctccaacttggagcagctttccagagagctgcccatctgtttctgtctttaaaacaagtctccatgtgcaccatgtgaagccaggcaaagaagcatggaggagggtgaattacagattgatgaagaggaggggcatggaggagataccaagcaaaacctgggggcccttccacctggccccatctcagaatgtagagccacagaccagtgagtctcaagatcaacaaaggacagtctctgctggctctgtatcttctgacttcctgtagggctgccagctcctgctcagtggtgccttttcattgagtctaccatttagtgactatagagtgggcacccattgattgtttccaagagtcatacttgttcacaggctttcctgtagcccccatgttagtccattttgcattgctgtaaagaaatacttgagactggataatttacaaagaaaagaggtttatttggctgacggttctgcaggctgtacaggaagcatgctgctaacatctgcctggcttctggtgaggacctcaggaacttttcctcatggcagaaagcaagggagatgtcatgtcacatggaaagagaagaagagaggcaagagagaggggaggaggtgccaggttctttttaagaaccagatctcatgggaactaagggtgagaactcactcattactcaaacacaccaagctgttcataggggatccacccccatggcccaagcacctcccactgggccccatctttaacaatggagatcaaatttcaacatgagatttggaggggacaaatatccaagtgtattgactcccaacaccaatttccaagctttggcgtgccatttacagctgtgagaaatccttaaggtcaccagctggaagtggggttgattctgcaaccctgccatcctggacgcagcctgctatgtgggtgctggtatccagtgaagcaagtctgggttggcttcccaggctgtgcagaagacctctcttcctcttctgccccactttgtttcattgattcgttcattaatgtcactgatgttaagtggccagaatagattaaacaatgtggtaggcactagagagaaaatggtgaccctaagccttgagttgtttccatctctggaagactttggtcagtattaggcgaacgtacgagtgttatgtcatgatgggaatgagcacaggagccttcagttctgccaagaaagggcacctgctggagtttcaggattcagctaagggccactgagccctgtaaggtgatgtgaaggccaagggggctgagggagggagggacaggtgagtgctgtatccacagtgagagaggaaaccaggtcttcaggtgggagagcagagtaattagagggtgggcacaggaagaaagatagatccctgggacctctgcagaccacattaaagactcgatcctacagtggacaagtgcacaagaaaaagagtcaaaatgtgtgttaaggagaggctggagaggagtcctgaaaaaataaatgagagctttgccctcaaagagtttatcatctctttaagaaaaggaaggggaaaaaaacacatgaaattgacagtgtgaaaaaccaaatggaatactgttaagcactgaagcattgagtgcagaccaaaggggctgcagaacagacagaagagtgagcatcccatgagaaggcaggacgggccacagccttgcaaatacagaagggctggggatggtttccttggtgaggcttcttatttgcaataaaagggttcaacattagcattgactcttttaatttctccaagtatttagataactgtgttatcaacagtggtaatgcctgcacttgaggctttaaacaaagaataaaatcctggctggtgtccgattcacaattggaacaaaaacaaacaaaacacccatggggaaaatggtacttctggagttcctgtactgctcagatcacataaggctacaaaattataaaatattacctcctcactggcagcatctccttcacttgattgagcttcgttattttgccttcagatattatcagtttatggaaactagacctctgaactgtttgttatggggacactgttgaggtcactatgaggcttagtctcgctaaaatgaaaatgcagtggtagtaatttctttcaggcctaatgcctagggggaaaactttaatttctctgaaaaacaaaaactaggaagtgtgtacatttcatctctctctttttactttatctgtctgggaacatattgctaaacttgaatctcaacaatagaagcccagtaagccttctggttggtgtatttgtgtttcagtgttcttctgagttctaattttcatttctatcttctcatgttaataaatgggcttttttagtaaggtgtctcaaagatgtatggggctaattgggagagaaaaaattaaagagttaaaaaaatgaaaaaagggaagaatactagagaagaaaaatgggttgaaacaaaaggataataaggagactgagtagaagggagggagcctgctgagatgctctgagatgagggaaggtgtatagatagtggacagaggcaatagagagccacagaaggtttttatgctggggagtagcaacattaaaactttttttttaggtttgcccgattgcaacgtaccagactatgcacctgattatatgtaccaaaatagggaaaagctaagtgattgtaggtaccaaaatagggaaaagctaagtgattgtaggtaccaaaatagggaaaagctaaggaagtgatgcctgggaagataaaagaataagcagctatgggaagcattttggtagaaaagtgaatgaagtttgagtgtgaggagtaaaggagtgagtcagcactgacagcaggtgtgtagggtgttattattgccagagagagctcaataggaagaagggatttggatactttagaggggtggagagagaggggaagggggcaggaagaggtggatatattcctgattcctgattgtagggtcctaagatcccatatcttttttttttaaaaaaaatcttatccttaactggatagaatccaaattgtcgcttcttcaccaggctggattccttcaaagccaactagttttgtaatagaatgatgctttgagatattggtcaaaagacatattaacccaaaggacagcagtgtagtaagtaaaagatccctgaaaaattctcttcagaagattcataaagttgtcatttaaccacctgttcaagtcacataagagttcataaacaacactatgcttttcttccttggcccagtggggcattcatttctctttccagatcagtaaagactattcatgtttcccccaatgtcttattatgacaaatttcaaacataaagcaaggttgaaagaattttacagtgaacagctgggtcacctaccacgtagattccactgttaatagtttactgtttttgctttctcacaaatctctccacctgtgcatccatttattcatcttgtttttggtgcatttcagagtaaattgcaaacatgactactccttgccatataacttgcgtttgcaggctggggaacctgtgatagcccacctaggttgacagtggagatcaaagagaagtcagtggctctttctgtgggtggtttcgctccccaatcccttcctccccacgaattttaatgttgactctttaatgacagtagtgtctagcctgtgcacttgagttcctagaaagtagaaaagggaatttttacaaacccaattctctttaaaaacttcagtctttgagactgaaaagactcctacaggtagcatagttggaagttgttgttttttaagtcccatagagacataagctctatagcctacgtgcacatttccagatttccagatatcagatttacttaaagcaaaactgtatctttaatgatgtaagaaacatagagaatacagatggtctctgctttcagatacaaaatattcctaaaaatgtcaccgaccatcaccattgtctctacctgtagggagttagaggcagaaattgtagcacaggaagttagtgaggaaggaggtaaaagtttttagctggcaaatggatggtattatcaaaaccagagattgccttactggaatttacaaaacaactattactgcatgcctttatcgcatgcaattttcaagcttaagaaatgtgacccagcagcgtaataataagcctggatatgatggcattcgattaaggtttgttttgcctccatttctatgtctattgtatttacatttatgttttaattgatattttggtcatgtgttttccccaaagagattttgtgaaggcttccattttctaaaattaaaaaaatgatatatttgatatattgtaaacaaaagaaatcctccttaatgtactcagaaatgagatcttgttagtgcactaaaacttcacttaaaaatatttatccgtaagtaccataagcaaaccaaaggtattattgcagagacttggaggaaaggacctcagtttgggaagagccaatatcaggaactaattcgcagatcggaatgtggcctgaatagaggagagggagagagtattaaggcaaatatgcagcaggtgatatagaaacaacatctgaaggagaaagcctcttgatgacccatctgagagggtcaaagtcagtgtatttatcttggtcaactcaaactcaacacaagagatagtccagaagggaaatgaaatagaggaaagaagcagagattatatattttttatgttatcatctgattttgcaatatgtaggctctctgaattttttttcactggagaaaattaagtgctcttgtccccgcaggaaacttaggataagagtgtgatcagcctagccttaaagattcagtttctggagcttccatgacagtgataaagacctgtcggatccatgtgttacctcaatgattaaggcttgcttctttctcaagggtcaggcaaacttcatcctactgtaagtttagcctcatatgcagggaaattgtttaatggagccacttatctacctgtagggggtgagtacaaacaagtgctcaaatcattatcactattttccatgttgtcactcatgcaaccctgtacaaattttccatgggctggtaaatcttagtacttatcatctgcaaggctattttgtaagcagagaatctactgtgattattacactaatacttaaatcaatacttcatgcttgtagttctcactccaagatatttaggtgaaagttggcattttatggaggatggtggggggaaggtataattgagtagaaaaggatgggagaagaacatctctttataaccgttgcatttggaaagagacatttaaaggaaaatctaccaaaatggtgactttaaggacaaggaaagatagctccactagatcccctctgtttacgcatgctattgtttcagcccatgatgttttgtttactttggaaggaaatattttaccccctctgagataattaatttttgtcagcttcactgtttgtaagggaaactgagaaactgttaattgaaatacagagtgagtcagtgtttccagtaatttttggcagcattctaatttgtgtcaatcgcagcctaattattagattttttggaagcaaaaacatattttatttttctcttactgaatttgttcttcctttttttttttgaaatatgtgctgtctgacaaaggtcatatgatttatgtcaaagtgaggtgaaatacccatacgcttgaaacaccagaaggcttattgcatcatgtttagctcttcactgccgctcaatatttagaaggctcttttcctacttcctaccccagccccgaccggaaaatgtgattcttgcaaagaccttttagctaggatgaagtcgaggtatatggcccatcactaatgacatcactgaagtaaatttcccagaagccatcagggagaattcatttggaaatccaattgaatgtcacttgcaaagggcaggctcctgaaagaggtgaccagtcatgcattcctgagttgtttgttataaaagcattaagcactgcgaactcatttactcctaacgcgaacacactacattattccacaggaattctgttccaaatgatcgttaatgtagaggacgggagctgctgattgtgggcagggttaataaaattcatcagatcaatggccagtataatgggcttgttaatggtttttaatagaggttggatcttcctggcttcagcagagtgaaggctgggagagaggggcaggtggctgtgccaggagacagctccatctcctgcctgctgaggtggcctctggatgaagagagcatccctgttggtcactgagcatcagcagggctccaaggtggccttgactgggaacgcaggcaccagctgtgggctggggagggagccccagggacaaccatactccagcagctggcatgccacagcctcttgcagaccacaggccagggttcatctaagcacctgaagccatggatatcccaggcccttgcttgcaccccaccctgggcccaccgatgagatgaaagacaacagtcacactgataatagtgacaaccccagcaaatgctcactgaagctctccagggccaaagactaagcatattacacgcactcacgtcaatccccatagcagcatcactagaggtatgtactatttattgtccccattttataactggggaagctgaagttcagagagatttggtcactagcccagggttagattagaaactgtgtgcctttagatgccatgctcttttattagacggagagacacagaagctgcagcctaaaatcagactgaagaaatatgcaaggtgcgacgggggcctgggagtctttccatttgtttctccaaccagtcagtatgttcaggaccaaccttgagcaaattatgtaaaagctgtagcttgtctgcaatgctgttcctctaggcatcgttagtaaaattcagggtgcccagggcccttgagatgcccaggtgctctgggccaccccactgtggccttaactggggcaccctgagaggtcctcttcacccagtgctgccctgtacttacagcttggtccttctcaccctgctcctgcctcaccaaaacttgacccatttctggtcatctgtgggtcattatgatatccgactgccgtagccagatcagctcggatgggaggaagctactgcttcctggggatgcctcctgagcacaagtcttttgtgaatgacagcaaagactgcccagagccagcacccagagttccagctgcactgctgggcatgggaacgcaatgacattcccgagctccagagactgccctaactgaggggccaacaccgctgccctggggctcaggaacaagatggggcgggagcttgcaggtggagactgtgggtgaaagaggcagccacgagctgaggaaattggcaagcaggagtgaaggaggaatgatagctggaactacaaaaaacgcaaaatactagcactactagatgtttccagtaagctcagagggtggcagaaggacttcataaatgttatcaataaatgaaaacacatggcacacatactccagtgacctttcccaggtcagcttctataacccaagatgggagcaggctgcagcagtctttgcatctgaaaacgccatcattcctaaagttatttccttgattatgtcattttaaaaactctactgttaagggtttggaggatgtaagaaaacagatggttataaggagggggtgatgcagggaaggagggggaggacataggggtttcagagggaggctcacgcataccccacacacttaccaccctcagcaggactgagctcagttacaccatgctaaatgcaacaagaaacgcagaactgggtggaacgtgttctccggccccccagagcgtacgaatatacaccataagtgctagactacatggcacaggatataaatgcagtcgagttgactgagagaaattagcaagaggaaaattcagagacagcatcatggaagattgcactggctgcaaagaacatagaggatttgaatcccagggagagaaggcacagtccacacagggagaggaagcagggacaggaggctggaagtgcgagcgagcatgctgagcacaacggagggtgaaggagacagcctcggtctaacaggggggttgtgtgtgtgtatgtgtgcacaaatgtatgaatgtgtgtgagagtgcaagagtatggatgtgtgcatgtgcatgtgtgtgcacaaatgtgtgtgagaatatgccgaagtgtatatgtgttagtgtgcgtgtttgtgcacaaatgtgtgaatatctgtgagagtatgcatgaacatgtgtgtgtgagtgcatggatgtgcatgactatatatgcttgagtgcgagtgtgcatgtttgtgcatgaatgtgtgaatgtttatgagagtatgcatgagtgtgtgtgcgtgtgtgtgtgtgtgtgttttaggagagggccaggcacggtgacttacgccaagccgccaagccagcactttgggaggccaaggcgggcagatcacttgaggtcaggaattagccgggcttggtagcacatgcctgtaatcccagctactcaggaggctgaggcaggagaattgcttgaacccgggaggcagaggctgcagtgagccaagatcgtggcactgcactccagcctgggtgagtgacagagcaagactgcatctccaccccccacccccgccaaaaaaaagtagggagaggggagcagtgggcaataagcaggaccagagagagggtgagacacattgcaaagtccttggtagccagacagaggagtttggactaatgtggtaggtaagagggagccacggtaggtccttgggcatctagggagcatgacctggaaagcttcatctagcagtgtgtaagaggtagactggaaggggaacagagaattatgggcactgtaggcaccctggacaccctgccattctgatttgccattttctctcctgcagcacactttcatattccccatcacattggctgaagtcgtcctcaggcctcactcctatccatcaaagaagacaggactcaccttgctggctgctgccagcattgcttacatcagccggtaagaattacatggagaaagtcaacttaggcttgtcgttcaagaccctgagggaagttccagaaatgtgtactgttctgtcagaatccctttatcttggtttaataaggatttaatcatgtttacatttccaggtaagaagcattcttattgtttgattttaatgctcatggaaacctcccaagcacagaaacatgcaggtgtgcacacacatacacagcaagtcacaacttcccctctctctctcgtgaagaattaatcattgcaaagccactcatcttgctttcccaagaaaatgttgctccttggttctatcttcaatgaacatgcttgaatggctgagggatctgaggcatctaactacattctacctgaaaagtcatttagtgggcagagcatgctaggtttgtccactcctgttgcctgtttcattatgggcttatttgcatcagcagctggcatcagagctcctagaaggcatttgggcaattgcatgggagatgatttctgtagctggcctagatttcgtcattcaaccacctggcaatactcattttcagaaacgctgcccaatagtctataatcaagggaacgtgcttggcctttcacccagtgagtgggaaacttttcttccattctataaccttctcatctagcaccatgcttttgttccttctgaaagaaagaggcttgctgaacacaagacctgcagattggaagctaatcagtgttccttctctagactcacacaagctattcatgtgtgacaatctggacaaccctccgatccctatatgcggggaagtttagttcagttcagtgctctgtcagggatggaagcgcagagagagagagagagagtgcattccaaagaacatgggctctagcagtgcctgttttatggactcgaccagcctctgtcttagagcaaataaacttggtgcccagacctcatctgctgttttctccctagcccttccttcccttttgtggtgtctacccctcccacctttctgtgcccctctttccctgagtacccaaatctttcttctcccatcttaaagaaagcacttgctcaataaatctacccccagactccagtgctctatattgttcttcagcctctgaagcctttacattttaacaaagggaatttcagagaacgaggcttaagcttgggtcctactgatagttgatgtctggagcactctgttgaaaaggattctgaggcattaccaagaaaaagttgtgtgattatttggcaatgactttcaatagcatgacaatggacagtggtaagatatatgctatgtgtttgccatatctggcttaatacaaaggaatatatccctaaagacagagtatctgggacctggattggggtaagagtatagacacataaagattttgttgttgttgttcttgcatgtgttgaagagaagcaaagtggaatctagctgattatacacatgaatttgtatgctgtattttttttggtggtctttaacttactcttttattgccaagtgtaaatctggtagttcatatatatgttattaccttttacttactaatgtcttctacctaaggacttgtaagttgattttcagttcacatatctgacccttgtttttcttttcctttttggggatgaagaagatgaaaagcacctaaggccactgctgttattggggaaaattgtagtggctataaaaatgagtagtagaggccaggaggttggtttgtcagtacctgggcgggtgtccccatgatgcaggtaattaggatgttggagaaagaaatgccacaggatgggagccaggtacaagtgcatcgttatccattcagtggttcaccagcgccaggcactgtgctaaaatatggaggatacagtgaagttcaggaaacctgctacctttagaggctgtccgggaaagaggagcataacagacagtgggagacagggtgataggactgtaataggcataagcccaggatgctatgggcacacagagagatgtgcaggactggcttcttaaagggaagcactgtctaagctgaggcccaaggaatgaataagaataggtcaaaagagacatggaaaagaccttcaggcagaaaaaacagcatctgcaaagggctggaggagctgagggtatggctgaattggaggacagggtaaagccaggtcgtaaatccacattagtgcgtttggacttttaaaccaagtgcttttctgtagaaaagtgttataatcagaggaatgaaatgatgtggtttatgtaagaaagctgattagaaagatgattctggctgaagtgtggacattagactgaagaggaacaagacaggtagaccagttggtggcattgctggtaactcaggggagttgatgttagccaactgatgataacatcagtcaatccacaaataaaatcagagagtgtgaacaatgggaggtgacttagagatgacttagcattggaaaactaaatctccagtagggtagatgacatgcccatggtcatatggcagaggtggggtagagatgcaaagctggtacttgagccaactaaaactgaggtctcctctctccaaatccagttgtctttccactgtgtttacatggccaggtatttgttcaattcccagtgtgtgcaaaaccattcagctaaatgctggatggatgggcatgcacaaagcttgacctagctctgcactttgaaatctttcacgtgttgttcccagctctatgtgcttggattagacattaaagtactggtaatgaagggagtggagggaagggatggagacctgtcaccagcaggaacgtgactgggtgagccccagtgcccagtggggagctgaggtggtttgggatttcgtccttcatgaaaaatgctaagttggtatttggtccactaagccccatttttgctagaacaaatcaaatatagacacttaaaggagggtgtttgatgtgatcctgttgatggaagcatctctatttctgctcacgccctggttagaggagctcagactctttggtgcctgccaaccccacccttacgcagtttccagggcccctggctcctcacagccacagatggccatgaagttctacaaactgcagacacccatggagacgttttagggaagtggctatgggcccactgtcagatgtgccagtttggacagtcaaatggggaaatggcataacacgaatgaggtaaagagcatgggctcgggccagagggagcgtgagaaacgaacatgagtcaggaaaacggcactgaagctgagctggagaagcatttcaccgccgaaaccatgttcaaatgacctaaaaatagttcctgagaccgtggggaccgccttacatgtggtggttgcttttagttatttttcagattgcaaaattgaagagctctcccctaagtgggaaaataaagctttgcaaaatagtaatgactgcaaagctttcatttcctttggaaagcattagtcacctttaaatatggtagctcacttatttctcccttctctcctaccccaaaacacctcacctagttctccctgaggcagtggtgaggagcaaaaaaatagaaatgttccttctgctggtttttattctttcttttattgaataaatattttccctaacacatggttggtcctgcccagaaaagcaatgttatatcaggccaagcttcagcctgcagggggtttatccttaataagtggagatgacccatgcatacaaattataagtgcagaagatggaaagtggtaaaacctcataaaaaaaacacaaggagccacagaaaaggaagagtttgcatccagctgagcggtgtgggaagggcactgtggaaggcatgcattggatctgagccctgaaggaccggcaggattggagctagaaaaaatgagagaaggtaaacaaaaggagcacagtcccaaggccaggagagtgcagaaagcgtgagagcaagggtcagtaattctctttgctggacctgtttgtgaaagagactaatgagaaatatccctggaactacccactcatgaaggcttgcagatggcagactagaggatgttggacatagtatagaaaatgggagcatttgttgttgctgttgtttgtttgtttgtttggagtggaagcaagggtgagcagtatttgtaacttggccagcaaattatgctttaaaatgtcattcttgacaatagtgcttcaaataagttggagtgacaagagatgggaaacaaaataaaatataaaccaatataaaaataaaaactagccagcacattatgtactttgatcacaatgtcttagtttttatgtatggttatttcacagttccagtgatatccccaagcacccttctgccttggaggtcttggtccagttttccaaggagttccaataatctgctgagtgctcacacatgcccctgtcgtgcactgcacaacccatgctgcacactgttctgagcattgttcttacacacagatagcaaaactgtaatccccactgggtccaacatccccacctggcacagtgttaagggttagcacaccatgcccactgctgatgccaacagtgtcatttacccatcagccccctgtgttggtagaattaacaatgttactcgccacagcaaccaccccagctggcctggagtgcatcatcacactgctcttggtagaccagaaacctactgatgctgcaggtgtccctgctagtgtgtaaagtattgcatgccccgtacaaacactgcacagatatgcagctgtcacccagccttggggcagatgtttgtaaagtcccttccccaaagtagttgctatgaggcaagagagagaattactttcttttatactgtgctctccagggtaagatccctcagcaaagcttcctgggttcccagaagtaacagttctttaaattcatgcctcatttacaaatacatgtacacatcttaccctgagaatacattaaaaactgccaaggggtggactaagctgagttccaggaccagccaccttgccatttccagaatcagcaattctcttcttctctttctggtttttattcatttttctattgaataaatattttccctaacacatggttggtcctgctcagaaccaaccatgttgtgaactccctaccagagccactgttaccgtttccaaaatatgaccttcaactgagatcatccaggtcaaccatagctttataacctcaactcagcagggattggaatctcagcaccattttccacagaagaaatccttaccctacctgtaaattcatatatgaaaattaattaaaaagatgccacacaacacatccttgttgtcaacatgcggggtccagcccagccaggatccaaactgaagagggatggaggtggaggactaggagaggagagggtatctcatctcctgctcttctcatctttcctgttcaaaccttagttcttattcaaccaaaatgcctgtaacagaaatcagaaataataacggcatgaagagagtaaaactgtagaatcagaaatgagagacatgcctgagacacattgttgaaacaacagaataggttttatggattgattgacatgtaccacacaaatgaaaaggaaaaattaggataattctaaaaattttaagttagtagacaagaaaaatggtgattccattgatagatgaaaatgaattgtgaaagtaatcgtcttgggtataagtaaaacagtcagtttaatatcccatatctaggtctcatttcaaaaatactctggtttaattggttcaggatatgccctcagcattggaatttttaaggccctcaagtcaattctaattttgagacaagattgagaatcacctgcctggaggaatttccattcagaaattcagaccctgcagtctcaagaaagatggggctgaggagatgcagctagttgaaccctcgtggagtgacaagattgctggaaagagagagaggagagagggaagataagtaagaagcaaacaccagggaaaggccctcctctcagggacaggagggggaaggagcagcaaaggtagcaaggaattaccaggtagtagaagggcaggaagttagaaaaccatgggccctgaaggcagagaggcttcaaactggaagggggtgtctcagggaggggttgggcaacagctctaaatgccgtgatgaggttgccaccccaatgactctcatcactgccgacacctcaacatctaggtaaactatttgactaacactctagccttgcagtttctcctgactctttctgtttgatttattctcctgggctggaaagacgtgacctgagggttaacaccgaaagaaagaattatatgcccaaagcccacaaaactccgttatctgtttatctgccacccacagacgtcggtatttctctactgataagacgcagaagttatgaatttcttgacagccattataatgctctaagatttaggataaggagaccctaaaagattaatttttggctgccatttggtgcccacccagtccaactcacagaggttcacgtagcagatggctcaagaaagatgtgaaattgctctttgaactgaggggcaacgtcattggcctcttcaaagtattagtaaagtgagattaaccaaaacttgaaaggccactgggtacatttccaaatttccagagcctgtggtggtcttggtgagtcaggcgactgagagccgtccatagcagtgtcctacagagccacccaacacagccattcatttcaaaattcaaagaacctgctgcattttgggcacttggcaaataaatgtgcctgacagagacagtccctgcccctgcagagctttcaagctagtgagaaaaacaatcaaataagtaacaaaggtaagttccagggtggaggaagcacctggcgtaagcatttacccgaatcagggttgggggagagagcttcaggaaatcttttctagagaaatagacttttaagctgagatttgaagcgtgagtaagattcagccagacacagggcaaagagaagtaggttccaggaaacaaaaaggtcagaggtgtacccagtgaagacaacagcaggtgtgaaagccaagaaactgcagcgctcagttcactcaagaaacaaaggggttcaatatggatggactgcagatctccagatggaagcggggcatggccaggccaggtaagcagctgggatcctgggattcactgcaggcaggggagggctgtggacagagctcgcttttaggaagattaccggattactgatggcttgcaataggggaagtgggttgaaaggagcaagaaagcctagttggtagacaatgacagaaacccaaatggaatgaaggaggctgaaggaagattgtgaaatgtgtgcgctgaagaaacatttagaaggaagtttagtatagatatgatttcatgggatcaaacttgggggcaagattgaatggagggctgacattggctgaaatagaagacatgttgaatgcaaagttccctccctccctccctccctccctccctacctacctccctccctccctgcctcccttccttccttctttccgtccttccttccttccttccttcttctttcccctctctcttcccaccttcccctcatattcaggcaagccataaagaagtgatgtcaactaacagtgtgactctgtcctcattcacgcctctctgctgagtacccttggtaaattactatcatcttgcctcatactctgtatctctgttaattttcctactgtcaggtaccacacctataactttccttacactttatctgtgaaagtacacaattcattagcttacctcgggaactttcttttacaagccttatgctgaaggaaacaaacatgaagtaaacagaaattttccaagcctctggggggatgtccttatttatagactatcttacataaatgtgcatgggaattcagaagccctaatttcaactatataaagtaaacaaagtgaactaagtgatgcaactttttggagtacattcagagctcctcactgactccaaactcctagccctatctacttgaaactgtttattttctatgccatataccttctttgtcctgccatgagaagtagccatgcaggtaagaatcactgtgggcatcctgtaatgcatccatggaacgcatatcttaaagaactctaggctggccatggtggctcatgcttgtaatcccagcactttgggaggctgaggtgggcggatcacaaggtcaggagtttgagaccatcctgaccaacatggtgaaaccctgtctttacaaaaaatacaaaaattagctgggcatggtggcgcacgcctgtaaacccagctactcgggagggtgaggcaggagaatcgctgaacccaggaagcggagcttgcagtgagccgagattgcaccactgcactccagcctgagcaacagagtgagactccatctaaaaaaagaaaaagaattctaatattagtaacaatgatgataattattgtttgttctagtcacctcattctcaatctgggaggaacatccagacaagtttgggaaagcagagtgataccagcagggcccaggcgaggaactaaatgccaaccctacatttatatgaccctaaaattgacacctccttagatacatttaaattgtggtaaaaggtacacaatatttacaactttaacgattttaagtgatttaccattttgatcatttttaagctctgtagcattttgtacatttaccttgttgtgcatccatcaccaccatccatctccagaacttttacatcttcccaaactgaaagtctacccgttaaacaataactccctggctcagtccattttgtgttgctataaaaggatatcagagattgaaaagaggtttatttagttcatattctgcaggctgagaagttcaagggcatggccctggctgccgacaagggccttactgctgcctcacaatgtggtggagaagatcaaaggggaaatggacacgtgtgaaaagggcaaaacctgaggggcaccctagatttataacaacccattctcatagaaaaaatccatttctagagcttactatcacaagaacagcatcaaaccattcttaggagatccaaccccatgacccgaacacctcccactaggctccccctcccaacaccaacacacgcaggaccaaatttcaacatgagttttggtacgaacaaacaaaccatattgaaaccatagatagcattccccgctgcctcctcccgcaaccacatggcaagcaccattctactttctccctctatgaatctgacattctaggtttctcatataaatggaattatacagtatttgtccttttacgactggtttatttcacttaccatgtcttcaaagttgatctgtgtggtagcatgtgtcagaatgttcttccttcttaatgcctatgtataagccacattttatttatccattcatctatcagtgggcacttggggagattccaccttcaggctattgtgaataatgctgctataaacatgggtgtacaaatatctcttcagatccctgttttcaattccttttttttttttttttgagatagagtctcattctctcgcccaggctggagtgcagtggcgcgatctccaatcactgcaagctctgcctcccaggttcatgccattctcctgccctcagcctcccaagtagctgggactacaggcacctgccaccacgcctggctaattttttgtatatttagtagagatggggtttcaccatgttagccatgttttcagttcttttgggtgtgtacccagaagtggaattgctggatcagatggtaattctattttaattttggggagaaccaccatatagttttccaaggcagatgtaccatcttccattcctaccaacaatgaacaagggttccaatttctctatgtccttactaacacttgttatcttgtctttttaaaaaaaatatagtatccatcctaatgagtgtaagacaatatctcactgtcattttgatttgcatttcttctagttattagtgatgttgaacatcctttcatgcatttgttggccttttatgtatcttctctgtaaaaggtctattcaagtcctttgtccatttttaattgagttatttgggttttttgttattgttgagttacaggaatattttacatattttggatattaaccccttattagagatatgattagaaatattgtttcccattccatggattgccttttcacactgtttattgtgtcctttgttgcagagatgatcccttaagttttacaccctagggcctctcttgcttcaccctactcccggtcctgaatatagcccttgactcttccacaaaccatttaacaaacttcaagtatttgaaatgacagagatcacccttgggtttctgaaagtttaagcacagaatttcattcttccatctgaattcctttgacaacgtgggatattcaaatttaaatattgtttttgaagcataacctggcctatcctaattgctacaagagatcagcagcttcaaagaaggctttctgagagcactcccattgtgccatccctcagtggagatggaagcttttgaactcttgtcaaatattacaatgtgccaagcactgttctgtgtcttttacatgtgttaactcccgtaatctttacaacagccttagaaggtgtatgctgtttggatcttcactttacacattgaggagatggggacagaaaggttgatgaaattgctggaggtaacatagctactaggtggcagagctggggtttgaatcacagaagcccagttccagattctgtgctcctaaccaatgatgaactgtagctgatgcatcagcttccccacatttaattttttaaagttatttcagactttggcaccttccagtgcagttggtttccagcaaactgcatttttaggcttcacttagacatcatggctcttctcctagcatttcttttccttctctcggcttccagaaatgacttacagcctatcctcacataagcaagatctgagcctccctgcaaatccatgcattactgcctaacactctatttatggctatatgcatgagtgaaaatcagggccgacagttaaatcctaggcatattgtgttagggcaataacgctctatctctgctccctcatccccgcagacttggagagctaagggaaagctgcacctgattcttagatccaaaaaagcaaaccccacttctctggcttagagccagcaaaatcaatgccataatagcaggttcaatgtctcagcaggccatacctctcagggaaagggatcattcatgttcccacatactctctttagttctttagctaacgatggttctatgtttgtttgtttgtttgtttgtttgtttttgagacaaagtttcactcttgttgcccaggctagagtgcagtggcgtgatcttggatcactgcaacctctgcctcccaggttcaagcgattcttcttcctccgcctccctagtagctgggattacaggcctgagccaccatgcccagttaattttttgtatttttagtggagatggggtttcatcatgttggccaggctgctctcgaactcctgacctcaggtgatccacccccctcagcctcccaaagtgctgggattacaggcatgagccacagtgcctggccctatgttctcttatattttttcaccaatgttgaatttaagtggattaggtaaaacagcccagcccagcccatcaaacagcatgtcttattgaatcaagttgatttacccagaaaagcctcacttctttaggtttgtgggaatactacagctgttgacaaacgtccctgatgggttctcttcccctgcctgggtaccagtacctcattaatcctgatgagaaaatggcttgtttttctcctcctgctataaccaccacgacttcttatttcctgcagcatcctatggctctactttgagacgggtacctgggtgtatcctgtgtttgccaaactcagcctcttgggtctagcagctttcttctctctcagctacgtcttcatcgccagcatctacctacttggagagaagctcaaccactggaaatggggtcagtgtatttctttcttagctacagatgcgcttcttccgtgtctgcctctccccttcacctggaaacagaaagaaaaactagccgcaaacagaagcaatgatgcttactgtctttgtccaaagtactcagacaggtcctgccaagaggtcctgccaaggcaagaggacagcgttgggggtggggcactcttttaaaggaccccatcaaaggatctcccctcctcccccaaacaatgtgtcatttaactttagagctaaaaataatcttctttagaaagcccaggacctagagaacaaggtattaccatccctagcatgaataaataaaatcaggggtctccccctaacccaagtgagggctccagggacacaagctttgaaaatatcaaggtttcattttgagggaagtgagtccagatagccctctcagctcctcccacctcctcccaactcagcagtacctcattaggctgctcctcagccttccataagacatttaccagatgaaatcacatcctagacttgagattgaaatcctcattcagacagagtcttcagcaatgagaatatgtcagtaagttaagctttctcgttataggtgggtacaatcctgttgcttcttcctaagaaaaaaaaatcatcttaacttagttaattttaaaatggaagatttcattctccttcctgcttcctctctccccaccccaccccagaatatttttttattgttggaaaagtaactaccagaaagtcaggctgtaaaacacccatgacttgcttccctaccccaggagaagcgcaggaactctaccctgattctgtatataaggatggcaaagagtcacacccagtcccccacatcactcgcccacatgccattctgttctatcaaaatagagatggcagaagtgccatcttccgcccaatctatgaactggtgtgaaaacataagcccgtgtatgcaaaaaaaacctgacagtttcagaaggttcagtaccagagtgtgcgtttctgagaggaagctgagaccctggagaaataagcacgcaacttggatgtatcacatgttttctactcttggagaatttgactggtttaagaaactctcaagggcaaaattctctttgaaagcaaacacttaaaaaaatggaatactaaaaattacttcccaatcaggattccaaatcacagaaaattatcgcaaaaaaaaaaatgtgttgacatttcagatgtgttgacatataattctaactagttttggctccttgaagttctgggtaaagatttctgatgcctccccaaatctctctctctctatatatatttaaagaagctttaagatataggaagtacagagaaaaacttgattacttagagcttagagaacaataacttttaaaatcaattgtattgagttcaataatgtattgagttaatttttaaattgttactctatggtgaattttaaacatccattgaattaaaaaacaaaattatcatcatatttattattattgaaattactattctcaatacaacgttcttaacaagcctcattgtttaagtactgcatccaatttttaactataattaggtctcaataaacagataagctggcatcatatggaccctcaactacctcatgtacatgcaagttttcaagtagaaagagacgattgtaaatgactgtacttacctctcgaggtctttctagatttttaactttttaaagaagagaaagggtaaaaggtcctatttaacatcagaataagatcagaaatgtattaaatcttgaacagatctttattaattataaataatttaatacgaattaaagaaaaattagatttgttaaagttgcaatgcagtgaacacttttacattgctgaaagctaaataacctatgtgaacacatttccccatgtcctattctactgaaaacactttctaaggcttcccccaattgactgaagaaagtccacacccttggaatgacacacaagggcctctgtgacccagtccctgctttggcttttgctcttctatatgtgtgccccagtggcaccaaactgctggttttccctccacgttgatgttgtttcttacgtccacgggattctgtgtctcctccagtctttgcctggttcatactcatgcatttcaacactcgcctcttccaggaagccttccctggtcagcccaggttggacttcatgcccttcccagtgcttccccctttacctcccagtcaccagacttaccattttatcatgactgcggttttactactgctttagggatttgtttttccactagacctcgggtgtcttacgaattaggggtatgtcttgttcatctcaagatccactatttccattagctttctcgttgcctcaatcagtgcagacaatagaatatccaagggccttttttcctaggtgtaaagtacaactttttgcaaaggtgttctggagacagcagataaggagtgactctaatggctgtagagtattgggcagggagtttaaggagtataggagggtgatgacaaggcgtaccagttagagagttgttgaagacatgcatgttagggcagaaagtattaaacaggggaaagagcactggaataggaatcaagaaagccacggtagatcgagaccatcctggctaacacagtgaaaccccgtctctactaaaaatacaaaaaattagccgggtgtggtggcgggcgcctgtagtcccagctacgcgggaggctgaggcaggagaatggcatgaaaccaggaggcggagcttgcagtgagccgagatcgcgccactgcactccagcctgggtgactgagcaagactccatctcaaaaaaaaagaaaagggtatatccctcacctggccgcaaaccaaccatgtattctgtggcaatgcacttcaattcctcagtgatcagacagcctctaagtagagtgaccaccaagcccaggtggcctgagatgatccctgtctattcctgctgtgccagtattcataaggtttaatattgtctaggcttgggcactcagttgactggttcccctactagtgagcctttctccagatcttcagttctggaaacttatagatagccacgtattctgtccaaagccagagctaagcctatgttttccctccttccacagcctgagccccctttgatgacaggagaaattcaaatgaatgctttagggaggcagtcgggggctgtggttagaagaaaagttctggtgccaaactgcctcagtctctatcttggccctgccacttgtacctgtgacactgagtgagacactgaaggtctctgtgccccagctttctcttgtcctagtggagataatgctagtggcctcctcctgggctcacggagaacctcagatgacttgctgaggatctagcgcctacagcaggacctggcatacagttagtcactgctgctggtcatcttattctccctcattctcccctttgagttgatgtataaattaccagtttcccagctgcaagtgattaaaggtaacagctacccgatagcagacggacagagatgatgcacgtcctcaggtacttacagcaaataggaggtcaggctattggaggctagaatctgttggaatctctgcttctgaaatcctgagacacaactggaatctctgcttccagtggcccaatttgaagtcaccagccaagcaccaagcggtcaagaacatcaggcgaagtatcagtcaagacccattcaatgtgacagtagctctctagcagtagttctccaccttggctttttacatcacagaaacactagggaagtttaaaaaataataattcccaggcctgccttagaccaattagatccatatctctagagatggtgactcgacatgggtattttttaaagcttcccagttattttaacttgcaatcgggatccggaaccgctgttacagagcaacgcttctcaaacctgtataggcctctgatgctcatcaaaatgaggatcttggggaacccggagatcttgttaaagtgtggattctgatttagtggatctggggtgcagtttgagattctgcccttctaacgcatactccagacatactgatgctgctggtctgaggacaaggctctattacatctcaggaccctggactcctcccaatgtggataattctgtctacggcatccttgtgcagtgtggtgctctcctgagtgggctgctggactgagaagggtgttggtggtgatggtcacaatagctgaacatctactcactttctccctcctcctgtgccacatcagtgggtgaatatggacaagagagcaagaaggacagcaataagaaaccatactgggaatcacatgttaaattggaaagtgtatgatgaggtcctcccagggcactcagttgcagggaactggctttgagcgtcaaggaggcaagtgttgtcatggcccacaggaaggtccttcaagaatgcactgaggctcaaaaagctcacaagaggttcctcagggccacctggcctgacctgtcaccatctcactccctgccctgggctagcctttctgtgtcatgaggcagagggttgggcaagcacagagtcagttactgggaccagtcatcccccaagaaagattcaatttctactttttgggaggagttagatggaatgttaacttcaaaccatgatagaagcagatgggggaagctgtctctggcaagacattgagagcttggctcaccatgaccatgactgaacacccaggcatgcccagggcaggttctcttccacattgactgggggcaagaggcaatcaggacatcctatcaaaggctcccttctctgccccttatgtgcttaattttcttttttttctttgatgattgatagcacacaaggatgctgacaccagcacacaagctcctcaggaagagaaaatcatcccacaagagatatggggcacagaaaggggctaaacacctccaggcccaaatggcagggcctctgctatgtgggggtggttggagagacagtcagcttatccagggcctgtgacccctctccctatgccccttgatggacacatgccaggagtcaggctgtcctttgtcagggcccctaagaccataggtccttctcatcctaaggacagactgtaagctgaaaattccagcctggccaagtggcgctgggagtgtgtcctggacagaatgacatggaaactttcttttaatattatttgccataaaccaggttttttaaaaggcagattttcttgatgaaagctgcctagaggccatctaatccacctccttgttttattcatgaaggaattagatgaggtttgtcttattaactctgcttattccatagcaaaagaattttatcatgcgatgactccacaggtacttctaaagcatggtcccactggggcagcatttagtcaatggcaaaaatttatctccattttgcctttcttgtcctaacttcatctccctaaactcaaaaagagcccgctgtggattaccctccctgcctcttcctcagcctctttcccacaggagtttctccagccagccctcagttccctgtcctccctggacttctgcagtgtgaacacaggactatcagtgctcagatctcatttctctaacacctgctatccccccaaccatcaattttcttgcccttttctgagtcagcccactgaaactaggcaaatgttcttcaaattttcaatgcctggcattcatttttgtggttgtagatacataggtgtaaatctttgagaatactatgtttttatttatcctgatttctaactattggaataataaggcatataattatatatggtatctatggtgatgttgattgaaacaataatttcttggccatgcctgcagtttctgttcagatcttgcaaagatggaggctagaatctgttggaatctgcttccagtggcccgattggaagtcaccagccaagcaccaactggtcaagaatatcaggtgaaatatcagggctataaaaatatttctagcccttgctactatctgacagcagttaaaggaataaaacaagtcggggtgaatctaacttcctatctgccaactaggatactttctactgggaaaaatgcttctcaatcaagaaaatatttataataaacataattttccaattacaacttaaaatccattttgtgaatttggtttgggtaagatatatgatctattattaagtcaacagtttccttatttccagctatgcgttatagaaacatggtcagaaggctgggtgcggtggctcacacctgtaatcccagcactttgggaggccgaggcgggtggatcacttgagctcaggagttcaagagaagcctggcctacatggtgaaaccccatctctactaaaaatacaaaaaaaaaaaaaaaaagctacgtgtggtggcgcacacctgtagtcccagctactcgggaggctgagaggtgggagaaacacttgaatctgggaggcagaggttgcagtgagccaagatcacaccactgccttccagcctgggtgacagaggaagaccctgtctcaaaaaaaaaaaaagaaaaagaaaaagaaaaaaagcatggtcagagataaattttgaagacttaaagaagcctacaaactgcttagctctgtgagaattcaagactaagacccgcttgccattcccagctgctagaagcaaaaagaaacatgatttttgcaacgttcacgccacatgagtccctacagaataaaatgactttgggagcaccacagagacccatttgggaacagtgccttctctagcatgtggatgggtatgtgggcatttctgagtgttcctcctagctacttggttttggacagaggactctaatccaatggagggaaccacctgctgtcctcccccagcagagcttcataccaccatgtctgctcctgggtggcttttctccaaaccttcgtgttctgttgcatttcttaaatggagaagggagtcttcagtcctcaacacctggggtggaaggactgaggttattattacagttaggcttgagggcttggggattggtaaacaacatggataaaagaaagttttaggaatcctcagagtgactgcggggtagaaatttgagaagtttatattgaccaagtttatattgtccctcttgtatgtgagctggttatttaattgaaaaagaattcattaaaggcccagagtatactctacagaaaaaggaggtactgtgcttgtacttatagacctaatgtagagaagccctaactagggaggagagaattcacatcaaaaatggaaaataaggccaagggtggtggctcttgcctgtaatcctagcactttgggaggctgagatgggaggatcccttgtggtgaggccaggagttcaagatcatcctgagcaacatagtgagaccctgtatctaataaaaaagcaaaaaaaaaaaaaaaaaaaaaaaaaaaaaaaaagctgggcatggtggtgtgcacctctagtgccaactagtcaggagactgaggttggaggacttcagcccaggagctcaaggccgcagtgagctgagattgtgccaccgtattccagcctgggcaaagaccttgtctcaaaaaaaaaaaaaaaaaaaaaagggaaaaacagaagagaaagaagtagacacaccaatgaaaacaacgtgaaatccataaagcttgataaacaataagcctcggctgaagtgactggggtagtctagattgatgaggagcagacgaagaagacagagttttgatcttgaaaattttgcatgagatgaatacaaggatagccatgaggactgcatgatcaagaggtggccatcctaggaaatcagtgtaattaaggggccacaaacaggacttcaagtcaccagtcatgatagcctctaagaagtggagttccagcagaatggaatgagtataagatatctagtgtttactgttaaggatagaattgatgaaggtggcagggtttgaagggtgaatcatggaattaggagcatggatttgctgcaggaataccaagccagaactaccagggctgtaagttctggaatggaggagaagtttttaaagtagcattgacagtatttggcaacaagcacaaaggataatgagctaatgaaatttcacaaattgcagagcttacacaaagatttatgatcattaaatatggagtaccaacttgttggctgaatagaagtcattctacaaatctaatgctataatttcagtagaataatgcccctctaatgagcttactcaaacctaatccatatgccagtacttttccaccaggctgatgaattcatttgctaagaggtcacagaatgaccccaattagttgaacatccacccttctatttcctctctaatttgatgtggtctcttcatctccatctgcaaagtctcaaagtttgctgatggattgtgtgtagcctgcagacactcactcagagtcacagcaatatgcttcctcttagctatgcagagtacctgaaggcaaacagcatcgtgggtgcctggctaactgtgaacccagcactgagggaggacggcagagttgttctctgcccctgtcatcgtggcagctgttttttcataactccttaaactgcatcttgtcaccttgggaaaagtgtgttcaactttccactgccccaagtcagagtgaatctctacccacaacaaaaatacccattagggaaagcctgaagcctgaggtctgtctctgttcttgtttgtacaggtgacatgaggcagccacggaagaagaggaagtaattgcacaccattttccaagaaccaagaaagaagaaaacacaagagatttttctcatcttttttttttttttctggtggagggaggtggtggaggaacatagcaaagtaggagggacagagagtgatacttaaatttaataagaggttcgtgaaggtagcttaacttgagaactcttggttttttgaaaggttgactgcacatgccaaaaacaactcctgctatctcagaattaattatctttgaccttcgtggaggatggtctctggttaaaatctggccaaagaaactcacataaacttggtgttagagaacatctagagagagagagaggaacttagagtcatttaaactcttcagtttacagagaaggatgctgaggacctagatgagaagttacctgcaaaaggcaaaagggttacttagtgtcagaaccaaggcaatgacttctctctcccagatctcctagctactggtcctgggccatttttttttttttaaataatcccaactttctttaaaagacaagcatttcagtaagctagttattttcatgggttgctcatccatttttttcagtgatctaaaaatgtagggagatggctactactgaagttgtctgtctacttgggataatagcaaattaattgaagacaatgggaaagtaagttataaaaaatactgggaaatctgtttctcttctgagcaagcattcagggcaggtataaacatcaaacatagtgacattgtcaaaacctcttccatttgaacattgattaattcatcaaataaatggtatagtaataaattttgcttgcagaagaatctggatgggaagtgatagaattataagggctgttgagattgctttgctacaaagcacttttctgaattagtgtgtggtttaacaaagctgatttccagatgcttaacaaggattcatgatccctgctgtgattttcctagtgttattttcctggcctttatttgtgggcacattttttaaagaacacaaatggcaaatggctattggtgggtagacatatttgagtctactagtatgtcactaggctcatatgggttggggtgtggacactgaaggaaattggacttggacttcccaacctaacattatgtaggagaaatctggtaaaaatgagcaagagtggtcttgaagggttacagaagaggacagaatatctcaggtgggaaggcagcctaagggaagaccagggcaggcaccaagaaacctgcttaattcccacttctttttctactgttctgttaatatgggcctcaagtcttttccagttggagctgggaataccacctctttccccacatctactgctgcctcttcactgctccaagcacctggtctcagcaggagctcagaaacagttgccacagtggaaattccccaaacgtgaagccctcgggggatcacccaaatgttccacaccccagaggtgactcgggctgcgtaactctcagtcacagtaagctcttggtggggatgagcctgcaaatttctatttgtggctttactggccctaggaccaaattaaaccttgattgcagcatgcctggccattgtgcaatatctcttccaacactagaaatgtctcggaacaatttcccattgagcacatgcctaagcacacaagggcatgctcggtgctgcagtagcttaagaaaagatacacaacaaaacaataacacactgattaaacatttgctaaaaggtatatggtatttgcagattgcatagcactatgttaggcccttaatagaaaatgacaactatagcaaccacatgatgataccagcaatatttgtgtagtgtcaagtaattcatcaccactcccacttattctagcccacggaaacttcgtaagtaggagatgagttacgttctcattttacaaatgagcaaactgagtttctgagggtggtgtgctgggaaaggtttaacaaccagctctctggggaaaagatgtcaggctctgattgataatgtgtgctcatttccatggtgtaaacactctccccatggcctttttcaagctggcagcacgttgctgaatgtacagttgggaagagatgtggacaaccacttagtcctcgagagcctgttgtgcaaactggctccagcacacctctgcgttcagagcagggaaatgacaagtccaaggtcacatggatagttgactcctgagcccactttccttcctctttcttacagagcaaagcagtaccgggtcatccaaaaactttatttaaaaaacaaaacagaaatgtgtccacatcttgcagagctggacaaaagaaggtggtcaagagatcccaaattggtggaaactgtccccgttacaggaggaggaaggacgctgccaccactaccccagggactggcctatactcatgcttctgttccagtgttgctgtctcacatttgaaaccaattttgaatttgggtagaagattcgtcttgttgcctaaacaatgccttaaccccattctctccccagaagggtcctacatttcttaagctattttcagctcctccacacctactcacttgcaatacttgtcataacaggaagccagtttcatatactgtaatccccaaacacattgcacccacacgtggggagcgtgaggggctgagcgaggagcgaggaggccaggccttccaaaaactggaggggctgagcactgagccgctcccaaggtggggcgtctccactcccaagcccaggattcagaagccagaatccacatccagacattcttgttttcctttctcatgcagttgctggtgacttttttttttttaataaagcatttgagtaggcagcaaagccagtcagaactgtttatttatagctgtggatattcaatgctgtataaattagaaatcgttgctgaatgaggcccgcgcccactcatacacgcagggccgctatctgtgagtcctttcacagggtttgactgtacacggtctaaaatgggagaaaatgacatgctccgagtcaaatgacggagtcacagctaaacggcaaagcagaaaaccagcaattatttttccccagcacaatatggggagtacgacaggtgcaattatccaatattatttaacagtaccggtttgtgatgtagggagaaaataaaggtttccgtgtcttggagaggaaaaaaagagaaagaacatgccttgcagctcctgtttctatggattaagctgggttatgtacatggaaactggccaggattccagaaggggaagggagaaccgcctggctccctggcccttcctcccaggaggctcttgaggagcagcaccacagggggcttctgagcaaaggtgcccccagccttgggatactgtggcctgaacaccctcttccccaggcaatggctccaggtaagactgcggggaagactgggtttgctgagcccctgtccgcttagaaacaaacttccctcctgcttttgactctctttccctccattgaactacaatgaggtcaaagagcgtgtgatgagaaggtgatccacaaggaataactttcagccccttaaccaggtcccctttcccacttccagcacgttattattcctcctcccaagcctttgcttaaactggtcacactccctagaaagacccctcttcttgtagctactgtggaataaataagtcaaccttcatggcttccgacctcactggagtgccacttcccaactctctgaaaaagcttttccttgcccctccggggcatttggccggctgccttctctcagttctgctagttaacagctaatcagcttcacacactatgccattgctctctccttcacgtatcctcctggcttctgtttctggaatggtatggaatgccatgccgactaaagaaaacagtcaagcttttaaagaattaaagttagttgtattcagaagtcttactgaggactacagaccaaggcctacagcctggcaacagcctgtcagatcctatgagactgctccagcccaggatttcagcccactgcttacagacaggaagtggaggttcagtacctgcacaatcacatcaaatttgctcagaatttccgtcgcagcagaatcccatcaaggcttgggtgtaagagcgcatccggttgtagattacagaggcataaacactaaccctgttaaaggttttgtcttcaaagcatctttccaaacatcttcacagtccagggcttttgtgaaattctgctggcaagcagaagtgagcaaaaggtgcttctcatatttgctcctttgtctcacagctggaaagaagagaggcttcagaaccagaccagatctgagttcaaattctgactcccatggctggctatctgtatggaacctagagaaaatcagttactttttagaaaaatgtattattcactttttatttgtttaaaaatatataacaacttcagcatgtgaataagaggacacagtctatccagaaggagcttaagtatgctatgtaggccgccagaggaacgcaaaagaagtaagcatcccctgttccttaaagaccttaggcatgccagattttattccaacttgctactgtcctaagagaggcactagtcagccccttggagagagactcaccttggataaaaatagtttactcctctgagccttggttccttgtctgcaaagttagataatgataccaccacaattaaataataagattatttaaagtggtggatgcaagtgcctggctcccaagatctccgtctgatatagtttgggtgttgtttcctcgaaatctcgtgttgaatcatgatacccagtgttggaggtggggcctggtgggaggtgtttggatcatgggagtggatttctcatgaatgatttaatgccatcttcttggggctggcctcgccatagtgagttctggcgagatctggttgtctaaaagtgtgtggcccctcctcctcccatctctcttgctcctgttctcactatataacgtgcctgctcccccttcaccttctgccgtgattgtaagcttcctgaggcctccccagaagcccaggagatgccagcaccattcttcctgtaaagcctgcagaactgtgagccaatcaaacctcttttctttataaattacccagcttcaggtatttctttatagcaatgcaagaatggcctaattcaccatcccacctgcttgattgcaaactcccgggatgaggggccgtgtctacctctttatatctccaacaaagcctaactctgcaccattagaaagtactcaaaaatacaggcggacttgaggattccttatagcttcttaaccttacaggcatcatcaccagttatcttccaccctaggcttccctggaagctgatagtctcaacattagagttattgtttcatttcagatactctctccatcttacataccacaattctatttacagtgacgagcaaattgcagtttcatgtggactggtagtgaatgaacattgatagaataggacgcatagcagatacatttgatgaaaaggagaaggagatgaggagtggcctggaggataaatggcttgcgtgcagggaagctctagagtggatgactagatggccctaatgactcaaaggagagcctatgagctactagggtcccagtccggaagactgatccttaaacaggaggtggggggatgttgaagacaaaccttgtttacatcataattcatttcaccttaggtgacttctcaccccttcctgacggatggcaagtgtttatcattaaggcccagtctagtctgactagcacatcatcgttaccatgatgtcgtcagcctcttgcatggtgtagttatttcggggccatgaaaagggcctctgttctcactgccaccctaaatatcttgctaatgtacaaaaaaattctttcaccaataaagccgcccatttcatatggagagccagatttaacatgtaaatacttctgaaagaagtgacctatgaaactcatgcatgttcaattctcagtgaaggatatctgatgatttgaaagcaagttttaatgtgagggagggcgtgcttggcagagcgaaaatgaggatattgttagtaaaggaacaggtgcggaagggtcagctgcagactccaaggacaaaacttgcctagttcataatttttcaccgtgtgagctgccaatagatgcaggttatgattgttctgcacccctccctgagagagctacttggtgggtagagcaccccaaaatgaagttggcccatgattttggcagctggtaggtcaactaaattctgcgtgcccttggaggggtggacagaggggacagagctgtgatgtgccactctgtttccagccttgattatctggctggcactacaggaatttaaacttgctttatgtcttttatttatttattttttgagccggagtctcattctatcacccaagctggagtgcagtggtgcaatctcggctcactgcaacctctgcctcccaggttcaagcaattctcatgcttcagcctcccaagaggatggaattacaggcatgtgccatcatgcccagatagtttttgtatttttagtagagacgggttttcaccatgttggccaggctggtcttgaactgctggcctcaagcaatctgcttgcctcagcctcccaaagtgctgagattacatgcgtgagccaccacgtctgacctgctttgtgtcttgagagagtagtgttgcgttgccaccatgcttttttcccacaatttaaacgtgtgtttgttggtagcataaattaatctttcttagactcttaggttctacatcctccaaatttcaacatcatggtttttgttgttgttcaaattactatgattgctcatgagtttgtgtgtatgagtgtgtgtgtgtgtgtgtgtgtgtgtgttgtatttctgaagttccgtgtagatattcaatgccactttttcattttctcgaatttatgttggagagttggtgctactctcatcagggtcctacgatgattctggaaacaaagactggataacatgaatggctccatgtagaagctttgggtattgatatttctcaaatttccctcaaaatgcatgagtatgacagcttttcctacctatgagttgttgccatgcttaagaagaaagaagacagagcaaagaaaaaattaggattcctgggctcctgaagaacctcaagcagtattgagattctccaagatctctttttatccagacatctgtcttaccaaccagtcacagagatactgaagtgctgaagagaggtggacacttattaagggcatattttgtgtttctttgaggacaggagtatgtcctactcaccactgtatctccctcattgagcacagtgcgtaccatatggttgactttaaatgcatatgtgatgctcagatggatttaagtaacacgctcagtgtctgacagtggcattggaattcaaatcaagatctatctgacccaaatgcctcaaatagtttccactccaccaacagtgctcaatctttcttaagtgataccctcagaaatacattttacatcataatccagtagaaacacacacactcataacacacacacttgtgtgaaaagtttcataaactcatacttgcttttaatatgggtgacatacccctttattttctaggatattgtttcctattccattaaaatatgtcgtgaccatgaaattgatgtcttaatccaataatagtgttattaaaaaataatgaatttcttaatccaataagaaattaatggatagggttcaacttagttcagtaagttggacaacactgcactccaccacactgtagggttcgttcattcattatacagtgcctactaaatgtatgtccctggccatatgcatgccatggcctgagtgtaaggacatggtggtcatccacctggcatttgcaggcctgtatggaggattgcatgctttcatcttgccgctcctttgggacgccaagcctggctttcccagcttcctctgttagcagctgctctgctagactcagctcctctgagatgctaacaggaagaagaaaaagatcccttccaccgtaagagcttacaaaaccttccgctgaggcttaagtctggcctgagcaaatatatttggttacactttagggatttgttttcactcaacactaaattttattaagattctaataatgaagttagatgacatagagttaggaaaacatgtactgtatgacttttacaataccttgccaggaatctggtacgtgattctgaagactcccatctagacatgttttattccttattaaaatttttctagctacattctaaaatgcacttatgttgtcattttatatatatacattaactgaactttgccaattttttttttttttttttgagatggagtttcactcttcttgcccaggctggagtgcaatggcacaatctcggcttactgcaacctccgcctcctgggttcaagtgattctcctgcctcagcctcccgagtcgctgggattacaggcgtgtgccaccatgcccagctaattttgtatttttagtacagatggggtttcaccatgttggtcaggctggtttcgagctcctgacctcagatgaatccacccaccctggcctcccaaagtgctggggttacaggcgtgaggcactgcacccggcaactttgccaatttttaaaatcatgtggttaaataaaattctctttcttgcaaaatagattgcagtatcactgccagtatttctccttttccagactcatcctgccatcatgaccttttattgccgtcacatatcaccaaactaagaggaagaggccaaaagaactgctggacaccaattcagagttttcccactcagcaatgtggatttccatgtaatcctcaaatcaaggggaaggaaagaaccattccaaaatgccctgccaattcacagaggaacatatctaagtccacttgggaaccattttagaccccaagcatggaagacacggattatttgcatgactatatacacaatgacaaagggaaacttacccattcattctagggcttaacgaaaatgccgcggctgcatgaatcgtggttctgtggtcgcttattgggaatgggattgaaagtataactttaagggggatccccaagatgacagccaagaagatgctaagctatttgtgcatgaggtgcttgtgagatagagatcaaaggataaccagctgctcttccctggttggtgagtggaggtgcccgagagggcactctttggtgttgacttattgcatctcaccttgtcccttcctaaactcaactcttgccatttcactgtatccctcacacagtcacacttgaaaggccctccaagcaccagtggcctttgttcctagcacagaaatcatcgccctagactgcttacctagcatctaaataatcccaattcacatttagctaaaatttcactattactaaatttagttatatttgcaatataaatttattttagttacaataacgtagaagtagtatagttactattattatctgttttagtttcctggagctactatagccaagtatcacaaaccaggtggcttaaaaatgatagaaatgtggccgggcatggtggctcctgcctgtaatcccagcactttgggaggctaaggtgggtggctcacgaggtcaggagttcgagaccagcctggacaacacagtgaaaccccttgtaccgtctctactaaaactacaaaaattagctgggcatggtggcgggcgcctgtaatcccagctactcgggaggctgaggcaggagaatcgcttgaacctgggcagtagggattgaaaattgcagtgagccaagatcgtgccactagactccagcctgggtgacagaactagactgtgtcaataaataaataaataaataaataaataaataaaatagaaatgtatcctctcacagttctgctagccagcagtctgaaatcaaggtgtcaggattactatgcttcctctgaagcctctgaggaagaatctttcatcctggtggctcccactaatccttggtttgtggccacatcactccaatatctgcctgtttccacatggcattcttccctgtgtgtctctgcacctcttaccttacagagaatctggaatctgtattcaaatctccctgtcctttctcttataaggatgctagtcacagatttagagtctactgtaagtctagtatcatttatttcaggatcctaaactaatcacatctgtaaagaccatatttccaaatacggtcacattcggaggttttaggtggacgtgcgtattgggggtgaaaggggtgagaccatattcaacccaatacattattcctatttgacaaatgaggggattgagatgttaaattccagcttttaacacttctcacgtgtctttcctggttcaaggagtcacccgtaatttataccatctgttgagtgcccactacaggacaggcatttgcaattcattatctctaggcctcaccatgctcagagagacaggcatcattctctcaatattaaggaaaaagaaactgaagctcagtaaggttgacagatttttccaacaaagaattacccagtgacagcacagagctcattctggctggctctgacacctaccccctttccattaaaccacacaacttctaccaaatcctgcttctgttcccttcacaatgtctggaacatcagcccttccttctgtctcctcaaggtcaaaacattaaatattttcatttcaaatcttctgaggcactgtgggaaggatgcaggctcaggggcatgggtgttatggtggaaacaccctctttcctgagcccgagccttaacaggcatgcaagtgggtaaatggacagaaggggacctcaaagggaaaggggaaatacaaattgctgctaagagtatatggcagagccattcagcctcgcctgcagattcggagtcgcctggggaccttctaaaagtacttttgcccagatgtctcctccagagcttctgaattggtctgggctgcagattgggcattgggaatcttaaaagcacttccaggtcattcccatgtgcagccaaggttgaaggctgcctggatccctgacgtatgggaattcttgtccattttccttgcctatggcagcagctgaggtcttcaggttgttttgaacatcatctgagagagccactgcctttgttccaagcttccttgcaaagccactgcccagccatgcaagtgctcagcacattttatggcatgaccaactgcctggtccctttgggtgcaatagcagaggtgactttggggtggagtgtggagccaggctctgggaacggctcagatgcccctgcaaagctttctggtggagctgtctcctgtctccctgggacctcagtgcacttccttagcaagagcccagactactggagccagggaggcaccttgtgggaattgtgccaacaaatgacctttggacttgaactgtggcctggctctctcctgggtctccagcctgctggcctgccctgataatttgggacttgccagcctccatcatcacgggaaccaagcccttaaaataaatctctttctaggtacatacacatcccattgatccagcttctctggagatccctgactgctacactcttccttggctcccctggcctcacctcctttctctggatcctcccaccctccactctctgcgtcgtttgcctgcagtgtctgtgactcataggcctataataatccttccgcttctgcttgccaaactctcctcttttcattcaagagtctccccaaatcccacatcatcccatcaaggaaacaacagtctctcctccctaggatgaagccattcatggagcagatttcagaaagaaaactctgtctgtatgagtgtttctttgaaaattcatgttggagactattccacgcatgacagtgaggggacttggtgttccacaggctctgtctcagaggccaggctacagggctccccgtctgctctgcacaggtctgcatttggcacatggtctcatatggctagtggtgcctaccagatggtggtctggggcgtggcctcctgaacaagctactgaaggccactgtcctgcatggctacagatttcacaaccaaccctatgccaccagcctgttcatatgacattgcttaaggcaaggagcagtcagggaaaatccctgagcatgcgttctctcagctgtgggccaccatgtcttcctcctgtgaaggatgaagggttgaggaggcactatccttcccttcctaccacacatgtagaggggcccctgtcgtgttactgcaaccaccattaagccacattctcagtggacattgcacagccatcggacatgctgcctcaaagctccacctacaagctatggccccagagacccctgaatgccatagacagctggtggtatcccagggacaaagaaagcccaaagtatatgttcacatcgcggggatactaaagcgtcagagtgaaagaacataagctttacagatactctaaattcggttagtcccatttccacagcatttgccatcttgggtgactcattcaacctttcagagctaggtttcctcatatatagaggaggaacgcaatacctgctttgtgttagtgctactgagaagaaggatgatgatgttgataataataataggctgaggacattctgcccagtgttagcatccaataaatacccgtttctttctctgttctcttaactaaaagcctctactaatccagtggaggctacttatgggtcataatttgaacacctgggagaggtagtgtgaaatcatagtatagaggagctgatggcagcactacgatgcagacggcattcacggaaggggagttgatgacaggactaggatgcagaaggcgttcatgcaaggggagctgatggcagcactaggatgcagatggcgttcatggaaggggacctgatggcaggactaggatgcagaaggcgttcatggaagggaagctcccttactgtccgcatggcttcacagcatcaacaagagggtcccaaatcacatgttccagcacccattccccaacttgaagtcccaacacaataaaaataaaggaaggcaatgaaatattgtaaatgccatggagtctagaaatcctagattttagaaccctctaagtctatgcaaagcattaacatttcaacacataacccaatttcaggaggcttacacaaaggaaaagcagtccattgcagcgccctccttcttcccactggtgtataggaatgcctcctaagcagtcgtggccttacagagccctagagacaaattcattttgcttttttgttttattattgttattattattattattattattattattattattattatttgagatggactattgctctgtcaccctggctggagtgcagtggcgtgatctcggctcactgcaatctctacctcctgggttcaagcaattctcatgcctcagcctcccgagtagctgggattaaaggcactcgccaccacacctggctaatttttgtatttttaatagaaacgggatttcgccatgttggccaggctggtttcaaactcctgacctcaggtgatccaccctcctcggcctcccaaattgttggaattataggcgtaagcctcagcgcctggcctcattttgcaattaacaaaatacaaggaggccctccttgatatttggagatagagtatttcaagcacatttgatgaatttctatcttcttatgttgtgataagaaggcttggcaggatgtttttacaattgtagtatacatttcatggggaggaaaggaaatacctatatatgtgtgtattttatatatacaaaatataaaatgaaaaaatgcagttgaacatatatatatatatatatatatatatatatatattctcttctggttttcaactgcatgtttacattatctcatgtttgggtctaggcctgttattaaatgggaagatgagagccctctggtggctaaatggactcttcttttttttaagagatagtaaaactaattatcttgtgttttgaaaattctataccttgttccagttagcaatttgctgcataaacttcatcttttctccacttttctccactgttcttcatcttttctcctcacccttgagtaaagacataatgagatattacattttcaacctctttgatgctcacactttgcatttaggcaaatagttaatccaccttctgaaaagataaaacagtgttttagaaatttgattttcagacactcatctaacaaatatttatggggcatctataacaagtaagacaccattctaagtactgtaagagctataagaaaatttataatataacatctagttgcaagaagcttatagtagagtataaaaaagaacagccttgactttttaaaaatgtatttttttctataaactttaatcattttatcaaatacataagttttcttatcagaggtattctcctaggttccctatcttccatctactcgggtgcctgtagcaagaagtggatcatcaagttgaactcttccttctcccactgtccaatccaatgattcatcatgtcctgccagctctacttctctttatttctattgatgccaacttagatcagggcacctaaatttcaggtcattactatatccttttatttattttattttattttatttttatttttattttttattttttattgagacagggtctctctctatcacccagactggaatgcagtggcacaatcacagctcactgcagcctcgacctcctgggctcaaacaatcctctcgcctcagcctcctcagtagctgggactacagggatgtgccaccataagaggctaatttttaaattttttgtagagacagggtactccctacgttgcccaggcttatggtatgctttttagaaatgtatttttaagttatttttgagtggttgatacatgtacatagtatagaattcaacatatacaataacaaatgcataacaggtaagtctccctcacactcctacaccgtacacacctggttcccttctacaaaacagctacaagtatcaaccctttggatatacttgtagagatattcggttcacatgcaagcatgtatgtatttttctcacaaatgatgacacgcagttcagtgccttgcttttacatctttcagtacctgttggagaaaatcctaaatcagtgtaaagagggctgcttcattctttttcaagagatgcatagaattctattatatgtatgtatattaccataatttatttaatcaattctctattgatagaaattcagatggtttccaatcttttactattacaagtcaatgctgcaataaatatcttcttgcagacatcatttttgcacgtgtgccagaatatacttagaataaattcctagaagtgaaattattggatcaaaggatatgtatatttttacttttgatagttattgccaaattattcttcatagaggttttaccaaagtctacgctcgctgacaaaatatgaggctctgtttccccaaattctcaactataccgtgagttagaactttgtgttttatctttaccaatcttatgggtagaaatggtgccccaatacagttttaagttacattattcttaatttgagcgaggtcaagcatcttttgatgtttatgatgtattttaacataaagatacacctttgtccttatctttactatacatggatttagttatacgtgtctccttatatctcttgttcatttttctgcttggggtttgttttttgcttgtcttattgaactgtaggagtttgtggcaggcagcttccaagatggccccagatgactccatctcctgatatccacaccctgacacactccccctcccacatcgtaccacagttgctctgtgtgaccaataaaatatggcagaagagatggtatgccattcccaagattagcgcataaaagataatcagcttctgtcttggtggctctctcaatctcacttgctctgggggacaccagtagccaggtcttgagcagccctggataaagaagaccacgtggtgagaagcagaggctcttttgagagtttcatgaatgaccttagccagggtccttcagcctcgggtaagccttagaaagacccagccctgactgatgtctccactgcaacatcctgagagaccctgagctggaatcactcagttaatatgctcccagattcctgacccacaggaattttgagattataagtatttgttgccctaggatattaagttttaaggcaatatttaagacttgataaaatagtgtaagttgataatatagagttgataatgatatagtttgataataatatagagtttttgatatattaagaaagctaagtcaagtgcaatgatgagtgcctgtagtcctatctacttgggaggctgaggcaggaggatcacttgagcccaggaggtcaagtgcagcctgggcaacagagtgagacttcatctctaagaatgaatgaattaaataaataaaatggtaaactttttaaaaagaaagaaaatcggtctctttctcctgagcttgagtttcttgattagaattttaaatgctttttcttgcttgttgaatgtctattagtcctctttgtgatttattttctttcttttttttctttattttcttttttgccatgcagatttttttaaaaaaatttacatactgaaacttatcaacttgggggattacttttatacttagaaatgatgaaagaccatacaaattccaaattttattttcttccatttctaataataaagagctaggccactttggtcaactctcctgctaaaatcaactaaaaataatgaatacaataattttctagtatcctttaaagcatcaagaaactgacaagacaataatgaattaccagaccaagatctaagagattccaggaacccagaagagaaactgtattagtccgttttcacatggttgataaagacatacccgagactgggaagaaaaaaaggtttaatagactctgagtcccacgtggctggggatgcctcaaaatcacggtataaggtgaaagatatgcctcacatggcagcagacaagagaagagagcttatgcagggaaactcccccttatataatcatcagatctcgtgagacttattcactatcacgcaaacagcacaggaaagacctgcccccatgattcaattacctcccacaacaggtgggaattcaagatgagatttgggtggggacacagccaaaccatatcatatgagatttcaggggggacacagccaaacaaagccttttgtcctaagaacatacagagaactgtgctccagttttgaagacctcacaaaataagggggacagaagtcaaaagcctagagcccacccaaattggaatgttaatatcagactccccacttacattaacctagaatcccaaaggtaaaaccttcaggaagtaaaaattacccattcctcctgtttaaaaaaagtcctaagatagcagtgtcttagtgctaaataaaggagaaaaacaaaaacaacacataacctgtccgtgagtagcctgtctagagattagcttctgagaattgttagcctaaatttgaaacccaagggtggaccagaaaacttcaagccataactttaatataaattggtcacagagaggcagtgctcctaaatgtctcatagaaacaaaggcaaaactatttggagaaggataccttcacccaagtcacaggaattaccagaaatcatgtcttctagacaatgagcagtgcctagttcatggtaaccaagccacacgaaagtaagttatgatgagaaagaaacagcagcaataatagatgacataaacagaccctgaaagacttcaggtataggaacaattagatgcaagctacaaaatagctatgtttaaagaagtaaagatagaaaatatttgcagcaaacaggaaattgtaaaaaaaaaaaaaaaaaagtgacctagcaggtatgaaaaataaccaagtaaaatttctagaaatacaaatacaaatacaggccaggagcagtggctcatgcctgtaatcccaacacttcaggaggccaaggtgggtgaatcgcctgaagtcaggacttttgagaccagcctgaccaacatggcgaaaccccatctctactaaaaatacaaaaattaggcaagcatggtggtgcatgcttataatcctagctacttgggagggtaaagcaggagatttgcttgaaccctggaggcagagatgagccaaaattgtgctgttgtactccagcctgggcaacaagcatgaaactctgtctcaataaataaataaatgaataaaataaatacaaatatagaaataaaaaacctaatagatgagtttgagagaagaaaggccaaaactagagagaactaaaatattaaaagaaattattttaagtgtagcacagagagacaaaagatggaaaacatgagggaatagctaagagaaatgaaagactgaaggaggtctaccatgcagaatccaaaagagttatatttttaaaaactgattactagaaataattagtgaatttatcactgtctgtctgaagatgcaaggttcatatacaaaaatcaattgtgttgcttcatattaatagcaaagatttggaaaataaaatgtccaaaaatacaatttacaatagtgtaaaaacaaaaaatacttagaaatttttaaattaagataggatttacatacagtgaaatacatagatctcatgtgctcagtctgatgagttttgacaaatgcatacacctgtgtatcctatgccatgtccctttctccttgtcaagatataaaacactttcatcactccagaaagctcccatgccacctcctggtaaatccctgtttcacctccaagtccaggcaacttctgttctgattcctttcagcatagattaatgtcattatagaatttcatataagttgtataggatgcacatagtctggcttctttacgttggtataggcatgatgttttaaagactcattcatatctttgcatccatgtttcatcatttgtattgctttagtatgtatggatacatcacaatctgttaatccattttcttctttttagacatttgggtcaatttcagtttgattcattattaataaaggttttatgaatattcctatacaaggcctttactggatatatgttttctcttctcttgaggaaatacctagaagtgaagcacctgcactgaaatgcactcaccagtgtgttggtattatccatataaatggctgctccattggagtgaaagctctttgaaaacagggaccgggtttggtttattggcttatcttcaatgtcttgcacaataaaggacacagaggaggcattaactatgcatttcttgaatcaatatattgaggagaaaatataatattctttaagaaaaagatgtaagtaaacaatacatcttccatccagtttgtccttggttacactaggatactgtttcaaggatatgagcaccttattaaaaagtccttttgatggttttgtaaaataagtcccatggaaaatttccaagaaaatctgaaactctcaaaataataatattaaaatggctaatatttattgaaccccaacaccaccaaacaatttaagacaatcattgcattcattctttgtactcttgagtagtcaatacaaggaaaacaaggcttaaataagttaaataacttgcttaatgtcacacagctgaaagttggtatactttcaatggatataaagaaagaattttgacttactgttttaatatgtgctacttttgaaggcaattttcagtccaagtttttccacacaaagaatgaaaataataatagcaacaccaacatactataaggatcaaatgcaattatttatttaaattccttctgtaaacagaaaagcacaatgccaggtaagttctcatgatgattgttaatatcatcatcattatcattcgaccacttatgaacggtgtggccttatgtaggtaactgttaactggtaaaatgatgatggtaatactgtctcgttgtgaaggtgagcccagcacagtagttgacactgaataaatgctcaatacagagctgccactgctattgaccttggtctgttacatggttcttgttcatatttccctccgggacaagttgttactccctggtaggtaggagagctcctaactaggcttcatcatcccccctctctcggtcacaccaaaactttggccaaagcaaccaattagaatgcccattaaagatgtcttgatcacattgggttccagcagtaagtcaaagaaattccaaatatcagtgtcccttgttctctcatataactttaagccttttagtttaaatgttgcagctctgattttccagtaatgtgaataaagtgaacaatgtgtataaatcggtgatcaatttttctaaacatccagtgactcactcatagccatattcatttgtatatgaaccaggagatacaatttaagctttgtttagctctgctttattatcttttgagccttgaaattctgaaattatactatccttcactggaggcaccatgtctacagggaatttaacagttacaaggtctcactcaatcacagcccatgttcataaatgcagactgaagggacacaggcacagattttctggcctcgtatcagccaaaaggagctgactgccaggtggattctgctgcatcaagtggtacaccatccttatttccagccaagcctgtgcctctgaaataaaagtctcaaatgccttttcacactgatataaagaactgcttgagactgggtaatttataaagaaaagtggtttaattgactcacagttccacaggcttaacaggaagcatgggtaggaggcttcaggaaatgtatgatcatggtggaaggcaaaggggaagaaagcacatcttacattgcagcaggagagacatagagaagggggaagtgccagacacttatcaaacaactagatctcatgagacctctatcaagggaacaacaggagggaagtcagcccccatgactcaatcacctcccacaaggccacttccccaacacatgtggattacattcaacatgagatttgggtggggacaaagagccaaaccatatcagaccacatagatgacataggactccaagactaccaagtcccctggccacactctgccctctgtgttgaaggatataccattagagttaaatcaacttagggaacatcagagcaacagtttcctccatggcataggcaggccagggatagctcccaggggagtcctctccagtgtggctctgatacccatgaggtcagttggccttgctctgcctctccttgcagcagcagcttttactaccaatgcactctgcacctcccaccaccacgtgacagctgactttctggtgcattcatcgtttctgttccaagtgctacaagtaaactgctagccgaagttgctgtatttattaacttttgcagctttctctactgaggttgtgttgacagcatttttctgtatttgggaacttaaatgaagtcctcatatcgttgtcctggggaagctattcagcaaagcaccacatgccattctaatacctctttttcctacttctttccctgtgcttcagaaaatgcatgttctctgactgaacctcagccttctgcttcactggagctctcctcccagggatcagaggcaaaaaacttatttccccttgctggagactagatgcaaatgtagtgactggagaaagtcatcgttatagtcttttgccttgcagagccacagtggccatacgtaaatttacccaatggtcctgggtttagacaatcaaaacaaatagctctgccagcaggtactctcaaagtttttagagcctcaaaacctcaacatgcaaatctcagagcatagctgcaatgattgagtgtagttacttgccaaagcttcgccccttctttcccccactacctgcaaggctcctgagatggctctgatgaacacagtggtttttgttttgtctggcttttaactgtgctttgcaattaagtttcaaagatgaaacttttcattgtgcttattcactgttctgcacctttcataataggaatttgtaagaggtctggaaagatacatagagacctctgttctggttcctggtgagtgaagatgtgaatctgaacccatcagaatacatactcctgagactccagttcattctgaagaatggtcaaggagacctcttccctggagacactcatagtagcagacatttgttttctcaatggtttaagacagaaacagatgttgctttgtttgacctttaagttcagctgaaagcaatatgttaaacctaaacaagcccttcaggaaacagtctctactttgagtccttaaatgttctcacttttctgatctgtcaataagcctttcatttttacatagattcacgttatgttcatgtatttattggaataaaggtacacttatttatgggaatatcagcatgcaggatgacaccaagaattataacagctcagagagggtctaaggtcatacatatgagcctaaaggaaaacgagagcagagaaacaactaaaatagtgcattacatttatagtatagtatttgtcacagtttacaaggcactcttacatatatggtccataataatccaagttcttggagtcaaacaagagaagccaagtctgattaattgcagcagaaataaatgtattgggaaaatgatgaatagtccacagaacttatgtgagccctagagcacagagaacactcaggaactaagggaacctggccctgtgcggcacaaagtcatgccatggtcacatctggcctgaaagctatcccaacctccagcaccactagcatctgccactgctgccactgtgactggtctctgggtctggatgttcctccttccagattcatagttctaggtgggcacatcttattggagaaatctgtcctctaggtgctgcaaggtgagaagaaagaatatatactttctttacccctcacttcttggagtacagtactggataattatattagttttctatttgtttatttttaggccattgtgcatattttaagttgtatttatttatttatttatttatttatctgagatggggtcttgctatgtctccctggctggcctccaactcctgggctcaactgatacacctgcttcagcttcctaagtagctgagactagaggcacacaccactgcacccagtgtattagttttatattgctgcataataaattaccacaaacttagcagcttacaacacaaatttattatctcacaattcccatgagacagaattccagcacagcctcagcagggctatattctcatctggaggcttgactggggaagagtctgtttccaagctctataaagtggtagtagagtttattcatgctcagcttcatgtctgaggttcccactttcttgccagctctcagctggagactactctcagctccacactcagacccgtccctcattcacaggtgcacccctcggtaggtaattcacaagaaggctgtttccttcctcagagatacaggagtatctctctggtttcatgtcttttgtcaaataaagtccagttcctttctaagtgttcccttcattaggtcaggcccacctgggattttctccctcttgcttaactcttagtcagctgattgattacctgccaaatcacaggagtgatattccatcatattcacttaaggtctcacccaaattcaaagggaaaagattacatagggcatataccaggggttgggaatctcagggcccatctttgaattttgcccaccacacttaccaaaaaataacaagcacctcccactttatctcatcagagtagcagatccagtataaattttccagttttacagaggaaaaaataagcctctgagaagttgggtgatttggttgtagccatacagttaagtaactgagtgggaacttgaaattaagatttttgacagtgctcttttcaaaggtaaatatataaacatttgttaaagtaaatgacctgacaattcatggtataggttctgacggaaaacaagaaaggaagagtaaagataggaaatgatgactaatgagcctatgccggctactgaaggctgtttttgagttctggaactcaatatcaacaaagcacaggagctgtgtgatgtcagagagaactacctgaatctacaacacaattgctgtttatatttatttgtttttttaacttctaagttcaggggtacatgtacaggtttgttacgtagataaacacacattatgggggtttgttgtacacattttcattacccaggtattaagcctagtacccattagttatttttcctgatcttttcccttctctcagcctccaccctccaataggcctcagtgtctgctgttcccctctttgtgtccatgtgttatcatttagctcccacttataagtgaaaacatgtggtatttgatcttctgttcctgagttagtttgctgaggataatggcttccagctccttccatgtccctgcaaaggacatgagcttgttctttttttacggctgcatagtattccatggtgtatatgtacctcattttcttcccagtctatcagtgatgagcatttaggctgattccatgtctttgctgttgtgaatagtgctgcagtgaacatacttgtgcatgtgtccttagaatagaatgatttctatttctttgggtatctacccagtaatgggattgctgggtccaatggtatttctgtttttcaggtctttgaggaatcaccacactgtcttccacaatggttgaagcaatttatactctcgccagcagtgtataagcgttctcttttctccgcaacctcgccagcatctattattttttgactttttaataatgaccattctgattggtgtgagatggtatctcattgtggtttttgatttgcttttgtctaatgatcagggatgttgagctttttttcatatgattgttggctgtctgtatgtcttgttttgaagagactgctctttttaaaagaagcaacccagagaaagttttaaaggtgaatatacaaagtagcaaaggtctccaaaagagaccaagcaggaacttagcgatcagcgcccaggtcctgcagttttctcttgttacctctacccctgtctgtgtatcctttgcttcctgttcttctcttcgtagttcagagaccattctgtctcccgaggaacctttccttagacagggttatcaaagagaacttaagcatatgtcaagctaacctcattacttcctttatcattatcctgaaaagttctcatagaagcttttgaaaggcagaatatagaaagataaaaggagggacgttatcaaggatatagtttgatattcaacaaataacaaattttttatctaagaatgtatgcgttaaagcttaatagatctttgaacccatgtctgtacataaaaaagtagaaagagcagttttttaaaaaatgtcatattcaaatatagctgaatgtatttacatattacactatgcatacatattgtatttaccctcttctattcatgtgtacatcacatgtaagaagcagcaataaagttactggcaaacctttgttttccaatcctggcccagctttcctccagctgtgttacttcagagacataattcagcctatcgtgcctcagctttctcatgtttaaaaataagaagttagaaaatgtgatttctaaagcccttccagctttaaaattcagtcattctttgatatgcgagataatggacaattgtgaatattaaggcaacacaatcctcctctctcatcctcaagtgggagggggttagttcatattaatcacaggcaaccatggacttggttgcattttgagtcgcattcaactaagaacattggccctttcgactgttttgggatatttgcctgctgtagaactacttaccacagccatgtatctagctacctacagacgtacgcacatacacacacacacacacacacacacacacacacacacacacagagagagagagagagaaagagaagaaacaaagacagcagagtaaccaggttaacaagagtagccgagttagcagaggattgtaggaggagagaatagaagaaatacgacaccctcacagctttcacaaattggcacgatccatatgcattgctgctaattacaataatcatctccttctacagcgagagcactacttgaccctgtacccacgttttatttatttattttctaaagcatttctcttctcctttatcttctcccttaggctattaattaactgcagtgaaggataacagaggcccccatcacagggtccatttggcctgtccctgatccctactatcttgaaacactcctcacactttgaaaaccaacagcgcattccagcatgacccagaagatagccaggtctcttcctttctctcaacccctcgctttcaatttttgttgcagaagaattatgagcacgtttgaagctaaccatattatttcctttatcatcatcctgaaaagttcccaaagaagcattggaaaggcaaaattctattctaagctacaccctcctctgtgggcttagctagatgcaaatagatttaagtgaggcagaactatgactgccaagcaaggagatggattccatacacgatgtgggaaaattaatctcaccttatataatcagtgcctaaagcaagggactcacacttccttccctctccccaaatccctgggagattgtgaaaatggatcaaggagccgcgatgaagtgtttatatatttttaaatgtatgttcctctctctttctttttctttctttcatctctttctctctttaacacagacctctgttgataaataatggactgtggcaaaagaaaattgactaagactctagccaacttcaaataaattggctactggcacagctgaaaacataacttagcttaaatgaggtttctttcccattctacagaatcccccagcagcaaacaccataaacctagaaggtgcatcctgacttgtattctataaatccgtgagctaataaataatgctcacagtgtaaatgagtgactccacagagactacgttaaaaagaaacatttcatagggaaaccaataatattttcttttcaagggaaaatatatgtcctctcctatatccttaattacagcccagactctaaccatgtcttacaagtgtactaaatgaaaaagtggctaaaacttcatcctagtgcactttattagtgagccagttattaagctattctctcggtatcaaactcaaactcatgcttctatacttggctttgtgattctggggctgactttgcaaatcccatttctgctttaccagctccctccaagtgtgtctttccttttctttccttttttcttttttttttgagacagagtctcactgcacccaggctggagtgcagtggtgcaatcttggctcactgcaacctctgcctcccaggtccaagcgaatctcctgtactcccacctcagcctcctgagtcgctgggattacaggcacccaccaacaaccctggctaatttttgtatttttagtagagatggtatttttggtagagatggagtttcaccatgttggccaggctggtctcaaactcctgacctcaagtgatccgcccacctcagcctcccaaagtgctgggattacaggcatgagccactgtgcctggccccaggtgtgcctcctctaatagtggtgggtggaggaagaccagatggctggagaagaagaaggcactcactcttcttgtttgcgtaccgttgctgtcatcatcgcccagcctcactcctttactttggcagggatggttagggaagtagcagaagattccagttgtagttttccaatattcataccccctcagaaacactagcaggtggctatcctttccttgggggtctagaacccaaatcagtaggaccaaacatcaacaatggaattgtgggtttgctttggctgggtccctcatcttgaatgcagtgctgaacttcctgctaatggcaaatggaattccagtaaccagtggcatgcagtgacatcacagtttataaaactattacctgtggttgcttttcaagtgcttactaaagcaagagccttggaagaaccaaatgtcctctgcatttgactactgcagcagctacgatgactacacgggtgatagtatggaatggctccctctgaatgccctaaagcacttgcataaggaaaaaagaaagaaagaaaaaaaaaagcctgcttctttaagttctgagcttgagtcatagataattaagaagcttccaggccagtcctgaaagaatatcatttctttctcttgtttgctgaaaataagacacaaaagttaattgcacagatttcagagttgaaagttgaatttgaatttatagactctcaagtttctcaagtgaaggttgggtatcaactagaaaagataatgacccttagactcgaaagaatgacatcaggatggattcatagcaagctcagaattctgaacccctgagtcatctgacctcctttgccagcagaagatgcctatcctcacatacctggagagaccagccttctgcttcttgaataaactttaataatggggcagttgccttgccatgaaatacgtcttctcatcaacccattctgaccattccttttctcactatacccataataagggcccgatctcagcatgttccctaagggcaagtacaaagtctgacccaggaggaaataacttacatgctaaaacagttgtaagattatgctaattttagtggtagaatcctgaaaaaaatatgtgtgggagtttattccaagggtattagaccaaggagaatgaaatataacaagtggactggattttattgaacttattgatgtgagtgcacttaccagaaaccccggatttaatattttatctcgtgaagctagatgtggctctagcagtttgcctggttgatagattgactcaaccatggcttatgtttaatgagattgacatgcctgaacttccttggcaaaatgtgaaggaatctggagtcttaggaatacaacaatgttgaagcacatttataatgtgttccctgaacaccctgcctctactctccacatcccaaggtggcccaaagatgcttccttcacaattgagaaattcactggtgaagagagcatcagcattcttgcatgttagctatatggtggctgtcatctgtaggcctcaaatgacggtgaggattccacattgatattttggtgggaatatgagatcccagagtgacataggtcatttggtagtttttactaccaaagaaagatgaaatgcatttacagaaaagtacaggagagacaaagtgataattagaaagtttttgacttacagtggtcattgctgaccacagtgtccttggaaatgaaatagatggactacccatgaaaatgttacttaatctatgtcaggatttaccaaactctccctgtaaaggtacagatagtaaatattttagacttttcacttcaagaagcaaaattaatgatgttatataggtacttatattacagaagataacacaaatttttacaaaatttttgttgatgaaacttaaaatataatactactaattgagtactttttttgtaatactaatgaggaaaaggaattttttggggggataacatttcacttaattcaggttcaaaattagtgttttctatcattaaagttgtttgctaatatcatctgtcattttgatctttaatgaacttttatacatttaatctaatatttgaaactacatttttatacagataggcatcaccaaatattaacatgaaattcaggagcatggatttttatttgagtgtattcattgcttagaaggtatttatggaattttactagactcttcccttatatttgcctgttaacaggtcattacattgcaagaagttcctcaattgtacaactaaatcagtttcgaaatactgaaatttcctttgcacttccattgaggtctgaaaaacattgccgtaaccattgtctgagcttgagaatgtatctactgcaaatttatgtgggaatggagatctcattcttgttttaaccattgacagattagaaagtgtataaagcagcttgacattaattgcagttcaaacattagttgtcaaagtaattttactatagttaagcttcacatatataagtgacatttgccttatgattttaggttgaattcattaataaacattatttagtctgtagcaaaggctaatttccaaagctattcagtgtttgataataatggtttaaaccagttcttctctttcagaaaaaattcagtgttatccctcagctcaaaatttttattgcaataaaactttaccactgctaaaccataaaactgccatgtttaatgtttagcttctatctctgacaaaaattcatggaaccgacagtaaaatctacaatcgtaaatgaagttcaccactggtacgactggtttaataatacacaacagattaatgtatttttcacaagatacctgtaacagatactacaacaaataaacataggcttaaaaatttttacatctttacaagcattgcaaatttgtctaagtctttttctgctccagttatatttttactaccctcaattgtaacacatcatagcagattctacttcatgttatactagattcatattttcttaacttctgttaacatatgcttacctgcatttattccacacagactattcatactggctaattctttagtcacttcaaactagtcaagtactgattccttgaattaaacaattgaacagtattgtaaacatctgtcaattcataaagacccaaagaaaaccacttgaaatcatctgctttgtttttttttttttgaccattggtgttactttcaatgttctgaactcttcaaacaactgttcttgctgaaatgctaatagtcttgaacaagtttattttctctggactcatttatttggctgctatgatcaagcataatttaatgaatccaccattagtaaacggcgttcctcgcttgtttggctaacagatgaaccacttggaaactattgtgtcattgcataataaacgtaatgctttgccatttaatttgataacaaaataatccatgcttcactgtaccttaaaggcatgcatgcaaagttcactattatttttttgtcatgacataattgtatgaactggtaaaaaaaaaatatttcgcaatggagtgatatgtatggcactcaaaatgccatcacgttataattgcatcaccttaacatcatgctgagtgtcaccttataagcaatgaagacacatctggtctctgatgcatctgctcaaccctgccatagtagtgtaaaatcattcatagaccacaagtaaccaaaggaaggtggctgggttccaataaaattttatttatggacattgctcataaaactttcatttgtcaccaagtctattttccttttgatgttttccaaccatttaaatatgtaaaagccattcttaggtcataggttttacaacacagaaggcaggccagatctggccagggactaccctttctttgtccaacccttgaacaatataatggaactccaagtctgagagctaaaaacttgatttgagtcatggtacaatagatgaccatgacctctcacctggtttctagatccaaaccagttcacccatccagatccctttggctgaagggaggaccatgtccccttaaagaaggaacctgtggcatagtacatactgtacaccttcctgcaaaccttttctaaagggatctgcagtcattgattggagtgaacagataatagttagatcttttatggattcactgaaagcatcatgcagagaagtaagcccccagtttgtaaaaatattagacagcttttatgtgtttttatactgcataattttaaagaacctcactcttcttccacaaatggcaaagagcctatcctgggggctggcattttcattgagtttgcttccctgctccctctgcctgctaacagtgttcatggcagactccctgcctgccttcccatcatgtcgtccacaggcttgtctctgccctctttctctccctttcccagcatctgtgtgatcacggcactgtccatttataggacaattgctaaaatagcaatgaggtgagatagaaaactagcagccaagaaatcactatttgtgctcatgtgcttaaaaataaccaatctggaatgacattataggaaaaatccagataacactgcacctgccctggtatgaagtcacaagtggctttactgctggatgcacttttccccttctgtacgacaaagatttaaaagcaaaactaatctctggcatctcttaatctttcttccctccaaaacataccaaggaattaaatgttttcatttagtgtgcagccttactttttccattttaaagaagaataaatggaggtgtcagcagtttaagtggtatctcatcattttcagctcacctctgaacttaaaaagtcatttttctctggaagagattatgcagcttttatgggtggaaaataatgaaaaagaaaataaaaggcaaagatgcaacagctaccactactactgccctccacccccacctctgctgcctgagttgcttatcatgaccttattccatccatccccctcctctgctcactccccctcccatccccacaaccctcctctgttctggaagcagatagggaactggatgaacaatcttgagaatgctgataggtggcctggttgttgcctggacttgtctgcaaaatctatcctaggagtcttatcaatctgggggatgccagtgacttgaatgataccatcaatactgtgctgagcaagtttatagttataaatgacatggtggtgaaaggctagctaaaactttccacgggcaaatcagaatccataaagatctcaacaagcagacctagaagattaattaggtcacttaggtccaaactaatgagtaacaggagacaaggttggcatatgtaacaaagatttggcagttttgttgactgtagtttcagttaagtcattcatatgatgtagttatctatatcatcacatgttgggagcaagacccccaaaatccggccataaactggccccataaacaaaatctctgcagcactgtaacacgttcataatggccctatcgccagcgttggaaggttgtgggtttacaggaatgagggcaaggaaaacctggcccgcccagggcagaaaactgcttaaaggcattcttaagccacaaacaatagcatgagcgatttatgccttaagggcatgttcctgctgcagttaactagcccaacctattcctttaattgggcccatcccctcatttcccataagggatacttttagttaatttaatatctatagaaacaatactaatgactggtttgctgttaataaatatgtaggtaaatctctgttcggggctctcagctctgaaggctgtgagacccctgatttcccacttcacgcctctatatttctgtgtgtgtgtcttttaattcctctagcaccactgggttagggtctccccggccgagccagtgttggcaatcacatgctactgtatgttagggaacctttctaaatgttctcatagcatcacttgctgaatcctgttacaaatgttcatcacacggtattgcaattgtttctcttacctcctacattgtaagcttttgaaggcagaaactgtgtccttttttaaatccacacgtatagcataatacatgacccatgtgggaacttaatgtcaattatcaaagtgatgtgaatatagcttttaactataaaacgcaataccatttacacaaaaccaaggtaaggttatttgaaaattataatactctttatattgtattaagatgaagttatatgagatagtatagtgatgaaggatgagtgctctgaaattagtttctagattcaaatcttgtctctgccatttaccaggtgaacaatctcgatcaatttcctttctataccttagtcggtataaaatggagtataagtacttgcttcctagagctgttgtgagaattaaataaggcaacacatataagatacttaaaacaggccctgcacattgtaaacataactgttattattagtattaaaatgatgataatcatgatgatgacaactccatgattgaagttatatgacagtgatatactgtgtgacagtctttacaacatataaaacaaaggattagcatatagaatagataaaagaagtcaaaatttaatttctaaaaaacaccaaaaatgaggaaaagatatgaggtaattaactgcagtagaaacttaaatagctagcaaacatataagctaaaaactcattaataatttagaaaatataaagtaaaacctatgaaataatatttcttacctactaaattgacagaaatttcaaagtctgatgacatcaaaagttggcaaagatc

SEQ ID NO: 59767 - DNA, 1578 bp, Homo Sapiens
gttttcatttctaaatgctaatcctttttctttcttcctgtctatgagtaggaactctctctccatccctgtagaatctcttggacatgtttatctcatgcttatggggtccccatttcttggagtgggattgacattggtggattctgcttcagtgtatccttcttgcggtcttatttgcatgcatgagtcaactgtgtgcatcccattgtgctttccccaggccagtctctcatgcccattccatttcccctgccctataggcctcctttcatgtactctgcccaacggttttgggggacaatctgggccagaaggggagcgcagcttggcaccccctgatgccagcatcctcatcagcaatgtgtgcagcatcggggaccatgtggcccaggagctttttcagggctcagatttgggcatggcagaagaggcagagaggcctggggagaaagccggccagcacagccccctgcgagaggagcatgtgacctgcgtacagagcatcttggacgaattccttcaaacgtatggcagcctcatacccctcagcactgatgaggtagtagagaagctggaggacattttccagcaggagttttccaccccttccaggtgaggcttgaaagccctccttgaaagaagggctggggccttggggatgtggagagaatactgctgccttttcttccatagggctgtagttggggaggaggaagctagagctgaaggggaggactctgcaggcaggtgccaaatccttggaagctgatgggagagtctttacctgggaccctgaaatgttctacctgagtagtcatgtttatctttctggggagtgggcctttcgcaggtcctcagaaggacccatcatgagccagaaaaaagggagtcagttagaatttgtattccagggagtagtaggtatttctgtgtgccccagctgcatcatcttttgtgtgactccacccttggcctactcaggaagggcctggtgttgcagctgatccagtcttaccagcggatgccaggcaatgccatggtgaggggcttccgagtggcttataagcggcacgtgctgaccatggatgacttggggaccttgtatggacagaactggctcagtgaccaggtgagaaagggtagagaaacaggcctgagaggggattcagggagcagggtgtctggggccctctgcatgggggagccctgtacccatgccgcaccctccatggcaagctgcctcccatcttctccccaggtgatgaacatgtatggagacctggtcatggacacagtccctgaaaaggtaggcccaaccagataggtcagtacccagaggaacttctgcagttttaagcagctttttaagctcctttcatctctttcattttacacagagagggtctctgtttcagggagagaggtggtagtggtagtgtattaatttcaaatccgtaatcttgggctctggatttatcagttgttttcctttctgccagtatttagtgtttttcgctatggccagccccaaggattgggatgggttcctattgtaactattgtaaaacaagattt

SEQ ID NO: 59768 - DNA, 460 bp, Homo Sapiens
ttagatctagctaagccataagctttttattgttccatcatgcacatgagagagaagaaaagtgccaataattattttctgatggacagagaagtttttacaagtattttacatcttgagaagacagggatatcaattataacattattaccagagaaataaattttctagtaagacaacagatgagaattacagaagtgggaggttggagattgtttttgcagtttgtggcaattatttctaaaggcccaggagtctcctttgtttaaaaaactctttgaaagatgcgttttcacagagagtgcacccatttggttactgttaggaatattcacacgtctgtatattgcacaagagaacaagatgcagtattcttgggaaagttctcaatttcagaccttatgaaatcccttttaactggtttttatggatgcagaacagctctccttcctccacagct

SEQ ID NO: 59769 - DNA, 620 bp, Homo Sapiens
  misc_feature (524)..(524): n is a, c, g, or t
  misc_feature (617)..(617): n is a, c, g, or t
taacattttccttggggccactttattgcacctggaaggcatgtgagtaagggcgggtcggtgacgtctgaaagggctgagttctggcaagcatagctggcttctccaagaggttcctccacacttcctccctgtgccttgccggctcccgctcagtactgggggccctccctgttgccagatgggccccggacgctggtcacggtcagtgctgtgctatagaacaggctcagcaggaagagggtgaggaaggtgatggtggtgggccacaggttggcgccgggggtctcctcctccagggtctcctgcggcaagtccagcaccacatagggaggcggcatctgccaatctgcaacagagcaagagcccgccaagcggtcgatggtcttctgtgtgaaggccagcggcagggcctcgtggcccaccatgcaggagaaggtgtcccccttcttccagtcctcggctgccacgcgcagtatgctggtcacagcgaaggtggtggtgccctggctgggctcctggcnggatgcccaagtcatgtacttctcgcagggcagctcctgtgacccctggcagcagcgaacaagcaccgtcttggggcttgagcccgcttgccnggc

SEQ ID NO: 59770 - DNA, 532 bp, Homo Sapiens
ttttacaagacataaaactgggcagaaacttagaagctttttttttaaagtttaactctaaagagcatataaattacgtaccatcaaggttttaatttataaccttgtgtagttattttgtaatactgctgtgccctattgtaagttcagtggctattctgtcttaatcacatgcttaaattgtaaaccacaacacgaatgctctagagcataaatatgctatataaatacaacaatccaaaaattttcaacacacctacatcataaattatgattttgccttggtgcctaactcaaagaaacaagtagctttttcctttttccagtggaacaaccccaaaaacaaacgagatgaggttagtaatgaattcaattacaagcgaagaactgtgatttttcccatctaaacctcttcccaatgtcactgtgcacctaattatgctggaggtttaaaaatctatgagtaattcttgatcactcactctttcctttacaactcacactcatctatctacaagttctgttaggcccc

SEQ ID NO: 59771 - DNA, 380 bp, Homo Sapiens
agcttggccagcatggagaaaccctgtctctattaaaaatataaaaatgagccagatgcggtggtgcatatctgtaatcccagctacttgggaggctgaggcaggagaatcgcttgagcccaggaggtggaggttggagtgagcggagatcatgccactgcactccagcctgggtgacagagagacagactgtctcaaaaaaaaaaaaaaaaaaaaaaaaatgtaagaaaagaggttgagtcttattttcatttgtatttctctcactgcctagcatagtgcctttcactcagttggaatatataataaatgttcattaaactgaaaaaaaaaaaaaaaaaaaaaaaaaaaaaaaaaaaaaaaaaaaaaaaaaaaaaaaa

SEQ ID NO: 59772 - DNA, 501 bp, Homo Sapiens
  misc_feature (9)..(9): n is a, c, g, or t
aaaccaacntttgttagactgagttcatacctgattaaactccaaaaatgaccaataagctttttgggagtatcattatgaagtaatgaagtttttatctctgataaaaggctgttctgggacaccactgctgccctgctctccagtaaaatatgtctaagaccaatcctgtacatttgctgcccccaagcttagctggcccttctcaaaggaatactagttccttttggtgggaaatttgattttcaccttttcctctccagataaaattaaattcaaagttatctataacacaaagaaaaggaataaaacaaatcttagcttttgtactattctactactagaaatattctcaaattgcattaagaccttaaatgcagcaggcttatgggttaggtttgataaagaaaggctgccatacattcagctaggttaactgcatctctttttattttactgtacttgatttatcacaccaactaatttcaaggtaaatttcac

SEQ ID NO: 59773 - DNA, 374 bp, Homo Sapiens
tacagtattcaaaggaaaaagatttaatatattcgagtcacatcatgacaaatgatacaaacttgtgaaatatcatttcttcctctttttgtatttttttgtagacactttcgccacattgcccaggatggccttgaactcttgggctcaagtgacccacctgccttggccccctaaactgctgggattacaggtatgaggaactgagcacttttctattttaactaaccttgccatcttttcccgtgcttttctgttactgtcccctcctgttttcctactacattgacaggttatcttgacaggtgcagccctcccccaacagtattaaagtttattcttagacaagctagcacaatatacttttttttgag

SEQ ID NO: 59774 - DNA, 4746 bp, Homo Sapiens
cccagtcactattgatcagatcttagagatggtaaatggccagaggggactagtgctttactattccctggctgcaggctatctgtatagctggctgctggctcctggggcaggaattgtgaagtttcatgaacactacctgggtgagaacacagtggaaaactcaagtgacttccaggccagcagcagtgtaacccttccaacagcaaccggctcagccctggagcagcacattgccagtgtccgggaggccctgggggtggagtctcactactcaagggcctgtgccagcagtgagacagagagtgaagcgggagacatcatggaccagcaatttgaagagatgaacaacaaactcaactcggtcactgaccccactggctttctgcggatggttcgccgcaataacctgtttaacaggagctgccagagcatgacgagcctgttcagtaacactgtgtcaccgacccaggacgggacctcctctcttcccaggaggcagagctcgtttgccaagcccccgctccgtgccctgtatgacctgctcatcgcgcccatggaagggggcctgatgcactccagcggccccgtgggccggcaccggcagctcatcctggttctggagggggagctctacctcattcctttcgccctcctgaagggaagctcctccaatgagtacctctacgagcgcttcggcctccttgctgtcccttccatccgctccctcagcgtgcagtccaagtctcacttacggaagaacccgcccacatactccagctccacatccatggcggctgtcatcggcaaccccaagctaccatcggccgtgatggacaggtggctgtgggggcccatgccatcggccgaggaagaggcctacatggtgtccgagctgctgggctgccagcccctagtgggcagtgtggccaccaaggagagggtcatgagtgccctgacccaggctgaatgcgtccactttgccacccacatctcctggaagctgtcggccttggtcctcacgcccagcatggacggcaaccctgccagcagcaagagctccttcggccacccctacacgatccctgagtccttgcgggtgcaggacgatgccagtgatggggagagcatctcggactgcccgcccctgcaggagctgctgcttactgccgccgacgtcctggacctgcagctgcctgtgaagctggtggtgcttggctcctcccaggagtccaacagcaaagtcacagccgacggggtcatcgcgctgacaagggccttcctggctgccggcgctcagtgtgtcctcgtgtctctgtggcctgtgccagtggctgcttctaagatgttcatccatgccttctactcatccctgctgaacggcctgaaagccagcgccgccctgggggaggccatgaaggtggtgcagagcagcaaggccttctcgcacccctccaactgggcagggttcatgctcatcgggagtgacgttaagctgaacagcccctcatcactcatcggccaggccctcacagagatcctgcagcacccggagcgtgcgcgggacgccctgcgagtgctgctgcacctggtggagaaatccctgcagcgcatccagaatgggcagcgcaatgccatgtacacatcccagcagagtgtggagaacaaagtgggcggcatccctggctggcaggccctcctcaccgctgtgggcttccggctggaccccccaaccagtggcctgccagcggctgtcttcttcccaacctccgacccgggcgaccggctccagcagtgcagcagcacactccagtccctgctgggtctgcccaatcctgccctccaagccctttgcaaactcatcactgcctccgagacgggcgagcagctcatcagccgggctgttaaaaatatggttggaatgctccaccaggtgctggttcagctccaggctggcgagaaggagcaggacttggcatcagctcccattcaggtctccatcagcgtccagctgtggcggctcccgggatgccacgagttcctggcagctctaggttttgatctctgtgaagttggtcaggaggaagtaatcctgaaaaccgggaagcaagctaatcgacggactgtgcacttcgcgctccagtccctgctgtctctgtttgattctactgagctacccaagcgcctcagccttgacagctcctcctccctcgagtctcttgcttctgctcagtctgtttccaacgccctgcccttgggttaccagcaaccccccttctctcccaccggtgcggacagcatcgcctcagatgccatctctgtgtacagtctgagctccattgcctcctcaatgagctttgtctccaaacccgagggtggatcagagggtggaggccccggaggacggcaggaccatgaccggtccaagaacgcttacctgcagagatccaccctgcctaggagccagctgcctccccagacccgccctgcaggcaacaaagatgaagaagaatatgaagggttttctatcatcagtaacgagcccttggcgacctaccaagaaaaccgaaacacatgcttctcaccagaccacaaacaaccccaacctgggacagccggaggcatgagagtctcggtgagctccaaagggagcatcagcactccaaattctccagtgaaaatgactctgattcccagccccaactcacccttccaaaaggtgggaaaactagcaagctcagatacaggagaatcagaccagtctagcacagaaacggatagtaccgtgaaatcccaagaagaaagcaacccaaaactggatccacaagagttagcccagaaaattctggaggagacacagagtcatctcattgcggtggagcgtcttcagaggagcggcggccaggtgagcaagagtaataaccctgaagacggcgttcaggcgcccagcagcactgctgtcttcagagcgtcagaaaccagtgcgttcagcaggcctgttctctcccatcagaagagtcagccatcaccagtcactgttaaaccaaagcccccagccaggagctcctccctgcccaaggtgagttccggatatagcagccccaccacctcagagatgtccatcaaagacagcccgagccagcacagtggccggccatcgcccggctgcgactcacagacttcccagctggaccagcctctctttaaactgaagtaccccagctctccttacagcgctcacatttccaaatcaccaaggaacatgtccccaagctccggccaccagtctcctgctggcagtgcaccctccccagctctctcctactcctcagctggatctgctcgctcaagtccagcagacgctcccgacatagacaaactgaaaatggcagccattgatgaaaaggtgcaggctgtccataacctgaagatgttctggcagagcacaccccagcattccacagggccaatgaagatcttccggggggctcctggcacgatgacttccaaaagggatgtcctcagtctgttgaatttgtcaccacggcacaataagaaggaggagggagtggataagcttgaactgaaggagctgtccctgcagcagcatgacggagctccaccgaaagcccctcccaacggacactggcgcaccgagaccacctcgctgggctcactgccgctgcccgccggccctcccgccacagcccccgcgcgccctttgaggcttccttctggaaatggctacaagttcctgtctccaggaagatttttcccttcttccaaatgctaaagcatcttttatacccactgactctgagcagcctgcagatgggggcctggcgtttgcttcagcccttccctgagtgcagtccccccacagccaccagcaccctcatgatgctgtgctctgcaggcgaggggcaccaccacgtccaaaggctgccacacacactggtggcttttctgggccacattcaccaaaagccaggacttctgtggggctggtacaggaggctcatggaatttcctacacacttcaccaaatgtttgtttacctttgaactccctgcttctcatctttgatatgattcttcaccaggattttgtacaaaaatgatcatggttctggggtggggagaggaaagggagcacatattttgctaagaggtatatatgcagtaccttttatacacagaaatacaaatagagctttttctaaggctttcggttgctggttgggggtgggatatatgaaatttcagttgaattctacaggaaagtgttatattagccaaaaacagaaaaatggtttttaaaatgccaatgatttgtaattaaattgtagcaattttggtctcatgatagtgtaatatctcagcaacaatgcaataattcacattgaaacagcgcttccattctgaactctgctctgcaaatgtcttttgggtcccgctgtcaaccaaacttgaattttcttaaaaaaaaaattatgtaactcttatccaggcattttagaactatgcaattgtgatttaaaatgcaactttgtgcttttaaaacattattgaccttttttgtatatggataaacaacttggttttattatcaatagtactttgcatttatagctattatttttaaaagctcaaaaagttttttaaaatgtcaaattttgaatagtcatcaataagtaattatcaagtttggaaggaaaggttgaaatgactccgtttccttataagc

SEQ ID NO: 59775 - DNA, 530 bp, Homo Sapiens
ggttttggaacatgcattttgacaagcttcccaggttattctgatgaaggtgctttggaaaacactgtgctggactgtagtctttccaagacacaaatctgatggtgtcttcctcgcttcagtggctcctcacagcctcaggaatagtgtagtgataggaggtaggtcccagactttgttccaacttcacaactacctacaggtgactcacctgggcctgctctctctcactctgcctttgcacatttggccaggagcacctgtactcagctgcctccttgaccactccttctttctttaaaggatgaactcagatgccacctcttttagggggtcttccccaactccaagctggattgggttcctgtactctagtctctcatactactcttccataaatgatctctaattcatttgtttaacaaacacatacgtagtgattactatgtgccaggtactgttctgggtgttttataaatattagtttgctgaatcctttgccaaccctatgaaatacgaactatcattgt

SEQ ID NO: 59776 - DNA, 2091 bp, Homo Sapiens
aatgtttttgtattttgataaaattttagcatacagtctatcctcattatttgtggattctgtatttatgaattcacctacttactaaaatttgtctgtagccctcaaattaatacttacaatgcttttgtggtctttggaagacatgacattttttcacgtgaaaaattttagttgcctgatgcacatgttctcaactgaagtcaaacaaggtgacactgccttcttgtcaactctcatattgtaagcaaatgtcatttttgcagtctttggtgctacatttttctcatctttgtgctttttgtcggtgattccactgtttgagatagcccccaagcatagtgctgaggtgcttctaaatgcaagaagattgtgatttgtcttatggagaaaatatgtgtgttagataagctttgtttaggcatgagttcagtattaatgaattactaatgtatattcagtaagtgcctttaaacataaacacacataaaacatgattatgtattgattggttgacaagaatgtgcccagaggctttcaggaacctgtttccccaaggaacagtggttctgtgttggataatttagtgtctgtagcgacttcatagaacataattgttgtgaataatgagaacctactgtaattggtttcatttctaaacctgtgtattttctgtaaagacatcctgagcctgagtctggtggctcatacctgtaatcccagcactttgggaggccaagacaggaggattgcttgagcccaggagttcaagaccagcctaggcaacatagggagaccccatctctacaaaaaattaaaatatccagacatgttggcacgcacctgtagtcccagccactcgggctgaggtgggagcaagacttggcctgggaggttgaagctgcattgagccatgattgtgccactgcactccagtctgggtgatggagcaagaccctatctcgaaaaaaaaaagtccgccaaagggggtctttggcacacacaaagaaataagaaccattagcccttaatgtagcctgagaaattagatctatcctttttttttattttttatttttattttttaagatggagtctcgctctgtcacccaggctggagttcagtggcacaatctcagctcactgcaacctccactgcctgggttcaagtgattctcctgcctcagcctcctgagtagctgggattacaggtgtgcgccactacacccagctaatttttgtatttttattagagacgtggtttcaccatgtcagccaggatgttctcaatctcttgacacgtgtctccctccagcttctgcccttatttacctgcctgttggctcttaaaggcatttttggttgagacttttgcatgtaaaataagaactttgccatctttggattcccccatgtttgtttgtttgtttttaataaataatatttaatattaaaaggagctgtggtttttttctctctaaagagcaggaaaggacagagactggtcgctctctgcagtcacacttgaggtgaagaaaccatgggatagaattagctgttagttgagtccctaggttcagaggaagaaagaagaccataccacctggtagggagtgcgaaggaggttccagggactgatccatagaagggtgtcagaacaacttcataataaagagttgccttattttcttggtcaaggggaacttcctgtgtgccttctatcctgatgacaccccctcactgaaatcctggtgttgtttccacagagctgtctggccttttgtccttgatccttggttaaggaaatgaccaaccaggtaagacctgtgttgaagggaaaaacatcaattggtctctttgccaagttcaagtccagtaggttttctggatgtgtagtcaagaaactagcatctcattcttgcccggctcctaaagagctgggtgaccctgggtacctagtcaccacagtgttaggtgggactagtgaaatgcaaatactgagaggaggattggttcatccaagtctttaccacaatttagtgagtaatagaagaagcttaaaagatgttgtacaaaaaaaaaaaaaaaaaa

SEQ ID NO: 59777 - DNA, 483 bp, Homo Sapiens
ctgcccgtcggggtggacacgatcactccgtcgccctgcaccgtggtgatgaggtgtccgtccaggtagacatccacattggacaggtaggaggaggggcctctgtcaatcaccacctcattcaggacctggtactgcatggcctgcttcccgacatccatgtccaggcctgcagcctgcgagcctttctcacccagcccattgtgcacggccgtcttcttcccccggagctccttcaccaccctgaccttcagccgactccggagaacaacagctgcgttccctggaaaagcgaggaagcgtacagcagcgtcccgtctccccccaggcagatgatgaagtctatctgattggaaatgtcatcataatcttctcgaaaggtacagaatttcttcttcactgccccaaagctttcatcgctggcgatggcagggtcttctagcactttcttttccacatacacgatcatgttctcctccatga

SEQ ID NO: 59778 - DNA, 539 bp, Homo Sapiens
ctttagagatcttctctgcatatcaacttaaccctgacgcctatggaataagtatttacctaacagtgcactgtctaggccatatcattttaaagctgtggtttttaaccagcttaaaatcacatttaaagctacatggagagctgatgaaactccttaatgcccacactgaatcccaagccaaatgaaccagagttttgcgggaaaagatccaggtatcaggatttttcaagctctctggtgattctgacatacagtcaagtagagaatcaaagttctacaatgaatccagaatgcactggttctcagaactgcaatactctgaggtgaaccagggatagaagaattggagatacccagaagggggaaaaatgtcctggacaattctgtttctttttctttctttttttttgagacagttttgcactgtcacccaggagtgcagaggttctcagaactgcaatactctgagatgaattttgaaaggtgaatcagggatagaagaattagggatacccagaaaggagaaaaatgttcta

SEQ ID NO: 59779 - DNA, 512 bp, Homo Sapiens
  misc_feature (381)..(381): n is a, c, g, or t
  misc_feature (450)..(450): n is a, c, g, or t
  misc_feature (470)..(470): n is a, c, g, or t
gagacaagatattgctctgtcacccaggctggagtacagtggtacaatcttggctccttgcagcctcgacctcccaggctcaagtgatcctcccacctgtgccaccatgcccacctagtttttgtagttttagtagaaacaggatttcaccatattggtcaggctgatcttgaactcctgagctgaagcaatccacctgacctggactcccaaaaggctggaattacaggtgtgagccactgcacacagcccctaactttcaatatatttgcaacaacccattatcatgtttccgaaaattacaacagcctcactcatcattattgggttgtagtttttaaagaaaaaaacaggacaaggaagctgtcctattactccttngtgaaatccactaaaaatcactgatgctcctttggtaaagatagacaagtggaaaatacaccaataagngaattaaaaatcctacattnggactcgattccttgctttaggagtttgggactgggtggaga

SEQ ID NO: 59780 - DNA, 1771 bp, Homo Sapiens
ttgtgatggaagatttctttccatagattagtataatttacgtgggctgtttgaagagattaccttcttagtggttcccttaaagctctttgttatgtatatcctgaagcccagtcacttcttcccacttgtttttgagtgtttgatctagacaatgtaaaggcacttttaagataaaaattattgtatttgggggactttgggagactcacttcccaatcattttgtttagaagcaaaaatgattaaacagtactttatgtcagatctgcctgtttaagggatttgagcacacctggtagcaaagaggtttaacctagtttctcagatgaaaactagaggtggaggaaggacgaggaagcagtccagggtgagctgaggagctggttacctttagcctacttctgggatgatgcacattgtcgtctaggtcagtcagcctcctcagcccatgcattaagattcctggttgcagctgggcacagtggctcacacctgtaatctcagcactttgggaagctgaggtgggcaggtaacctgagttcaggagttcaagactggcctggccaacatggtgaaacctcatctctactagaaatacaaaaattagccagatgtggtggcggacgcctgtaatcccagctacttgggaggctgaggcaggagaatcactcgaacctgggtgttggaggttgcagtgagccaggattgtgccactgcattacagcctgggtgacaaagtgagattctgtctcaaaaaaaaaaaaaaaaaaaaaaaaaattcctggttgttagtaacagaaactcacatagtctagctgaagcaaaaggggtttttttttttgcttacttaactagatttcaggaagagctggaatgaggtgggttttaaggacattcataaccagggacttgaaacacagctgtgtgccctatgtggctccgtgctctcctcaccttttatctcttagtgttgcgttaatttttgtcttgctgctggtgggcttcctctacatggaaggggatatgactgtggtcattgcccatctatagacatctttattgctgtgatctgagagaaaacaggcttcttttcccccagcttaagtttgacaaatcccagggaagaatggtcactggcctagcctaggtcatgtgtttgtgacagttctaaggggtgcgtgataggctcagcttgtgtcacatgcccagggaggtcacacagatgataccctgagggaactgctgtaaacagttaagatacagcagttttcatgcatttttagtccatatggaactcagctcaaacaactagttaagattctttccttgattcattgaaaatcttttacagtctttgttgatgctggtgcctgtaatcccggctactcaagaggctgaggcgggaggatcgaatattcgcagtggcctgtgaatagacacttcactccagcctaggcaacatagtgagaccctgtctcaaaaaaaatagaatgaggctgggcacagtggctcacacctgtaatcccagcactttgggaggcaaaggcaggcagatcgcctgaggtcaggagtttgagaccagcctgggcaacatggtgaacaccctgtctctactaaaaataccaaaattagctgggtgtggtggcagtgcctgtaatcccagctactcgggaggctgaggcagaattactttgagcccgggaggtggaggctgcagcgagctgagatcgcgccactgcgctccagcctgggcagagtgagactctatc

SEQ ID NO: 59781 - DNA, 2522 bp, Homo Sapiens
ctcccagggcatagaattactgagttagaagaaataactggtttatttttacataggatgtgatgtctaatattgtactaaaaatgaggatgcttatgctatactccactggtactatccactggatttatttattttttttattttttgagacggagtctcgctctgtcgcccaggctggagcacagtggtgcaaacttggctcactgcaagctctgcctcctgggttcacaccattctcctgcctcggcctccagagtagctgggactacaggtgcccgccatcacacctggctaattttttttgtattttttagtagagacgggggtttcaccgtgttggccaggatgccctcgatcttctgacctcatgatccacccgcctcggcctcccaaaatgctgggattgtaggcgtgagctaccgcacctggctgtttttgtatttagatagagtttaagtgcaaagtaatctgctgatttaaggttgttttaaattcatatctgaggaataaaggatggacaggcaatttccatccctttgatgttccataattctagctatttatatcattcatttgccccttcagcatggattggcttacacctgtaatacgttccagaatagctggatttcttttgttttcccatcggtgattttcatagagtagatgctcaatgacatataatgcagaaaggccaaaaatagaggtaagtaaagctatgaaagaaaagaagaacgaaagaggaagcagagtagtttgattttgtttattgctgcttaaaccagagagatatgttattctggaagggtgatttgcttgtttttacacatatgcagcctgactgttttaggcttggcttcttttttgtttgtttgagatggagtgtcgctcttgttgcccaggctggagtgcagtggcacgatctcggctcactgcaacctccgcctcctgggttcaagggattctcctgcctcagcctccccagtagctgggattacaggtgctcgccaccacacccggctaatttttacatttttagtagaggcggagtttcgccatgttagccaggctggtcttgaactcctggcctcaggtgatccacccacttcagcctcccaaagtgctgggattacaggtgtgagctatggcacccggctggcttatttcttataggctttgggccgttgctaattttccagctgatataatacaatccagctttattcgaaagataagtattctaactcttgttcggtgtttattcaaacttgtgtttgcatgtatttgtttggactataaattttgagactatagtgagtatgtttttgactataatattttaaatggaagatgaaatttaaattagtatttgcttgtttctttttacaataaaataggtagctttgcagtttggggagggctgttttccatgattgactgtagtatggttcaagtcagaggaaaggaagatccctggaactccatcacaagtggtgccttaacgggagccatactggcagcaagaaatggaccagtggccatggttgggtcagccgcaatgggtggcattctcctagctttaattgaaggagctggtatcttgttgacaagatttgcccctgcacagtttcccaatggtcctcagtttgcagaagacccctcccagttgccttcaactcagttaccttcctcaccttttggagactatcgacaatatcagtaggacttctttcctaggatttctttaacagaacgagttgtggttcgagaaggatttcagaagatcaagttacagtctgtttttaaaaccataggtgggacagctatggccaataggctataaagagacatttagcacttttttctatttaaaggaacaagcggggaagggtgctaaaagataatacgtttatttattcacacttgaattgcatttgtgatcaaaataaatgtttaaatcgctaaaggaaaatacagtaagtgcttgaaagatgaaggaccaaaaggccaaaaaacagtgaaatatgatcatcatttccttgcggacttctctgcctggttttgtgtgttctgttattcaaacaataaaaagctggtggaacttactctttcttttaagataagttgtagacttcgatgtttcatgctcatgtacttcaaataatgcatgttttatagttagtccctcatcacttgaagtgacttctgagaattatgcagagtcaacatggatcatttcacagtgagatgctttatggattgaaggatatggtaaaatgtttatagtttactttgaaagtaaaatatactatgtcttggttttgaggatattggatacaaaactctcttcctttagggctactgagtcttgattcctgatcatcagaaatttcaccagaaacaacttgcttccaatatacccaattctatatgaagaattcatggagagtgtactggcactggaagagtttagtgtttcttgtatgcttgaaaataaagtatgtactgttttgaatgtg

SEQ ID NO: 59782 - DNA, 505 bp, Homo Sapiens
aacacctacctcacaggcttgttgtggggattaaatgaaataatgcatgaatacctaccacaatgtggcaagcaatgtgtaagtgctcaataaatggtgcctattattaccggtattataaatgtttgttagatgacatgaaaagtcatttggtacacatgactatgaaggtttattaaaaagaaaaagaaaaagacccttggagaaaaagtgtgtagttcttccagtagaagcagggcactatctctggagtaaaacttccgctgagctctctttcaaaagaaatggagaaacagcaattatagcagctcaaattctacaagtctgtaacttaagttacataaattctttgctgacctctgagtcaatatccactatttagtcagtatctctgaaaacaacttttaactcttcaatgccacaaaggcaaattttaagacacttgttatagaagatgaactaaagagctcaaaggagtgcctttttctttattagcctctttgac

SEQ ID NO: 59783 - DNA, 497 bp, Homo Sapiens
tttttattaaatcggcctacgtcaccatactctaagaggggaaactcaaaagtcactgttttcccatccagctgccccttcctgcctcttcaggaagcctgctctcccatcctgcagccgtccaaacctgccattttagcaatgagttatgctccactggtcagattttctagtcatttcctgtgtgtcaggcagtctaaagtccctagtgagaaagcaagctcccttttaaataggatgtattggtccatgtatctcatcctctttccagacagaccaggtcatggttgaggagtaagggaaaggggctgactgacctcttttgaagcagcaatttggagtggtgctagcagagagctagaggctgggtgaccagggaggccagagatataaccatcgcacgatggtctgaatatgatttatttttcttttggggaggggcaggggtttaggaagagtagcgaagtatttaacaaacagctttggagcaatatctg

SEQ ID NO: 59784 - DNA, 506 bp, Homo Sapiens
ccttgatttaaaaaatactttattgctaaaaaatgctgacacagagacatgaagtgagtacatgctgttagaaaaatggcaccaatagacttatcccacacaaggttgccaaaaactttcaatttgtaagaaatgcaatatatgtgaagtgcaataaagtgaaatgcaataaaacgagcagtgcttgtacaaatgagcaagatgaagcaaagtaaggttaaacatacccaaggccacatagctagaaaatggccaagctagattcaaacctgggtaagatagctccagtgctatagcacacggcttagcctctatactttactgccttaatccttacactgcacatcccattttaagatgaagatactcagttttagagagctgaatggtgcatccaatatttaaatccagttgtcttgattacaaaccttatgttcaacatggattttttttttttcccttagcaatcatcccaaaggagaattacccttcaaattggccacctt

SEQ ID NO: 59785 - DNA, 3543 bp, Homo Sapiens
tgcgtgtcgttccccttctctgggatgggaggcagctgccacgggcctctgaaagaggtgcctggaggcaaagacattgcaagtccgaacttcgttctgggccaagctgtgtgcccacaggagcgggcaaacggggctgagaagcagcaagaaggacaagctcgggtaggagaaaaggggcagaagaagagtgacactgtggcttccttgatgttgcagcacccctctacggcccctcccaatccacagagcctctgaccagcaccagtcttgctgcctgtgctgggggcacttggaacattggttagcaggagcaacaggcctggcactgccagctaggttcagggaagagagaaatgggctgagctgctgctcctggtactactgggccatggatgaaggcaccagactagaagtccagagccctagccaggggcggcaggagggaagactaccacttattgtgtacctattctgtgcctagccccgcaggaggcacttgaatgtttctcatttagtcacatacatttattgagcacctaccacatgccaggcattgtcctgatgggatgcagtggtgagcaaggttcctgctctcataacaaccctgggaggtaggccctattgtcatccccattttacagatgagaaaatcaaggctcaatacagtttcatgatttatcacagctagtgagtgtggaggagggattctgggccctgacctaactcgtaagccttcgtttttcaggctacctttcatggccatgaccactcttctaatagcccccaggcttagccttgcctcctgggcagggctatggctgccccttttgttggagtgttggagaccctgcctctacttgtttccacccatccctccaagccagagcttagccatataacaagagctcggtaatgaaccctcctgggtgcaatgctgggtggtgacccagagtcaccttctccatccccgttgccctgacagccactcttttggggcaggcagatgaagagactgaggttccaagagtgtctgtcacttgcccaatatggagaggtacaaccagacagtcccaagaggccctggtaccttgccctggctctcaagggaggaaccagctgagggtagcatgtcctggccccaaagctgactgctaccatgctgtcccatgtctctacccactgttcccagtgaagactgaggccctatcccctgccaggggccaggcaacagggacacctttcttcttgcttctgggccaacagccacagccctgggaggcagagcccagacatgcctggtgacttcagggctgatgctccctccttcctcccaccccgtcgctcactccccatgttgttccggatggagtggggctgtgccctgacaggcagccagtccgctgtctggccatcatctcctgtctctgaggaaattcccagaatgcaccctggaaggaacggaaaaaagcagcaaagaaagtgagaaagaaaaagcaacagagaacagacagaaacaaccaaatttgatgccaagaggctgagaagtgcagaagcgggtggcaggggtccccaggaggttgatttgtccctctcgtggtggggtcaccagagcctggagtgggagtgaagccttgaggctctggccacctctcccttgccaactccatgctaccccctagtggcctcagtgtcagctgcaggaccaggactggggatgtcggaggggacctgtccgggcggcagggagccccacttattgctttcctaacgttcctctgcccctctctctgtctgtttccctaggcctctgcgggagaagatgaagccggaaaggaggagacccaagggcagggggaagaggaggagagagaagcagagacccacagactgccacctgtgagtgcgcggggtcccagggatggcgaggaggctgggcccgaggggagccccgccttgccgccagggttaggttggggagggggagagggcaggactgaggccagtcttgggggcagaacgggagctgcacctcctcaagactctagggcccaggaagcatcagtggaccttggtttttgtcccggcttagccctaggtttccattgaccttcaacaaatcatttcacctttgtcagcctagcttttctctgtgtagaatgaggggcaggaggtccagcaaacattcagtcactctacaaacatttactgagcacttactgtgtgtcaggtacatctgtgagcaaacaaacaggattcctgcacattagtgtttaccttttagtgattaaaagtctgtcatcagctgagacgttatctggggccacttcctagtagccccggggaacatgtgcccctcgccactgtctcccaggagtatttttgcctgtgggtccccttgctgcttctaacccacttcgtaccttgtgggcagcagaatggagccccaggcctgagtgtggctgggagagaaggatgagaggagggaaaacccaaatctgtgagagtaaatagaaaaaataaaatatttcacgtgcacagtcaatcagtcactgaagagaggtggctctccttcaggggctaagcctcccccacgcacgtgactccaggaagtcatttcgtgctatggagtggagttgacccaagccctgaccccatgagccccactccatgaagacagggatcctggggactgcgccccctaggggtttatgctttcatctcttttctgggcccgcgcggcaatttgggaaacaagctggcagggaagtccatccaggcccgagttacccgccggcagccggaggcagaaagtgtcccgtggctcctgttcccaaggcagcagtcttcagacatttcactcgggaatctcctgaaagaatttcaaaagtggccgggcgcagtggctaacacctgtaatcccagcactttgggaggccgaagtgggtagatcacttgaggtcagaagttcgaggccagcctgaccaacacggtgaaaccacatctctactaaaaatacaaaattagctgggcgtgttggtgcatgcctgtaatctcagctacttgggaggctgaggcaggagaatcgcttgaacccgggaggcggaggttgcagtgagccgagatcacgccactgcactccagcctgggtgacagagcaagactccgtctcaaaaaaaaaaaagaattccaaaagcccatgtgctcccttgcccattcttaagttgacattgaacattttcatcagaattataagtcaagccaggctcagtacctcatgcctgtaattctagcactttgggaggccgaggcgagtggatcgcttgaggccaggagttcaagcctagccggggcaacatggcgaaacctcgtctctacaaaaaaaatacaaaaactagctggacgtggtgccatgtgcctatagtcccaactactcaggaggctgaggtggaatgatcacctgagcctgggaggtcaaggctgcagtgagccgagatagatccactgcacctcagcctgggtgacagagtaagaacctgtctc

SEQ ID NO: 59786 - DNA, 1669 bp, Homo Sapiens
gtgctaagaaaactgccccacatcatctgcagtaggacgggggagttggagccctggtcaggccactctgctactgaccacagttttctcatctctaaaaaggcgcagtaacaatataattaccgtatgcagtcccccaggatacagggtcaaaggagagcacaaccatcgcagttggaagcccatggggcagcccagtgcagatgcatctgacttacgaaacttcagtgacacctgctctgtgccagacactgaagatggagcagtgaacagcactgacccagcctgtcctcctgttgcctgcaggccagacggagtctcactctgtcaccaggctggagtacagtggtgtgatctcggctcactgcaacctccgcctcccaggttcaagcgattctcctgcctcagcctctcaagtagctgagattacagacgtgtgtcaccatgccctgttaatttttgtttgtttgttttgttttttgttttgttttgtttcgttttttgtttttttttttgagacggagtcttgctctgtcgcccaggctggagtgcagtggccccgatctcggctcaccgcaagctccgcctcgcgggttcatgccattctccggcctcagcctcccgagtagctgggactacaggcatccgccaccacacccagctaattttttgtattttttttagtagagacggggtttcactgtgttagccaggatggtctcgatcccctgaccttgtgatccacccaaggcctcggcctcccaaagtgctgggattacaggcatgagccaccgtgcccggtcaatttttatattttttgtagagacagggtttcaccatgttggccaggctggtgtcgaactcccgacctcaggtgattgtcggccttggcctcccaaagtgctgggattacaggcgtgagccaccgcgcccagccggtgggcagccagttgtgttccgggaggaggaggacaccctggaaagacagtggggccagacactgaactgcctttggaagcaagtaggagcaacagcgaaggtttgctggctcagaagcaaggtctcgctgtgttgccctggctggagtgcagtggctacttacaggcatgatcatggcatactgcagcctcaaactcctggactagagcagttctcctgcctcagcctccagagcggctgggactgcagacacgcaccacagagcccagcctgagtcattttgattctgtaactggcttcctctcggcgggcaggctcacaccctccacccccagctggagatggaaggaggatgctcaccgcccattcctcatgcaggccatcgatggaaatgtcagacagtgcgagtccacgcctgaacacttctggggtccgctctgggactgacactggcagatccatcgatgccgttccattgtttgctgacttgcattgattctatgagaagtctgcagtcttttgcagcgttgttttcctatgtataattgtctcctcccaccccactcaccccagctgctttccacattctctctctttgattttcagcagtctgcccatgatgtgcctaaataggactttctttgcattcatcttggctggggctcactgaactttctgaatctgtagattaattttcttttttcaataaaccttggaatattttcagcat

SEQ ID NO: 59787 - DNA, 302 bp, Homo Sapiens
ttttttttagagactaaaccatagcaaggagtttgtgatcactgtatagcgctgagtgaaacctcaaaatacattctggaatttgtaagggatgctttttttttttttttttttttttttttggtattttcactgtcaattatgcctcgtattatttatttatttgccaaaatacgactgtatgaaaaaaagctacctcatagagctcatgacacataataggtattcactgagcatttggtgatttgttaagcactcacatcaataaaatatttcagctcaacaggcacactaggggccag

SEQ ID NO: 59788 - DNA, 441 bp, Homo Sapiens
gccaggatgctgctatcatctgatcttgaaagtgtcaaacttaccttcaaacagtgtagaatatatgcaattctggacctagacagaggcaataacctaaagacatttgcagctcatttcttgtcagaacccattgagaatagtggtattgatggaagactgtcaagcccatccagttctctagtctaaatagtctcagtttatccacgacttgagccatctaaaagttgcataacaaattagccgggcgtggtggcgcatgcctatagtcccagctacccgagaggctaaggcaggagaatcacttgaacccagaaggcgaaggctgcagtgagccgagatcgcaccactgcactccagcctgggtgatcgagtgagactccgtctccaaaaaaaaaaaaaaaaaaaaaagttgagactatacaattaacacagcaatat

SEQ ID NO: 59789 - DNA, 487 bp, Homo Sapiens
tttcaactacagctattttcccacattttttagttgttatgtagactggttttaaaatactatcaaccaaaaaaaaaaaaaaatccgaagaacaacacccaccatagcaaaagaggaaaacaatcttaaacaaaaagcacaacaaagatgactatttgtgattggtgtatttttgccagccctcctagagaagggtgtccatctcccttccccatcacagaacctgttcaccaagtcagttaggttaggggatccaaaaggtcagagaaacacaggaatgtacctgaggaacacagcaatcatagtatgcccttcttttttaatcacctgaaatctgataaaaactagcaatgagaagctttgaaggagaaaagcagtcataaaagaacaagtaatcctggggataaggagtggcagacgaggaaaggagttaggggtggattggtgtctttctagacctgtgtcatgttttagcaccagcctacac

SEQ ID NO: 59790 - DNA, 539 bp, Homo Sapiens
  misc_feature (343)..(343): n is a, c, g, or t
  misc_feature (464)..(464): n is a, c, g, or t
  misc_feature (482)..(482): n is a, c, g, or t
  misc_feature (490)..(490): n is a, c, g, or t
  misc_feature (494)..(494): n is a, c, g, or t
  misc_feature (519)..(520): n is a, c, g, or t
  misc_feature (531)..(531): n is a, c, g, or t
gagatttttagtagagatgggatttcaccatgttggccagactggtttcaaactcctgacctcaagcgatccacctgcctcggcctcccaaagtgccaggattacaggcgtgagccaccgcgcctggccacacaaggcattttggcattaacgtatcaagtcttaaaaatctgtatatcatttgtcccccaaatttcatttctagggatctgatgcaaagaaatagatcaaatatataaaaagcacgtaccagtacagtaataaaaaaatttgcagctgggcgtggtggctcatgcctgtaatcccagcactttgggaggctgaggcaggcggatcacgaggncaaaaaaaagttgtaaggaagtcctccataaatttaagaatccatttgattctttttatttttctgagatatggtctcactctgttgcccaggttggaggacagtggccccattgtgggtnactgcaatcttgacctgnttggcttnaagngaccttctggcttaggctccaagcnnattgggcttcngggccccc

SEQ ID NO: 59791 - DNA, 2289 bp, Homo Sapiens
ttgtacccttaaaattattttttcctatgcagaattgactttgattaaaaaatgtttttgatgactattttcctgattcgtcagtatatctaattgtgttcatattactcatgaaaaatcttgtctatgagggacgtatttttagtaacatttttatagcatataagaacttttacagcaaaaacaggaatcattaagtgtgtgtgcttttatcataacttctcttttaatggaacttaaaatcttaactcgtgtttttgcagcactttttttgcacatggtaggttcttaatatttgaatggaattcagtgtgactgttctttgtgttctcaaaagtctgatctttgtaacaatttgtctttcacttgagactttttttttctttgcatatgtgcacgtctcactcttggttttccttaatcttttttaactaaacacatctatgactcatatttccctatttatgaataggagcaatttaaaatttcccaacatggtggtatgtgatgtaacataaccaaaggctacatgtttacccttgtttaattacccttcatttgtggaaagatgacgtatgtatttatgatgtaaatgtctttcagaatgacctttgggactaagctttttttttttttttcccaccaaaaaatggtcatgacctaggaagccttgttagtaaaatttaaaaaggaaaagttggctgggcatggtggctcatgcctgtaatctcaacactctgggaggccgaggtgggtgtatcaattgaggtcagagttcgagaccagcctgggtaacatggtgaaaccccgtctctactaaaaatacaaaaattagctgggcatggtggcctgtgcctgtgatcccagctactcgggaagcagagacatgagaattgcttgaacctaggaggtggaggttgcagtgagtggagattgtgccactgcacgccaacctgggtgacagagcgagacttcatctcaaaaataaaataaaataaaaataaacaggaaaaatctggtcaaatgccccttgttcttcttcaacagatacatagtgagttgtgtaaaaaaggagttggaaaaggaatatgtagattcaaagtgacttaaagaatagaaaaaaaatttgttttaaaaaatggccaagactaaatcatagtgtctagggaggtacacctgaataataaaactataaagaaatacaaaatatggttactactaagaatagtctgttgccagtagtacacagaatgagcactcaaattataacagaagcattttggtattcataaatgttctttttttaaaaaagaacacaatcgaaattataggctgtaagtactgattttaattgtagtgaatgtgaaagtgttgttaatgaaaatataaagaatatttgttaaagtgtggacctagccaggaatactaggtagaaaaggtaactctttaaaaacatttttttaattgtgaagttaatttattgtcactttgtttgatatttattattagagtccctaggttaattctgtttttattgcttttcagaataattaagacctaaatcttctgccgaattctgtttggtttccttatttcttttgccatgttctttcattccacaaatgttattgagcacttccagtgtaccaagccttgtgtttactgctttgatgataaatgcaataaggtaatgctgcttttaaggatccttcaggataggctcttgtagcagtaaggacttagtatttttgctatagaagtgtatggagagctatctatggtgcaataactgtggaaatacagtttttattctatttggttcccatatacattgagtcctcctttggtgggaatttgatcaggttggtctcagttgaatcctggctgcatatgcctcagtaaggaagaaggcctaggggactgtggaaagcctggtggtggtcctggaaggcttgagaatacctggagctggaagctccttgctcattggtgacctttttcatatgcagcagagctcttggcattcctagcatactaccttgaaaggactgtgtcttgcctcctagaaattctggacttggtagaatcatttgtttatgttattttaaaaagaaaaaaaactctgaaatgtactttttggaagaaaaatgaacttgtttttggacttttctgtgtgttgtttctttaattgaaaattctgtctggagattgattttcaacccccttcctttccctctagttttaaattgtaacattgctttccaagcatttcaaaaaaaaaaaaaaaaa

SEQ ID NO: 59792 - DNA, 740 bp, Homo Sapiens
cagtgatgttttaggaactgaaatgtcacacttaaagtcttcagcccagctacttccctatttttcgtggggagaagagggcctgattagaactgttctggtgtgttggcgggaggggaataattttgttcagtccttcttagcgaccaaactttaatttttaagaataatatatgacttactgaactgaagcattctgagtgaaaggagctccagaggaggtggagttctgtgtgcctcacatgttaaaatctgtgctcacccttcagagcagagggaatacctatcttcagatatccgtccattttcatctcttaatgtgtagtcaaaagtatgacttgagagtgttgctctggtattctgggttctgaagtctggttatacgtggtattctgggttcaacaagtatgactcgagagtgtgctctggtattctgagagttgctctgtattctgggttctgaagattattgaaaattaagtcctactacatttgacagtggagacttaccaattttaaccactgggctttaggcagtccagaaaaacgaagcaaggcatacaagggtcacttcaggttgtaaatctgactagtacaaacgtggacaaagtttgttctacatgggacagaaagtttcattaccttattggtaggatggaggtatggctattataccaaagttttgtaaaaatatttccattcacaattttagttacaataactttgcggagctaccaggg

SEQ ID NO: 59793 - DNA, 1685 bp, Homo Sapiens; identical to SEQ ID NO: 22826

SEQ ID NO: 59794 - DNA, 534 bp, Homo Sapiens
tttttttttttttttttagtataaaataaggtaagatagatttttcttctaaaagtattagattgttgcaaaagtaattgtggtttttgccattctcaacttatctaaacttgtaaaatatgtttgagaatgtcacaaattagaccagttatttttgttcccagataaaagaaataaattattctatgaactattcaaaatagagaaagaagacaatctacattctcagctttcatattatgaattaatccactcaatttcaaaataaattagtgctttctcaggggtatatactactaataaactaacgtttcttataatgaaaaggaactgacaattgtatttcacaaaacaaatttccattttggttagtatatgttgagctaacagattaattagtagtgccaatgaatactttttaccacagggaggggagcaaatcatgttaaagggtagtaacagccaacatgacacagtgattaccatgggccaggtactagtcaacaaccctatgaactagatgttattttactc

SEQ ID NO: 59795 - DNA, 578 bp, Homo Sapiens
  misc_feature (572)..(572): n is a, c, g, or t
tttttggtggagatgaggtttcactatggtgtccaggcttgatttcgctaattttcttataaaagacagcaggaggctccgtcaactaagtgagacggaaaccaggggaaggagctgaggccccgacagggagaacccaggctcctcggaacatgcagaggaagatccgccgaggccccgacagggagaacccaggctcctcggcacacgcagaggaagatctgccaaggccactcggcaaagctgacggcaaggttgctcactcacatgacagagaatcaggtggggacagcattgtccccactcccaggccttctgggaagatcaggtattaggtagccgattggcaggtcacttaccttgaaccagtctgcatatgacaggaacgcagaggggccctccagtgctgcctggcgcacaaccaggaacgcagtgaccatgctgtccagctggcagctctcgaatgcctgggccatcaaacgcgccacccagtcttcaagcagctgctgcgcttctggaaagcagacaaccagggcagacacaaaggagagcactctcttccagtgaacctnctgcgt

SEQ ID NO: 59796 - DNA, 2192 bp, Homo Sapiens
tttttttttttttttttcatagagacagggttttgccatgttggcaagcctggcctcccaaagtgctgggagtatagggagtataggcatgaaccacgatcatctattcacatcttaaaatcaaagctgccagtattttctcacaagtgtaaaactctcaggacaactatccttgcctatgccttttccaacttcacctcacaggtaggttattaagatcccagtatcactgaattgggatgtagaaatgggacctgggacccccaactcctcccagtcctggcaatgagcagagaccaagctattcagatttacactggaaaacagtttgaattcctgggcccaagcaccaggctttgttttacttttaatgaactgttttctagtgtcctaagtaacttttatacccatctgtactaaagtgaaaaagacgcttttcccaactttcaaaatgaagtatcactacacagtgaaatataatgcttgtgaagaactattgtagagtcagacacacctggattcacaatcttcactgatactagcatggggtccttacacagaatttttatgacaggaagactacacaaaaaatagataagtctaaccaagttagtaatgggacacacatgaggtagccaatacttactgactgaccctcctctactcataaaccatttaatcctcacaaattcttcaagtagacctggtccttttgcatatttctgtgcttgttatttattgatattaagttccaaggggaggggatgtattcatttagcagaaacaaggaccaaaaaagacattaacagaattggaaactcacaactagttttaaaactgaagtgttcggagctctggtctgtcccaccactgactgagaccaacaatccaccctcctgccatctcatctacaaagtgaaggccatttgctctgctcttctctgacagctccctgggccaccaatcagacccaggaagtgttctgagaagaggaaaaagcccatgcaattgctgaatcacaatcacagtgctacccagccctcaaatggatattaatggtgaacaaaaaacaatttctaacccaaaggctaaaaatctactggacagcatcgtggggtggatacaggaataggagtaactgtaatacagggctgacaaatcaacatcacatttgtaaatcaagggatggccaggaactctttagaagagcaagacatcccagggtagagacagattaggcaggcacaggaaaaaagtgcaagcgctgaagttaaaatgcaccaaacaccggaagttctaaagccagacaggacacaagctgcaagtattttgaggcctccccctttaaatcatacacctgacaggaaaaattttgagtggggagcctgagattaagtaatgagcaattagccgggtgtggtggtgcacacctatgatcccagctactcgggaggctgaggcaggacaatctcttgagcccgggaggtggaggttgcagtgaacagatatgtgccactgcactccagcctgggcaacaagtgagactccatctcaaaaacaaataataaaataagcaacgggcagcttgttttcgttttgtaatatatttttttttgagagcccaggaggcggaggttgcagtgagccaagatcgtgccattgcactccagtatgggctgggcgacagagagagactccatctcaaaaaacaaaacaaaacaaaacaaaaacaacaacaaaaaaacaactaaggtatggaagtgacaagatgatggtcccccctccaacacaatatgagcaaaaacttaagatacttatctcacactgcctctcaatggaaaacaaacttgaggccttgaaaactgatccattttccaataaaggaaagcgtccccccactactcatcagtattaaggtgggctcagtgtttactcacccttttttctgagctctggtttgcctttcttgactgtggccatcaccatgtcacccacaccagcagcgggaagtctgttcagccgtcccttgatccccttcacggagatgatatacaggtttttggctcctgtgttgtcagcacaattgattacagctcctaccggaagacccaaggaaatccggaatttcgcaccagaggacccaccacgtcctcgcttcgacatcttgaacgccggaaaaaaaaaaaaaaaaa

SEQ ID NO: 59797 - DNA, 580 bp, Homo Sapiens
  misc_feature (453)..(453): n is a, c, g, or t
  misc_feature (483)..(483): n is a, c, g, or t
  misc_feature (499)..(499): n is a, c, g, or t
  misc_feature (577)..(577): n is a, c, g, or t
  misc_feature (580)..(580): n is a, c, g, or t
gtagagatggggtttcaccatgttgccccactggtctcaaactcctgggctcaagtgatccacccttctcagcttcccaaagtgctgggactacaggcgtgagccactgtgcctggcctgtatctacagatattaagaaaaactttgggctgcatatttagacataactgcttttttgcaattttgatttcatattctactgctaagatttcttatatgggatttgctgcatttcacagaaatctatctattcaaaaatcacactcatgctgattttgctagttcaaaagcagagatatgaccactataaggaaagcccgtgttcacttgcattggtaatattgaagaaataatacacttcatgggaaataaatacaggatatttacaaaatctttggtaaaacttcctaagaagtattggttggggttggttttccggagaccagaagtctncctttggcacccagctggaatgcaatggcncgactcggttactggnaaccttcgcttccggggttaagccaatcttgggcctaacctcctgagaactgggattccgaagcccgtgcccaccagntan

SEQ ID NO: 59798 - DNA, 2545 bp, Homo Sapiens
aaaattacaggagaaaattgagaaaaatttagagtccaaggctggcaccaaagacctgagacctaggaacatgagagtctgttttcttcatgtacaaaataaagctactaacacctgttctaacaagactgacatgatggaaatggcaaaatattaacaattatgccaggcgtaactgttgaattgttgctttctaacaattacttcagtgcccaataaatatcttcaccagaaaactatttattcaaggctggctgtggtggctcaagcatataatcccagcactctgggaggccaaggtgggcagatcacttgggctcaggagttcaagaccagcctgggcaacatggagaaacaaaatacaaaaatacaaaaaattatctgggcatggtggtatatacgcctgtaattccagctactcgggaggctgaggcacaagaatcacatgaactttggaggcaaaggtagcagcaagctgagatcatgccactgcactccagcctgcgtgacaaagtgagaccttgtctcaaaaaaacacaacaaaaaccccaaaaattagctgggtgtggtggcacacgcctatggtcccagctacttggggggctgaggtggaaggattgcttgaacccaggaggtcgaggctgcaataagctgtgattatgccactgcaccccagcctgggtgacaaagtgagaccctgtctccccccaaaaaaaaaaacaaaaaacaaacaaccaaacacctaattcttccaattactatctctccagtgttctgcaatacacaaattttgcagcataatttactggtgtcaatttcacaaccacagaagtcctcagaagtcaaagcacaacaccttgaacctagtctgattcatcaaacgtccattttgctaaaaaccatactcaccactcggattctgtgtccaatggccttagcaggaagattgcttcggaatttggcacgaaccatgccactgtttccatgggcccgagttacttttccccagatgactctggttttgtttggtttgccgccaggagtgactgtgttgctgattttaaaaagggaaagaagaggaatacaagctgatatagttggatacaaattcaaggtgacctctacacgagtggctctcaaccctggttacccacttcatcacctgagaaactttaaatgcctagaacaccattcattcaacagatacttatcgagtaactattgtatgccaggcccttctgtaaaatacagcagctataaaacaaaaatctttcacatgataaccaagtaagtttaaggaaaatacataggtcagatgataacagaggcaatattgaaaaaatagcaaaaaaggacaagtgtgaggatatttgtgtgtacagaaaggaggaattacctgccattttaaatagccaaggaaggtctcactgaggtgaccatggaacaaagactggaaagggaggggaaatgccatgaagtgatcacgggatgactagcgcaggcactggggccaaggagtgtgtgtcctggccggaagaaagactgaagacaccaaggggttaatcccagctgagataaagagaattatggagctcttaatgacgggcttttactgaatgagagaaactactgtggttcgagcaatgtacaaaggatatgactttatatatatttcctttaaagaccacggggttgtcttgtcacccaggctgcagtacagtggcccaatcatagctcactgcagcctctatctcctggcatcaagcaatcctcccacctagggctctcaaatgctggggctacaagtgtgagccactgcacctgacttaaaattttaaaggaacacattggctgtagaagaaaaggtggggcaatgattaaaacactttcccagagattttaattggcttggagtgggtgaagacaataggatttgctcttgttgtccaggctaaggtgcaatggcacgatggctcacgcctgtaatcccagcactttgggaggctggggcgggtggatcacgaggtcaggagttcgagaccagcctggccaacatggtgaaaccctgtctctactaaaaatacaaaagttagccgggtgtggtggtgcgcgcctgtaatcccagctactggggaagctgaggttgcagtgagctgagatcacaccactgcactccagcctgggcaacagagcaacactttgtcaaaaaaaaaaaaaaaagtctacagcataaacatctttaggcatgcataaaaactaattttggcctggtgcagtgacttgcgctataatcccagcactctgggaggccgaggcaggtggattacttgaggtcaggagttcaagaccagagtgaccaacactgtgaaaccccgtttctactaaaaacataaaattagctgggtgtggtggcacacgcctgtaatcccacctcactcggaggctgaggcaggataatcgcttgaacccgggaagcagagattacagtgagctgagattgtgccattgcactttagcctggataacaagagcaaaactctgtctc

SEQ ID NO: 59799 - DNA, 396 bp, Homo Sapiens
cgctttacaacgggttctgtttctaccacaaagataagaagttgtctgatcaaagcaattccttattttcatttcttgcacataaacaaagaagaaaataatccttcatccaattatcctccgagcaaatcaagaattttctatggtgttgggggcttgctcaaaaaaaaaaaaaaaaaaaaaaaaaagggtttgggaaatattctggaaaggttgaatcccccaaatttgggccaaggccccctttttttttttgggccaaaaaaaaaaaaacaaacctggggaaaaaggcccctttttgggccaaataacccggcatcttaaatggagggccttaagggggggatttcccaaacacctcccccggaaacttgacccttttaggggcccaaaaaa

SEQ ID NO: 59800 - DNA, 626 bp, Homo Sapiens
  misc_feature (587)..(587): n is a, c, g, or t
acacaattttgaacattgactattatgtagaatataagaaacttctgaggggaaaaaaatacatcctcgggagacacaggaagaatgccgtttgaagtaagaatcttttttctctctgtctctgacacacacaaactcatacacacacattcaactagccttatgagtcatcttctgccatgactgatgccagctaactctgtcctgccagcaacctctgccacccactgatgcagtggaacagtgtttgaccagctcccttcctgatgctggtttatttctggctaaaacctctggtttcacttaggacccagacttgtctggggttccccctggaagtactatttgatggcactgatactcaaagccctatacctaaaacatctttgcatctaagagatactgtggagatcaagccaattctagacccttattgccatggttttgatatctgtcaaaccaggtatcaaacagtggtcactccaccccagaaacatcacggtgaaccaagttatccataatcatcgataactgtatgcccaacaccatgcagaccccacaaccttcatgatgcttacaatataatntcagagataaaatcagcccaatggaagctaatcagacag

SEQ ID NO: 59801 - DNA, 511 bp, Homo Sapiens
tttttttttttattttctcagagatggggtcttactatgttgcccaggctgttctcgaactcctggcctcaagcaatcctcttcccttggcctcccaaatgttgggattagaggcgtgagccactgtgcctggtgtgaaatattctgtattatcaagaatggctctgttgttgacctactgtcttcactttgtacaggctattgggatctcggtgtcattccaaattcaataaaactcggaaaaatgaatcaaaaatccatcagtctcaaagatgatgcatcctaatttaatggaatgctacctgacaaaataactggtaaagctcaaggtgaaaccaccaccactcatcaaggccagattatcttaatcaatcctcttaatcaaagagtttatggcatgcaatcaaaatgattttgttgtcaggacctgcatgtttagctggtgctctagctgacttaaggctgccctgaaaggctctgcagtgaggtgaatgagaaaacccatctttct

SEQ ID NO: 59802 - DNA, 547 bp, Homo Sapiens
ttttttttttttttttttttagaaaatgaaaacaagcatctttttccttatagcttgtatctcctttgagtactctgaaatggtaaccacatgacccactggggtttcttctctttgatagtctgattttatgaaacacaccagaaatacgctaaattttgagtttttctggaatcaaacttcaaaagctggagctggaatggaaaccctgcagtctttgtacacaccttcttccagtcatccctagatcatccctctttcatgaacctgacacatgcagtagctttacatcaatggccttgaggtttttcagtcctcttaatacttgataaaattagagaaatgctatataacaaaatatgtaagaatctatatgccaatttactcaccattatactgtcttataattctttaattaaacttagttacaaaaatgtatatatttaattaaataaaagaacctcaaagaccaataacagttattaagagtaacaagcagaaaatctctccatctgttttcagaagaaactgaaaaaaaaattatgag

SEQ ID NO: 59803 - DNA, 1779 bp, Homo Sapiens
atttgagttgctgccaccttttggctattgtgaatggtgttgctgtgaactttggcttacaagtatctgagtccctgctttcagttcttttgagtggaatttgctggatcatatggtaattccgtgtttaacttttggaggaactgccaaactgttttctaccgtggctgtaccattttatattcccaccaaccattgatttagtttgacttctgttgtttaaagaagtatatctgaattttacacatactccaaaactgtaattatttgaattaattggagtagaaattaatttgaaataatgaaatgtctgattactggacatcaaaagctgctttgcattaggccatggttctcagaattcacaatcctcctttccattttttcctccctccctcccttcctcctctcgctaccatggtcactctcagcttcacaataagcacgtgtatcttagggcatttgaacttcaaatactacagcacctcacacgtaagaactctgtaacagtagacctctatttccctttcctgtcctatgtgctacttttttgttttgtttttttgagacagggtcttgctttgttgcccaggcaggagggcagtggcgtaatcacagctcactgcagcctcaacctcctgtttaagcgatcctcccacttctacctgccaagtagctaggactacagatgcagaccaccatgcccggctaatttttgtatttgtagagacagggtctctccacggtgccctggctggtcttaaattcctgagtttgtgcgatctgtccacctcggcctccaaaatgctggggttacaggcatgagccactgtgcctggcctttgtatttttgtcatacattttatttcccagtattatagactccagaatatgttgttgttattgttttaaaagtcagttatcttcttagttttctttcagaaaaattaaatggtgagtttttttgtttgtttgtttgtttgttttgcatggcccatgtatttaccattcctggtgctcttccttcttttgtgtggattcagttttccatctagtatcattttcgttctggtaaaagcatgtttgacatttcctgtagtattgctttgctggtgacacattcttcctcagcttttgtctgaaatgcctttatttcaccatcatttttgaaggatgtttttgctgggtatagaattctaggttggtagtttttgttatttttcagcatttttaaggtgacatttggcttgtacatgttgttcttgagaattctgcagttattctttgttccactgtatgtaataatatatgtttttctcctttctctgattttacggtttttctctttgttgctgatattctgaaacttgactatgatgtgtctttgtgtggttttctttgtggtttttttcctgtggaatttattcaacttctgggatctgtaggttatagttttcacaaattggaaatttttgacattacttcttcagacactttttctgtcttcccctccatcattctgggatttgaattacatgtatacagtaactgttgttgtttcataggtgactaactgggtaggggaatgtctggttcccttactatccggtgaagtagcagaaccaccttttgtaggaatcagttatcaggccctttactttcccttgaactctaggctagttccagaacctttggtggactggaaagaggaaatagttatgccacaatttttagtacatgcaaatgtacatgtaatgtttaataaaaaaaaaaaaaaaa

SEQ ID NO: 59804 - DNA, 1792 bp, Homo Sapiens; identical to SEQ ID NO: 32056

SEQ ID NO: 59805 - DNA, 466 bp, Homo Sapiens
agaaaaaaggaaaaaagaaatattccaaaatgttaagagcggttgcctctccaatgtgggaggggaggatgaactttctccaatgaacatatattactttgataataaggaacaaaagtaaacaaaattttaaaactgtctgatgaagcgacaatcagccataaccttgttttatatctttaaaacatgcacgsacacgtacacacacacacacaccaaaaattccagtctggggccttctgacagtagaaagaacaccatgaagtatatataaggctctctactgttccaaacttttaactctatgacagtaaattaagttattaacaatcctggttaagaataaacatttagctgggcactcatgctgtmatcccagcactttggggggctgaggtgggcggvtcatctgaggtcaggrgttcaagaccagcctggcaaacatggtgaacctcatctctactaa

SEQ ID NO: 59806 - DNA, 601 bp, Homo Sapiens
tttccactaattatgttaccactaggagttactcagtaagtcacattttgtttatacttatatacacacactctctcatacacacagtggtcaaatatcaataactgtaacaactttatcaactttaagctgaagcttcataacagaaaaagttctcatcataaaaagggatgtttattatgctctgtttaagaaaccaagggcctaaagaacacaacaaattaaagatacagactttgaatttttggaaaatacggttatgtggagcatttcattgcacagtggtgcctggaatgtgaattgttaactctgcatgtgtctttcacattgatatttgcacaggagcacacacacgtccatgctcccaaacagctatgggaagatggcgatctctaccaccaactggggaagtctggaaacctaggaggacaggccttcgtggggcagcaacatggaatccagagtctaagatcactagttggtgattttacctttgaagcctatgttcactgaaaacaacattatccattcaacaaatgctaaaaacacaccaactgcctctttctgatattctgatgaatgagagctactcaaaatccta

SEQ ID NO: 59807 - DNA, 558 bp, Homo Sapiens
  misc_feature (438)..(438): n is a, c, g, or t
  misc_feature (482)..(482): n is a, c, g, or t
  misc_feature (489)..(489): n is a, c, g, or t
  misc_feature (501)..(501): n is a, c, g, or t
  misc_feature (540)..(540): n is a, c, g, or t
  misc_feature (558)..(558): n is a, c, g, or t
gccgactaaagaaaaccatgatgtatatttgtgagagtcttaaaaaaaatttaagtggaagaaaatttttgaccaggattctaagtgaaattactctgtgcatgtgtgtgtgtgtgtgtgtacaggtaaagatcaaggtagttataagttattaaaaaataattatggagactttttggcagcagaaactacaattaaatcattcatattccttttaaaactagtttaaaatctatattcatctaccatgaaggtgtatacccttgtaaattgggccatatttcatttgatctacagaaagaggcataatattttggacttctatgaaattttggtcaaatttgacaaccttattaaaagctattttgaactttattaaaaagtaaagaatctagctgggcacggtggctcacacctgtaatcccagcactttgggangccaaggcgggtggatcacttgagggcaggagttcgagaccagnctggccnacccggggaaancctggctttactaaaatcccaaaatagcttccttaagangcttaggcccgaaaaatn

SEQ ID NO: 59808 - DNA, 4668 bp, Homo Sapiens
ggtaaaattgctgagtactttacagacatcatctcatttaatcctcacaaaagccctgtgaggtcagtactgttgttatccccattttactgatgtggaaatggtctcataaagaggttaaagaatttgtcctactcatttgtagaggtagagctaattcagacatgagcctggctgactgtaaggtttgtgctttttatccatataataatctccaaccaaagagaaatgaaaaaccaccatacggacacaaagagcagctcgcccagcttcttactctgggaaaccagattgattttgaggtggggagaagcctggataaagtcccatacacttagatctctaggccataaagattcattccacagcattcaattagaataatgtaaatatgtaaaacccagtgcctggtatatcataattatttagtaagtgggagtgaactattacaataattctacgactaagccagaaattaggttcctgttcataaaataggaaaagaaaaaaattcccatagtcccacaatcccttacttgaaactcttggagtcatgtgagttttgttttagaattatagcaaggtaatatgtatatttaccatatgctatgtaacatccccagcagagaccagggcagccccctgtaatcaaaacaccaacaatttctgcaatgaaatatatgaatattcacactaagcagaagaaatgaagactatagccttaaatcagttcaggtaaagttttgctgccaaatgagtgaagaaaaactcttttgcatttcagagcttattgtataagagttgaagggaagggattgtgtacttgtaaagcatacaacaacatttcaaggagaataaagaagcaattactttactaagttgaatagacaagtgatagttctgttcaaaagagactgttaatcctaagtcaaagcatgaagtctttttggcctctgatttcaaatgctaataattacatccaaagagagaaaacaagcatctcttattttatcttctttcaaataagtatgcgtcactttaaatgaagttggggactaaaatcaagtactatattttttttctagaggatctgtgtttatcaaagaaaacacaagaagctaaatccatttgaattgggttttttttttgtagattcctttttgtaatagaatctcatttttttaaaatgagaatggaaaaatgatattctgtatggtggtctttaagtgctgaaggatccacagagtcttctgaactttgaaagaaactaagtttggccactcctgagcaaaagtaatctagaaaaagcgataagtatataaggtgatggatatgttaattagcttgatttaatcattgcacaatgtatacatttatcgaaatatgttgtatatcataaatctataaaatttttatcaattaaaccttaataaatttggaggagaaaaggaaatctaccttccatccttccgtaaaaggaattgaataattctaaaggaaaggaatttcaaattttaggaagataagcaattatagttgatggcagtacctgttgtagataaaactgaagcagaataattaaacacctgcttctttatctctaccctcttcatgtcctagcttccttccctactggtttatattccaccgtacatgattacacatcctcagcttcctcgttcttccttcctctattgaatttgaccccacccctggtcaaatccaactgttcatttgctctgcattggcccttgagtagctgaacatggttggagtaaatggatgaccatgttggtctggcttgaattttaaattaatgatcactaatcccaagttggcccttagggctgcttgacagttccccttcatttccttagtccattcattcttttccatcacctaaacaattatttcacaccttctcttgtctctatgcctctggtatcctcacgcagtgtcagctgatgacctttcctttttactttcactgagaatagacacagtcgtgaaagaacttccacatgatcgcctaccccttaacctgcatgcatttgtatgcatgtactctgcctatcctcctgttagaattggccaagcagcagtggtctctgaagtcagcctttctacttctgctttgatctccacctctcttaccttcttccccattaaatcaatttctaggagttgttccttaataggtagttgagattgagaaccactctgctagaatgtaaactccacagaccaaagatttgttctcttgctcattgctgtattctcaatgcctgtaacaatacataatccaatagtaggcactcagtcttgtgtttaatggatagatgagtgaatggataaatgaacaaatgaatctttctggtaaaaaagatataaattgcagtacaagctctgaagagcttaataaataatctttccttgtgttttatgatcaaattggagctaaactgttcatcttacaatgttcatttaaagagttttctgctgatttactgtaactatcctcacctgaaaacttttcctagcatttttatgcacacagtcctagttatctggatttttgttgttgttgttgttattgggaactgagatttttctgatttctaagtggttaagctttgcttttcaaatgaatttctctggtggcagtttcacaagtgaatagatctgtacaaatccagaactgttcattttactcattactgctacttggaagacctgagttcaactgcctgctccatcactttttctcactgaagtgaatctgggcatgattcttgtattgagaaatgcctagtatagtctcaatataattgattgcatttctttcattaaaatcaggggaaacatgtttgtttccttgacacctgtgtttcatgaaaaatcgtagaaaacagccacatgtattttaatttagttctatatctcttttcccttaatcctaatttgtagaagtgtggctgttcaaacagactctcatgtattttgaaatacatgcagtgcggtttttgtatgggagcaagtactatggattttcttgggctataacttagtagcatggcagtaggttatagaaccagtccatgaatcctgcagttcttactaatgtgagtcaaatggtattatggtaaagatacctcgctgcttttttggtggctgtgtttttatttgtaggacaaccctaaaatagaactcagctaggtcatttctaaacgtaatgttgtggtggataccccagaacaaacaccattaatgtggttagtcatttacttggaaagctattgccagggcaaactcagagccactagagacagaaagcacataagtaaacctgcttgttaaagtggagatacagagtaactcagcaatgtaataatacgaagtaatggttaagtattcagtttatagaaatttgactcagatgtttcaataaaatatctgtttttgtaaatcaaaagataactaccttcattggtatttgggaccaaagtttttcctccttcactttctgcccttttggaagacacagtaaaaatagaattcatgaaacatttctaaataatgggtgtatagagattctctttatgtgtggtatcagtgctctgctatgtaattatttgttatattttaaatttcaatttatgtgttctctcttgcccccttcagccccgtgccacataatttttgtttttggtggaaccattcagccttaaatacttttagtatatatcgtctgagaatagggacataactccaaaactactatcacacccaagaaatttgactttgattcagtgccatctaatatataacccatattcaaattttctcagttgtcccccaaataactggattttctaattttctttgatccagcatctaataaaagttcatatgttacatttagttgttttgtttcttcatctttctttaatctaaaacagttcccatgccctccctttaaaaataaaaataatctatcttgacatttctggagtctagaccagttattttatgaaatgttcctcattcttgatttgtctgattattttcttactgttaattttaggttaaatctttctggttaccatatagagtctgattattttttaagaagtgtagtattcagttatagagaatcttgacttgttctgcctgcttgcacctgcttttcttagagtcctaacctctcaactcaggtgcaaggaagcagagtttgactacttttgtgggtactgaagacctagcttattgtaacaacaaaaaaaaatgtggttttatttttagtaaaaatcagtgtccaatatgcgctctaaatataatctggttatttttgaaatttatgttaagaagtaagaatttggctgggcgcggtggctcacatctgtaatcctggcacttcaggaggccgagacaggcggattgcctgagttccggagtttgagactagcctaggcaacatggtgaaaccctgtctctactaaaatacaaaaaaaatcagccaggtgtggtggtgggcgcctgtaatctcagctatcaggagtctgaggcatgagaattgcttgaacctgggaggcggaggttgcagtgagctgagatcgtgccactgcactccagcttgcgcaacaaagcgaaactgtctcaaaaaaaaaa

SEQ ID NO: 59809 - DNA, 1864 bp, Homo Sapiens
ggcaggtataaaatagaaaggtaggctcagaacaaaaaaaaagtatttggaatacagaattctgatacacatgactctgcctctctgggtgaataaagagaagagaaactggactcagttgtacagaccacctagtaactgaccatggtgtgatttttaaagcgaggaagcagatgccaggcagtgaagacttgcacaccgtcacactgttaactggtagagaggcagtgctgtatcttccgcttctcctaaacgttggtctagggttcatcctgccttatagcacatgtttagtatacatatccaaggaagtttttttggtcactgaggctgaaccttatggacagtactgctgatttagtgatctgaccttgaattaggggtttcacaagaatccaggtcctggtccatggaagaacagtgagcacttttgataattgaggtctagcttaacattctgtgaccaataatattttagttaacagagattctggttcttggatcgaggatattatgtttaacaggaaaaggctctgaaagatgtaatctctctttttttcaagttgcatagattgcacatgaggattttgcccacttagcaacttcattctacttttgcaggaatagaacccaagtcttctgactttcactgcattagcttattttttcctcatttttagttctttcaagaatcattaattccatgcttgaaaatgtctgaatggcagtaatgaggataagttttttaatcttttgaattcttaatgtgaactaacaggaaaaaaatctcagagctaacaaattagagttggtaaagggccgatttataagtgtctcacaatttatgggtgtaaatcaaaatgttaactagtacagtcataagctgtttgtacaatccttaggctttaacttctttggaattggcaagctaggcatttgacatgtatttatataactgtacggttgtagttattaatgatcttgtcattattgttgataatgaaaaaagatcttcactataatttcttcgtataattcttataatgaaacaagtaaatactattaactagaaaaaatctagtctgcagttagcccacacacatccaaacttatctctgccagcagcaaaagaaagcttgaaaacctttgccaaaatcagaagtttcccatttagattacataagtttctgttgaattgaaatatatttagataacatttaaaccattgatcttttggtattaactctcagatgtttcataactttctgtctttttagtattcagggatattatgtaaagtttttcctgcactgaatctctgtgcttgagcctactgaaatgatccccctaagccatgctgcctgccttttgtgtttaatgtttttttacactgacttatctccttcgtgtgttcacctctcccccagaggaagacaacagaacagtataatttacagtttgtacaggttaaaaaaaaaaaaaaaaggttgtaagatgggggggtgatattttgttttaaaatatttgggtaaggaaaattttgtctttaatattaattctgtaatccttgaccaggcatggtggctcaaacctgtaatcccagcactttgggagaccgaggcgggcggatcgcatgaggccaggagttcgagaccagcctggccaacatggtgaaaccccgtatctactagaaatacaaaaaattacccaggcgtggtggtgcatgcctgtagttcccgctactccagaggctgaggcagaattgcttgaacccggaaagtggaggttgcagttagctgagaccacaccactgcactccatccagcctgggcaacagagcaagactcagtctcaaaaaaaaaaa

SEQ ID NO: 59810 - DNA, 443 bp, Homo Sapiens
  misc_feature (68)..(68): n is a, c, g, or t
  misc_feature (104)..(104): n is a, c, g, or t
  misc_feature (324)..(324): n is a, c, g, or t
  misc_feature (356)..(356): n is a, c, g, or t
  misc_feature (370)..(370): n is a, c, g, or t
  misc_feature (409)..(409): n is a, c, g, or t
atttattctttcttggaaaatgatttataaatacaagcattatggttatatatgtttaaatatatgangccttatgtttattttgaaacacacacatatatggngcttaaaaaataaacttatggagcccataattacataaataataagatgttacctctcatctacctcctcttcctgaacctatcatgctgcttgtaaacgtggggaactttatatttttaggagatacgtgtcaatgctgccacagaaaattgcgctagtaagacacagcagtacttactagtcacataatgtgctatatgtaaaagtttttaacttttnataatttacagagttcttttcacaaatatctnatttcattaatccngtgaaggcttatggttttatagggggagggaagggggtncggggagggaaccggcggcccctaatccgggagg

SEQ ID NO: 59811 - DNA, 554 bp, Homo Sapiens
  misc_feature (540)..(540): n is a, c, g, or t
acattttgttgttgctgccgatgatttcaacgcctggctttgagattccgtgagtagtcttgaataatttaaaattcgaaaatcaaattctacttattttctcttaatgctattgtatttcctaattctcagctttaacatgtaagaaagtactttcgctaggggtcttaattgaatggtggggtcgagatgactgcgtcagaattaaatctctggaagacctctgagctccttttaaaatcatcaacaagcgaaaatccttatcaatagcgatgtgggaatgcattaggtacagtattttaaacatacaaaacctaggcatattaaaaagcactcctctggtaatttaataaggaataatgatgtccttaagtttattttaatcagcaagtatgactcaatttgaaaatatgagaacaaatagatttaaataggaacacccagtaaactatggtatgcaaataaactcagaggtaaacttgtgaatacataaatctaaataagtcagttaccatcaaaatattacgtgatcctatattnttctgtccacgtct

SEQ ID NO: 59812 - DNA, 1402 bp, Homo Sapiens
gggtaagtatgtgtttgtacttatttgttatactggaaacaggagagatatttgtaattatttctgcttaaaagatatcagaatagttatttactattcaggtatcagatttgtttaaaaatgacatttaacttgattatatcattattttcttttccattaagccctaacaatttttaaagccatgaaataacttaaaaaacagaagtaatttaatcttaccctctcctttggaaagaaaatattccttttttaaagtgaaagcaagtttcaaaaaaagaaaaggaataaagaacagctactccataggcagagcagcggcctggtctgcttgactgagtatccttgcagttatttctggattatatgctaaacaaggggtggattattcatgagttttccaggaaaggggtggagatttcccggaactgagagttcctcccctttttagaccatatagggtaacttccggacattgccttgggatttctaaactgtcatggcgctggcaggagcgccttttagcatgctaatatattataattagtgtataatgagcagcggggacgaccagaggtctctttcattgccatcttggttttggtgagttttggccggcttctttatggcatcctgtgttatcagcagggtctttgtgacctgtatcctgtgccgacctcctatctcatcctgtgactaagaaaatattcttttaatttgacaaatcaagttggatctcattgtgctaaaaaaggtttttaaaaatattatccaatacagtgccatctagtgacaaatcatttacttgctggttattgaaaatagttgactacaagttttatgtcctgataagtcaggaacttcacttctaattgtgcaaattcttaagatattttaagcgactatttctaaataaataaaatatttgtaaatagagagctggaaaatattttctaaccctcaggttttatacatatgtatcacaatgtgtcttatttaatgccacgtggacccaggagtaaaatcaaaatcagtgttttgtctaataaggtggtaataggattattttagaaatgtgatgtaaaggaatgagcatggctttaaaatcaaacagacacgagtttgtctatttggacttatttttcttatgacttagcaggtaattactacctgcttggaagtgcaccaagcactatataggtactgcctcattacatattcacaaaactctataggtattttacaaatgaggaaaccggccaggcgcggtggctcacgcctgtaatcccagcactttgggaggccgaggcgggggaatcacgaggtctggagatccagaccatcctggctaacacagtgaaaccccgtctctactaaaaatacaaaaaaaaaaaaaaaaaaa

SEQ ID NO: 59813 - DNA, 463 bp, Homo Sapiens
ttttttttttttgaaaagcagataaggatactttttgctcacacccaggaaaagaaacaaaacaagagacaaaactaagttaaaaatatcttccagacatagtgttcattcttgccttaggcaacggtaagaaaggcccaaaatgtccagaagaagctgcagaggacagtgtagcccccggtgggaggggaaactgaaaaataattattagcaaatccaaagatcttgccacatatagtttgtactaaaaagaaaaaaaattactttttcaaagtgatggcaaagtcaaacaaaaaaagaacatatataaaatgcaaactgatggagtaacatggaggtatgaataaaagtgcttagagagagcatcctcctccccttgggctgggcattgctagatactggaagccagagtgaatggtaacacagtttttctaagaaaaccttctaggaaatgcgagtctca

SEQ ID NO: 59814 - DNA, 441 bp, Homo Sapiens
ggtagaataagcaaatagactccttttcttcagttaggttcactgatttgatttaggctctctataaagtcttctgtctcaacagaagtagaaagagatttgtcacaagagtagcaagaactattcttaaagtataaaacactttacccatgtgcactgagggcctgttgatcttaaatgagaattctataagccaaaggaagatactgtatatgaaagaaaacccagaacataaataggaaaataatttcaagttagctctgttaatctaatgatcgtaagttggaaaacaaaatatatcactatcttgtctttaaaatattaattccttgtgttagcccctctgacattacaaacttattatatatttcatcagtaggcaaagaactgtacaacttacctggtaatgaaccaataggattaagctggttctttggttgc

SEQ ID NO: 59815 - DNA, 442 bp, Homo Sapiens
tttatttttgcagtaattttttaatctcaaaagtgtcttttttgtcttatttcatcttcacagtttcctgttcttattatataaatatatctccctaatctgagtctatggattggagttttatccaatccattcattccaatgattggaatgattggagtcattcacatttctcaatccatttattttccgtttctttgcctggtctttcttttatgtgatgcagctctccttgaatgtctgatacattttcatcctttaaaatgaagccgatgggtgacaggaagacgtgcttccatgaaaggcagtgtttcactccggaacctcagctcccacacgctggatccagatccacagcatccccaggacctcttctcccctctgggtcctgcccccatctcactggctcccatctcagattccctgtgaggctccacgcttg

SEQ ID NO: 59816 - DNA, 500 bp, Homo Sapiens
gcgtcgacttttttttttttttttcttgatataaatgtaaatggaaatcattaaatatattctactaattaaggattcattatattttgttatttcatacacacccttaacaaccagtgtaattattcttagatcttatagcaagtgtttataataatttatttattcatttatccatcctttcatcaaataatttctgagaagcttctatgtaccaagaattacgaaagaatccagactgtgttataggtagtgattggttagtagagggatggacaactatcctcagctgtctgaatatggtgagatatgtgctctgattttgatgaatcttgttcaaaataattccctttagtttaagttggatctcctttcataatcatatagtgactggtcaggccacagccgtattggtgcaggctctactgggctacatcagggaacaggagtaggtgccttttactcatgacttactgtgaatgaggtcataggtgtcgacg

SEQ ID NO: 59817 - DNA, 556 bp, Homo Sapiens
  misc_feature (422)..(422): n is a, c, g, or t
  misc_feature (445)..(445): n is a, c, g, or t
  misc_feature (495)..(495): n is a, c, g, or t
  misc_feature (516)..(516): n is a, c, g, or t
  misc_feature (538)..(538): n is a, c, g, or t
  misc_feature (547)..(547): n is a, c, g, or t
gagatggagactcgctctgtagcccaggctggagtgcagtggcatgatcttggctcaatgcaacctctgcctcctgggttcaagcgattctcctgcctcagcctcctgagtggctgggactacaggtgcacgccagcacacccggctaatttttgtattctgaatagagacggggtttcaccatattggtcaggctggtgtcgaactcctgacctcaggcgatccgcctgcctcggcctcccaaagtgataggattacaagagtgagccacagcgcctggcctggacatggtggacttttgctatccaacatctattttccccatttctgatagaagcaacccagttttgcaaatgaaaataacttatctccataggctgggttaaacattttactcaaactgggacatttgaaccgtttgnccatggaatttgaatctcaagcngaaaaagaccgaaaaagggttgaagttggcttatccaccgggggaccctnttcagaaatgtgggtttaagntccttcaacaagaagcccaaanctggccaanggtccacct

SEQ ID NO: 59818 - DNA, 620 bp, Homo Sapiens
  misc_feature (444)..(444): n is a, c, g, or t
gaatttaggtgacactatagaagagctatgacgtcgcatgcacgcgtacgtaagcttggatcctctagagcggccgcctactactactaaattcgcggccgcgtcgacttttttttttttctattctaatctattaacttttggttattttggattaagctacaaattctaattacatcaaccaacagaaatgacatattatgcctttcaggactttgccaaatgatttatttcatgcagttcaaattgaatgtcactgtcttacatttatcacagtgcatcttgcattgtgcaattttaccctagaaatgcacttagcacctagagatgcattgtgagatttcaacttcagaggttcacaatacccagggcatttacaagctattcccaaagacggattacgcagtggatggaggatgcaaatgtggatggaggatgaagcanaggaacaaaacgagtctttgagggcttagagatgaaaaactatagctgttagtgaataagtaaagttctgtgtatgaattgcaagtatttgctgattttaaacaaagtatgccatatttctttaaactagattcaaaatgttaaggatactaatttgttatttcaaacagtaaacc

SEQ ID NO: 59819 - DNA, 1913 bp, Homo Sapiens
aaggtttccgtaggtgaacctgcggaaggatcattaaatatccagcacaaagcgtgtaaataaaataaatagcatgttgtctttatcttcaaaggcattatattgtacttctagcaagtgcaccaacagaaaaacaacgcctggaatggtgagtataagaatagactttacagaaaaagcaaacttcaaaatgaatcacatagccactgaacacagtaggagatgggaggaagtccttaaaacttctagtttggtttgatttgttcacaaatggagctttactgtgtgtagtggaagtacagaaatcaggagatccatatgcaacttatttttttgtttgctttatggagatccgtgcataatttcttaattgtatatttaaagtgcacttatagcttgtttttcttaaaatttttgtgtggataacttttgtaaccttgctggtgtgaatggagtgtttcttggctcttttttccccgttgtttggcaattttgggtagaacataaggcttctggttttatctgtgggagttcagctagttgaaatgccctggtatgtgcattttatttatttatttttaagttaaccaaaactttttgttaatactaagtgacatttgttcagggtgggcttggtggaatcaaaaatccgaatcctggttggaagcttggagaagaatgaatttattacactggctcatgtgaatccccagtcatttccagcacccaaagaaaatcccgacaaggaagaatttcgcacgatgtgggtgattgggttagtgtttaaagaaacagaaaactctgaaaacctcagtgttgatctcacctatgatattcagtctttcacagatacagcattcaacagaaggtgtcaaattgacagctctcaatgacagcagcctcgacttgtctatggacagtgataacagcatgtctgtgccttcacctactagtgctacgaagaccagtccattgaacagttctggcagctctcaggggtaaggaaaaagagggaaatagaagtggaggggctgtttgctaaatcaatcagaaacattctctttttgctattaaagtcatctatttagaatgttattttcattccatctactaatttttttttaaatagcaatttaattcccaggtttggggatagtactttttggttttgtcttgtcatacttaacattttatttttgagactgataatgtcttcagtcagatgtgaatgaatgttagcacataacccctccaaattcatgtatttagatagctactgctacagtgcactgtatggtgtgctgatgagaacagacaaaaggaacaaaaccacctttctgtcccagagctgcttatacctttgtaacagggaatgtgtctatgatagttagggaaacctgttttagaagagctagatatctgtctaacatttacagcagttaaaattttaaaaatttattattattttgagaaatggggtctggctgtgttgtttaggctggccttgagttcctggatttaagcgatcctcctacttcaaccttctgagtagctgagactacgggcgcatgccactgccctgggtatgaagcagtgaaaaattttcagccaggtgcagtgactcacacctgtaatcccaacacttggggaggctgaggtggtaggatcacttgaggccaggagttcaagaccagcctgggcaacgtagtgagactcccatctctagaaaaaagtaaaagaattaggtgtggtggtatgcacctgtagtcgtggccactcaggaggctgaggtgggaggattgcttgaacctgcaaggttgagactacagtgagctgtgatcccactgctgtaccccagcctgggcaaccagagtgagaccctgtcttaaaaaaaaaaaaaaaaaaaaaaaaaa

SEQ ID NO: 59820 - DNA, 422 bp, Homo Sapiens
tttttttttttttttttcaatcgatttagagatttattttgccatggtggaggacacagccaggaaaaagagactcaagctgcaatagggtctgtggcctgtgcttttttccagagaggattttgaggactttggtatttaaaggggaaagaggggggctggtctccaaccaccctgctaagctgggaaaaacagtaggggagtttcaactattgctaacctgtaaccacttcccacaggcaggaggagcaaggtccttgaaaacccatttgggtaaaaatttagaatgatatggggcaaacagtgcaagagaaccaaagacaggggtgaaactacctacaaaggtctatcaacatctaaaaatagacatttaaacaatgaagagtgcaccctataaataaaacatcagaatcctcgtgccg

SEQ ID NO: 59821 - DNA, 4153 bp, Homo Sapiens
gacatgctagtgctcggcccacccttctgtttttgtagccaaggcttgattggattttctgtatgtataatgggctgtttcaaaatggtcttgcctcattgtttcttcatatcttattgaaaccaacccactgttgatctcaatctgtgtaaggagaatgcggagtatggcattcgcaggactgaatccctagattttaagtttggaaggagatccaaccgggcagatgaattgaccggtggtgaatattctgtagcattttcctccctggagaggaatgccgccaccgctgggaaccgtggactggcatgtgagccagtggctgtgaaaggcgctgtgccctgtgtcctccgtgtactttagagcaggagcgtcacacatggtggagccgggtgatatcccgggcaggctcccgaaagctcctggtggcccatcaggggctggtttttccacctttttttttttttttttttcctcgagacaaggtctcactctgtcacccaggcaggagtgcagtggcatgatcttgactcactgcaacctttgcctcctgggttcaagcaattctcgttccttagcctcccgagtagctggcattacaggcactcgtcaccatgcccggctcgttttttttttttgtatttttagtagagacagggtttcaccatgttggccaggctggtcttgaactcctgaccccaaaatgatctgcccgcctcagcctcccaaagtgctgggattacaggtgtgagccaccacgctggccctcctcagcttttttttttttttaaataaccattattattccatattttttctatgaaatcatttataaacataaaatatcttaagtctgtaattcagtttatgatacatattcagttatgatacattctttgcatttcactgtttcatgtttcagccaaatcccatccccccaacctttttttttttttttttgagccagggactctctgtcgcccagactgtagtacagtggcatgatctcggctcaccgcagcctcttcctattaaagtactgggattataggtgtgagccaccgtgtctggcccctatccctctattaagtgcctttcagcaattctgtttttagaggaaaattcctttttgcttctgcttgctccttttaccacccctgcccatgaaagggggagttacctgtccagagcaagtatagctttggccgtgatcttcaaggactattgcattggtgctgactgctggggccccttggcccccaggttcccaccagtggagcaaacacgaagggtgcagcctagtcggaagtgttcccaaggacaacatcagtgtgcagacttccaggggaggggcatatgaaactgagccaacagaggccaagatgagaaccctcctgtgacatggtcccacccattaggccattcccttggtcagctggatggcaaatactagtagtgtatgctatggagcagacatttattaagtccctgctgtgtgtcaaggattgagctaggactctgcaggaaatgcatgtgtagttcagtcctggaagctgcccagcttccgcctcctggaagcatccttttctccccagctgctctcgcctgcacatcttacattctctggctggtccttctaggtgtgttcagccactttgagctgtgcctgcctgatctgcacactttgcaaatgtgtagactcagaaagagaaacagcccaaacagtggccagaaactgttcttggaggctctaggttgacaaaagggtcctttaatagctccaggttgacccctcccctagacacctgtgctccccctgagccacaccgtgacttcggaagttcaactgtcatccagtttggtcggctctttcacaaaataatttcactgattctgtcaggcattttcattactttgatttaaagtttttgtgtcaacctctggtactttagaatctccagatgttgaaaaacaaaatcccattggtaatgtttgttttcctttacacttatgaaaaaagcaacttttattctcgcctaaaatttattgtcgagagcacgtcttttaaagtaaaaaaatgtttgcagcatgtcatacggctctgaaatactatgtaggtcgcagcttgttttgaggcataagtgacaaatatacttgtgagagatgttattcttaccctattaaagaaattagaacatggcttttgtgtctctgatactgattttatatcttcgcaaccgaatttgtgaatcccagctagagtaaaagacacacgtgatgcatgaagaaagtgaaatggttctgtttggtatttatctcatcttgatctttggcttggaagaactgataatgaaactctctttgggaggacagagagctctggggcattcatctcccaactaggtctccgaatttggtgcagttcttgaaggcaggtgggtttacacagtggtgagaagtgggaagtatgaagggtgtgatcttcgccctctttttgtatgcccgttaacaaaactcaattgttaggcgttgagtagggctattgatttctagccaacggaaacacttactgtgtaatttccaggagagagacattttcaggtgatgtggactcattccctgcagttcagaaggtaatgagcaatagtgatcaatcctgaggttatccggggtgatttcagcttgtccattgcattgattgataaatggcatgctctgaggctgattgagtgatgaccagcagcatcaaagaaaaccctcagtttgcatggcgggtattagaagtggctgccttgatgcctcctgtcatcgtttgagtggtaaagagacattctttgtatgtttataactcttgatttggggtcatggttatcatctgtactaactgcacaggtcatcccgctcccatccctttttcattctttagaatcccccacagcggtccacgccccttgccaacttccttccactatcctggttctgttgttactcctgccgactgcagtgctgttccgtgagcttcttgaatgacatcgtacagtatctccgacgcacagtacgtaccagttacagttgtcttgacaggatctcctgtgatcttttgtcccttttcagtttagctcttggtggctccataggctctcaagcatcctggacagttctctgtgggctggcgtcctgggtcagattccagggccggatgtgagctgtgccttgaccatttgaagagctcaccgaaggaggtgggaatggacggtgcaggaaagtaactcaggcacccgaggctgctgagcccagagaagaagcacctgtccttggagtattgttccaggaaatggggaggcaaccggttccagagggcagaactgggttgggagacaaggaagcacagttcttgtaaatcaagaaaatttgtaaagccacataagctgtccaccagtgagagagagcatgtacatgctgtgagctgcagtcaggccgcctggccacaaggcatgttgtggcatgctgtgggagtcggcgttgaagcatcccagagacctcttgtgcttaaacaaagctgagttattcagcacactcctagatgtggggtctgattgttggtcaaactgaaggactcgagaaaatgaggactaagtggggggatgagagacatgtgagtgggtgttgggccagtagaatgacaaaaggagcaggcccaggctctttggaagacagacctttgcccttcagggggactgggggagtgtttcctggcaggtgtggacattcgtcctcatggatgtcttctttataataacctgtggaggacggcccagcgcatcatgccactgaccttcactgatgcttctgtacttaagaagtaatgtcccttggctgggcgcggtggctcatgcttgtaatcccagcactttgggagctggaggtgggcgaatcacctgaggtcaggagttcaagaccagcctgggcaacatggcgaaaccccgtctctactaaaaatacaaaaattaaccgggcatggtggcaggctataatcccaggtactcgggaggctgaggcgggagactcgcttgaacccaggagttggaagttgcagggagctgagatcacaccactgcactctagcctgggtgacagaacgagactctgtctc

SEQ ID NO: 59822 - DNA, 676 bp, Homo Sapiens
  misc_feature (482)..(482): n is a, c, g, or t
aggcagcgctctcgggacgaagacaccatggcctgggctctgctattcctaaccctgctgactcagggcacagggtcctgggcccagtctgccctgtctcagcctgcctccgtgtctgggtctgctgcacagccgatcaccatgtcctgcactggaaccaggagtgacgctggtgactataactatgtctactggaaccagcaacacccaggcaaagtcaccaaactcctgatttatgatgtcagtgatcggccctcaggagtttctaatcgctagtctggctccaagtctggcaacacggcctccctgaccatctctgggctacagactgaggactaggctgattattactgcagctcatatacaagcaggaccactctcgtattcggcggagggaccaagctgaccgtcctaggtcagcccaaggctgtccactcggtcactctgttgccgacctgctctgaggagcttcaagccaacanggacacactggcgtgtctcataagtgacttctacccgggagccgtgacagtggcctggaaggcagatagcagactcgtcaaggcgaagtggagactaccacactctcccatagcaacatcacgtacgcggccagcagctatatgagcctgacgcctgagcagtggatgtcccacagcagctacagctgccggtc

SEQ ID NO: 59823 - DNA, 2193 bp, Homo Sapiens
cctttgagcagtaggaattggcttgctgcccatgggcacctggctggagtaggcagtgtaggctgagggctgtagaaggccgggtttcattggtttgtacccaggtttccagaatagaaaaatgccacaacctcctgagaagcccagttcatggtctctcacctaagttgtggttcctcactgatgacttttctggccccaccacagatgataccacctttataagcacaaatgttgtctgtggatttaatgtaaatgtgaaaaacaaaattatttcaaaaactttacctgtgtttcttcctgcagctagaaagtttgggtcagagtgaactggcttcaagacttaccttgaattgtcaaaattcttatgtggaacctcataaaattcgggacatacctgtaactattatggatgtaagcttccttttaagtaaaatagctgctttactttttaaaatgtgtatgtcaagatctcctataaaactatttgataactttcaatgtgcctcttcaaatgctgccttggcttttgtttttaccctccagctttctcaattccaaaataatctgtttattgcttatcttggatttctttctggcaggaataacaccattgaaatcaaaataggccgggcacagtggcttatgcctgtaatcccagcgctttgggaggctgaggcaggaggattgcttgagtccaagagttcaggaccagcctgggcaacatggtgagaccctgtctgtatttatttaaaaaaaataaaaataaaaatgaatcaaaataaatttaaacaagggagtctacccatttgatgtatttttgctgttctcatcaatagatattgcaccatatattgcacatatatgggcagcaaagagaaggtgcttcacaagggtaacaagggtagagaatcaagaattccatagtttaattaccacaaaagcttgcttatttttttattgtggtaaaatgtacatttaaaatatgccattttaaccatttttaagtgcatagttcagtggcattaagtatattcacagttcggcaaccatcaccattttcacaacattttcatcattccaagaagaaattgcatacccattaaacaataactcctgttccctttcttcccccggcctctgataatcaacggttttattttctgtctataaaaatttacctattctagaacctcatataagtagaatcatacaacatttatccttttgtgtggccatttcacttagcataatgtttcacaagacttatcttgaaatgttatacatgtgtcagaatgtcatttctttcttttttttttttttttttttggaaacagggtctcactctgttccccaggctggagtgcagtggtgcaatctcagctcactgcaacctctgcctcccgggcccaaacaatcctccctcctcagcctccttagtagcttggaccacaggctcacaccactacgttcggctaattttttgtagagatggggtttcaccatgttgcccatgctggactcaaactctgggactcgggctgtctgcctgcctgggcctcccaaagtgctatgacaggcatgagccaccacgcccggcctatttctttttaaagctgaataatatctaccaataaaaccaatgttggtttataccacattttgtttatccattcatccgtcagtggtcacttgggttgtgttcagcttttggcaattgtgaatagtgcttctatgaacattggtgtaaaagtatatgtttgggcagggcacagtggctcattcctgcaatcccagcactttgggaggctgactcaagaggattgcttgagcccaggaattcgagaccagtctgggcaatacaggagaccctgtctctactactaataaagaaaattaggccgggcgcggtggctcacccctgtaatcccagaactttgggaggccaaggcgggtggatcatgaggtcaagagatcgagaccatcctggccaacgtggtgaaacccgtctctgctgaaaatgcaaaaattggccgggcatggtggcacacacctgtactcccagctattcgggaggctgaggcaggagaattgcttgaatctgggcggtggaggttgcagtgagctgagatcgcaccactgcattccagcctgccaatagagtgagacttcgtctcaaaaaaaaaaaaaaaa

SEQ ID NO: 59824 - DNA, 532 bp, Homo Sapiens
  misc_feature (446)..(446): n is a, c, g, or t
  misc_feature (462)..(462): n is a, c, g, or t
  misc_feature (473)..(473): n is a, c, g, or t
  misc_feature (480)..(480): n is a, c, g, or t
  misc_feature (482)..(482): n is a, c, g, or t
  misc_feature (500)..(500): n is a, c, g, or t
  misc_feature (529)..(529): n is a, c, g, or t
gagactgggtgtcaatctgtcgcccaggctagagtgcagtggtgcaatcctggctcattgcaacctccacctcccaggctcaagtgatcctcccgcctcagcctcccaagtagctgggactacagacgcacacacaacccactacgtgccaaccactgttatgtgctgtgcatatgcaagttttggttcggttactttaaataacctataatactgagcacacaactgccactcgtctccagggctctttggaacccaaaattcagagattgctaggaataatttacccccaaagtcaaataaaaccagttagtcaacattttttggatagtcaatttcagtaaacacttccctgtcttactatctatgaaagacattatgatacagttcatcaaatctcttgcaaacatcacgatagacgtggacttctggcattccctaaaggngccatgtatgacttgngctggggtganccatggngnccatgggcattacccttncctttggaactggtacaaacatgggggcnaac

SEQ ID NO: 59825 - DNA, 536 bp, Homo Sapiens
  misc_feature (474)..(474): n is a, c, g, or t
  misc_feature (481)..(481): n is a, c, g, or t
  misc_feature (506)..(506): n is a, c, g, or t
  misc_feature (535)..(535): n is a, c, g, or t
aaagacagtgtctccctgtgttgcccaggctggtctcgaactcctgggctcaagagatcctcctgtctcagcctcccaaagtgctaggattataggtgtgagccaccatgcctggccataatttctcaaagtacaatataccataaggtaaaggtttgacattaatgacagtgaatatagattcatacttcctatcatcttcatgttaatttttaaacattttgtccaacttatcaggtcttattagtctgtgtttttattagatagccaataattttatcctgtaatatgtttgatgagcacagagtaggaaaatgtatccatttgcccttttcttgtgtttacatcatcgtcactatcttgcagaatttaaaaccttttagaacatgtgtccatgtggccacacatattatatgggacgaataaatccatataactaagcagatatagaatgcaaaatgctcaaagtaaacngaatgangaccccccaggtgaaactggtttangagctggggggtaactcatgggcacaatnt

SEQ ID NO: 59826 - DNA, 532 bp, Homo Sapiens
  misc_feature (129)..(129): n is a, c, g, or t
  misc_feature (169)..(169): n is a, c, g, or t
  misc_feature (174)..(174): n is a, c, g, or t
  misc_feature (220)..(220): n is a, c, g, or t
  misc_feature (247)..(247): n is a, c, g, or t
  misc_feature (310)..(310): n is a, c, g, or t
  misc_feature (436)..(436): n is a, c, g, or t
  misc_feature (440)..(440): n is a, c, g, or t
  misc_feature (455)..(455): n is a, c, g, or t
  misc_feature (478)..(478): n is a, c, g, or t
  misc_feature (501)..(501): n is a, c, g, or t
  misc_feature (519)..(519): n is a, c, g, or t
gaggcaagagtcttgctcttatcacccaggctggagtgcaatggcacaatcttggctcactgcaacttctgcctcccacgttcaagcgattctcctgcctcagcctcccgagtagctgggattacaggngcccaccaccacgcccggctgatttttgcatttttagtanagaanaggtttcgccatgttggccaggctggtcttgaactcctgacctcgngatctgcccacctcagcctcacaaagngctgggattacagacatgaaccactgcgcctggcccgtctctcatcttaatgcctttaagctntttacaatcgtttgagggaaaaagttatcttcacacttcctccagtaataaagggaaagctgcataggatggtggtggtgactggccaacttcaggtcccagaaaatctggaaaggctggagattncagngagtgggaactcganaagggtagaatttggagtggctntaaggggaggccttttcccaaangggaaggcccctgggtanggccaattgggat

SEQ ID NO: 59827 - DNA, 397 bp, Homo Sapiens
tttttgcaaagccactggagaactttcccattagataccaagaacatatttggtagccgaaggacattaaagtgatttaaaattataaataccaatagttacatgaaattacccaaaagatacagtaaatttctagatttgggagcccacaaagaagtatgttttaggatattattaatatattatgtatctgaggataccatcatttaaggggaatgactgactgttcattaggactacagactctgagtctgagtacaactgtccccaaacaaacagttctgttttcaggatatttaaaaagattcacagagaggaaatgtgccttttatcagcctcagtttaaagaagcagacaggagagatccaagaaggtacagcagagaatgtcctcgtgc

SEQ ID NO: 59828 - DNA, 277 bp, Homo Sapiens
  misc_feature (264)..(264): n is a, c, g, or t
ctcattaaaacatgttaaaacattttattttggaagttttatagaaatttaacatttactgtctttctcttggtagttttatagtaattatataatataaagaaaacacaatgactattttagcctaggcccatgtaagatgtccctaaaatccctcaaatttaccccactgtgccatatagatatgtttacttactttcattttttttttttttttttttgagacagggtctcactctgtcacccgggctggagtacagtggnctcgtgccgaatt

SEQ ID NO: 59829 - DNA, 987 bp, Homo Sapiens
catccttggagagagctgagagctcgagggacggggatttcgctatgttgcccaagctggtctggaactccggagctcaagcagtccgcccgccttggccccccaaagctctggaattacaggcgtaatgcactgtgcctggccttttaaaaaaaaattgaggttattttggggacagtagagcgtccagacacatcctaatttgcgtagctgctcagttttaaaaaatgcaatgcatttttacctcttaggtacagaacctgctaaggccatcaaacctattgatcggaagtcagtccatcagatttgctctgggccggtggtactgagtctaagcactgcggtgaagaagatagtaggaaacagtctggatgctggtgccactaatattgatctaaagcttaaggactatggaatggatctcattgaagtttcaggcaatggatgtggggtagaagaagaaaacttcgaaggcttaatctctttcagctctgaaacatcacacatctaagattcaagagtttgccgacctaactcgggttgaaacttttggctttcgggggaaagctctgagctcactttgtgcactgagtgatgtcaccatttctacctgccacgtatcggcgaaggttgggactcgactggtgtttgatcacgatgggaaaatcatccagaaaaccccctacccccaccccagagggaccacagtcagcgtgaagcagttattttctacgctacctgtgcgccataaggaatttcaaaggaatattaagaagaaacgtgcctgcttccccttcgccttctgccgtgattgtcagtttcttgagggctccccagccatgcttcctgtacagcctgcaaaactccaagaagagcccaagaagacattactactaactgtcacatggtgtcacggatgggatcttcggacagaaaaaggaaattgggccaggcgcggtggctcacgcctataatcccatcactttg

SEQ ID NO: 59830 - DNA, 517 bp, Homo Sapiens
tttttttttcatgtaacatggcctcttaagtcgaaaccaccaacttctggtcgtcagccaaaggaatgcttcaatgacaataaatgagtctccggtagggtgctttcctgggaaaatttcaagcttgctttttacctcattaatgtcatgccctcataagctgtgacacgagaggatattttttgggagggggtggtataaggtgtatggggagatgaaagggcactatttcaatggacacacaatttcttttacaattgaatacagaatgtacttattgttacatttatgcatcacctttttttagtgtgataagttgaatctaatcctttttcatacccagagacgaatgagtctcatgcccttgattttgatttctttgtcaacctactaaattttgaagtatattaattgctgtttctgttttggttaatgtcgacagccataccaccatgaccgcacctgatctcaactttttttggttaactagcttttttgaccatttctttttaattaa

SEQ ID NO: 59831 - DNA, 280 bp, Homo Sapiens
ttttttttgttctaggaattgtttatatgtctctggtgagacaagttctcaggacatagacctggggtagaatcacatccgtgatgggaatgtgggatcagctttgggcacagccttggcacgccatccttcatcctatgagtggactgtgtcatagttaaaaaataaatatctaaaactgatacagtatcatttctcaaatagaccaaggaaaatggaaaacaaaataattcagcttttcagaatatctgaaaagatgacattgatattgaacagggac

SEQ ID NO: 59832 - DNA, 86765 bp, Homo Sapiens
gatcaattctgaagccatttctaattctacttcaccagtatttttaaaaccagcttatttattaaagatttacttaagttgaggctgggtgtggtggctcacgcctgtaatcccagcactttgggaggccgaggcaggcggatcatgaggtcaggagatcgagaccatcatggctaacacagtgaaaccccatctctactaaaaatacaaaaaattagcctggtgtggtggcaggcatctgtagtcccagctactcgggaggctgaggcagaagaatggcataagtaaacccgggaggcggagcttgcagtgagccgagatggtgccactgcactccagcctaggggacagagtgagactccgtctcaaaaaaaaaaaaaaaatgatttacttaagtcacttgaagttgaaaaagcacttggtttaaagtctcaattttctaataaagtatttgattaagtgcttttttctttaagccaattaattaaagctcttttatatatttttagtaatgaaacatcatatacatgacacataaatatgtagatgtattagacacgcaggtagaagtagatcttatagattcataaaacctctttttccctattttagacttccaaattcctttcttttcttttttttttttttttggcagcaaagaaagaatttaataatcacagggctagccaagtggtaatgaaatgggaggactgggagggggcctgaacaatccctgaggaggagtagaatagcagacggaacactgagaagtgatttccttgaggatagattttcatgatggaaaggaaatgagaggttctaagaggtggcctagcggcttgtaacctacatggaagaggctatgaaatgatgacagaatagaatgggcctgtgaggctggaaggagatattttccttggtctaagaaccatttgccttgtgtgggaagagattgataggtggaagtttcagtgggggagtaggtgggagtgaccgatgagaaggagaaaaactggccatgagggacagaagttggaatgctagctgcttttttagctaccttatcagcataagtgttgccctgagcgatgggatctgacgccttttgatggcccttgcagtgaatgaatccagcttcctttggaagtaaagtggccttgagaagagtttttattaaagaggcattaatgatggaggacccttgcgtagtgaggaaacctctttcagcccatataacagtatggtggtgcaggatatggaaggcatatttagagtcagtataaatattgacacgtagtccctttgcaagggtgagggtttgagttaaggcaatgagtttgacttgctgagaggtagtggagaggggcagaaagtatatgcatcaggtatgaggaagaaaatagattttggaagttatgagaactgtagagagtgagttgagcatagtttgtgattttgagggcctctaaaagtattaaggcagtggcagctgccgcacacagacatgagggctaggctaaaacagtaaggtcaagttgtttggataaaaaggccacagggcacggtcccagtccttgtgtaagaattttgactgcacagccctgcacttcagctatgtgtaatgaaaaaggctgggatgagttagggagagctagtgtgggagcagcttttagggctgttttttaagaaatggaaaggggagtggggaaagaatttaggatttatggggtcagctaggtttatctagaacagaatgggttgtggagggaggtactgaggataggagagtctatgggtttggcaccacggggtagataggcaagacaatttggttgataaggcgcagatcctgaactaacctgtaagacttgtccagtttttggacaggtaaaatggggaaattgtaaggagtgtttataggctttaaaaggccatgctgtaacaggcgagtgataacaggctttaatgctttgaaagcctgctgtgggatgggatactggtgttgagcagggtaagggtgatcaggttttaatgggatggtaaggggtacgtcatccatcgccaaggagggagtagaggtgtcctatacttgtggattaaggtggggagatacaaagagaggatgtgaaggaggctttgaactggggggaaaggcagcaatgaggtgtggctgtagcccaggaatagtcaggggagtagataatttagttaaaatgtctcgacctaataagggagctgggcaggtggggataactaaaaaggagtgcattaaagaatgttgtccaagttggcaccagagttggggagttttaagaggtttagcagcctggccatcaatacccacaacggttatggaggcaagggaaacaggcccttgaaaagaaggtaatgtgaagtgggtagccttcgtattgattaagaaggggacggacttaccctccactgtaagagttacccaaagcgtctgtgatggtccaggaggcttccgaggtgatcaggcaacgtcagtcttcagccactgagccgagaagatctgggaaggagtcagtcagagccttgggccagttagacagtccagtttccagtggggtcccacacagatgggacacggcttaggaggagtcccagttctgtgggcatcccttggcctagtggccagatttccagcacttgaagcaagatcctgggggaggaagtcctgaaggaatgcctgactgctgtggcttaggcgttttgaagtttttgtgtgctggagatatggctggggtttctcacacagcagaggcaagtaattgcaactctttattattgtacaccttgaaggcgcggttaattaggtcctgttgtggggtttgaggactggaagctcatttttggagctttttctaatgtcgggagcggactgggtaataaaatgcatattgagaataaggcggccttccggcccctctgggtctagggcggtaaagcgtctaagggttgctgctaagcgggccatgacctgggctgggttttcgtctttacctcgggtagtttttaattttgtcataattaaaagctttgtgtgctgcctttttaagcccttcaactaggcaggaaatcatgtaatctcgcctagctatacctggggaatctgcctgatagttcctttgggggtcctctcggggaactgctctgatgccttcctggaggcctggctcatgaagccagcggttgtcagcgtgagactgggctagagaaaaaactctttcccgttcatctggggagagggtggaagtcaggatgacatttaagtcactgcaggttaacttgcaggacagagttagatatcggaattcctgtatatatttagtggggtctgatgagaaagagcccaaacactggctgatttgggaaaagtctgatacagaaaaaggcacatgtacccagactatgccttcagctccagccacttctctaagaggaaattgttgggcaggtgggggagagctagtcgcagaacgaaactgtaaagcagaccgggtgtgaggagaggaagtgataaaaggattatagggtgggggagcagtggctgaggaagagttgggacctggctcggcctagcgagaagcagcctggggaggaggggagaggtcagatgggtctgtagaaaagaaggattcaaaggactcagagcttggggtggagactgaaggaacagacaggagagaaagaagaaagatttgggatgagtcacattgggagcagagactagggagggaccaatgtataaaagattgcctggacgtcaggcaccacagaccatttgcccatttttcaacaaaaattatctagatcttgtaggatagacatatcaaaagtgccattctctggccacttggaactactgttgagtttgtattgtggccaagtggtattgcagaagaaaataaggcattaagttttaggtcaggtgtgagttgaagaggttttaagttcttgagaacacaggctaagggagaagaagggggaatggagggcggaaggttgcccatagtgaaggaggtaagtttaaagagaaaggtagagacacggagaaggagggtggggagcagccctaggctgcaatgtgggtgagcagccaaagcaggcatccccgcaactaacttgccaccaagggaatgtcagtgaatgaccaaggcaggcatccccgcggtgatcagacgccaatggagtgtgggtgaataatcaggcaggcgtccccacaatgattaaacaccaagggaaggctgtcttcctgagtccatgactggcgccagagttttgggtccatggataaaatgtgtctactttgtctctactagagaggaaaaagaactggaattagaaagacagggagattgaagggtagtgagaaaggctagataagagagtgaaaagaccgcttacccaatttgaaattggtgagatgttccttgggctggttggtctgaggacccagggtcataggtggatctcttcatggagtgagggtgaggacaggggactggtctcctgaaggagtccctctgacccgggtcttcggcaccagatgtctgtcacatccgcgtgaagagaacaccaaacaggctttgtgtgagcaacaaggctgtttatttcacctgggtgcaggcgggctgaatccaaaaagagagtcagcaaagggtggtgggattatcattagttcttataggttttgggataggcagtggagttaggagcaatgttttgcaggcagggggtggatctcacaaactacattctcaagggtagggagaattacaaagaaccttcttaagggcgggggagattacaaagaaccttcttaagggtgggggagattacaaagtacattgatcagttagggtgggacagaaacaaatcacaatggtggagtgccatcagttaaggctattttcacttcttttgtggatcttcaagtgcttcaggctatctggatgtatacgtgcaggtcacaggggatatgatggcttagcttgggctcagaggcctgacaattattatgaggctagaccatgtgatgtttttacagtgcacttttttttttaacaaagacatttctctaagtgtctaaaccaaactcttccttgatttaaacacccaagagtaacctctgttgtaataactgttttagtcaaaaaaaatcaggtaacacaatacaaaagcaagcagtttaagatctgagatgaactcgcctgtttacactcttggggttccataaggaaaaacagagatttcttcccgaaagggagtctggcaccttctctgttttctttaaggaatctcaggctgttagaaactattttagattcctcatgaagcagagggtggcaagagaaaggagagacagcagaagtaaatgaagaaaacagaattcagttgactaagaagaaaaaaaaaacctttttctcaaaaaaaaaaaagaaagaacaaaagaaaaaaacaaaacaaggtcctaggagagaaaagaaaaccacaaaggccttttaaatacacacacacacacacacacacacacacacacacacacaccttgaatattagcttttaattaagctgacttttaaacattgagctcctttaaaaaaaaatttggctggacgtggtggctcatgcctgtcatcccagcacttagggaggcctaggcaggcagatcatttgaggtcaggagtttgagaccagcctggccaacatggctgggcatggtggctcatgcctgtcatcccagcactttgggaggccgaggccagcggatcacttgaggagtttgagaccagcatggccaacatggtgaaaccccgtctctactaaacatacaaaaattagttgggatggtggcacatgcctgtaatttcagctactcgggaggctgaggcaagagaatcacttgaacccaggaggcagaggttgcagtgagccaagatcatgccactgcactccagcctgggtgacagaaactctgtctcaaaagacaaaacaaaacaaaaaatttaccaagacagttgtaggtaaagaaaggcatatttattagagaaagtattaaaatatgtttcaaaaaagcaatgggcagaattatcagaggtgtgtgaatcagagcaactccatcttgaataggggctgggtaaaatgaagctgagacctactgggctgcattcccagatgatgaaggcattagtcacaggatgagataggaggtcagcacaagatacaggtcataaagaccttgctgataaaacagtttgcgtaaagaagccaaagccggccaaaacccaccaaaaccaagatggacacgagagtgacctctggtcgtcctcactgctatactaccaccagggccatggcagtttaaaaatgccatggcaacatcaagaagttaccctatatggtctaaaaaggggaggcatgaataatccaccccttttttagcatataatcaagaaataaacataaaaatgggcaatcagcagccctcagggctgctctgcctgtggagtagccattctttcttcctttactttgctaataaacttgctttcactttatggactccccctgaattctttcttgcgtgagatccaataaccgtctcttggggtttggattgggacccctttccagtaacagaatcagcaagagaggaagtgactgcaagaaaacaaaggcttgctggagattttataagctggttcttgggctgcagagtgctacatgtagtactgataatgacaaggttgcagaggagctaacttgcaacatttctgtcagccaaggtgtttgatgataaatggaaccatctgataagcaggaagagtgtgagttgtacattatctgcacagataatgtttgtgtcctgggccacaaagaaaggcagacctattatagcttatctgctttatctctttgctttcccctgatctcgccagcttgtccccttttccctaattaggactccacaaagtgagacagaaacaacaaaaacagaaacaaaaaaacaaaacaaaaaacagttaagcaaaacaaacaaatgatcacacaatttatacaattactgagcactctaattataaggagaaattaagactagctggttgttaatcttaactttagccaagacaaaaacccaattcagctacttaccaaggaatggggctcaaactgaagactgctctctaccatcctagaagcgggaaaaagctcaaactcaccctccctcttggaagagggctgaaactccagaagggggttacctgcccaccatcagcatggaagcaggaaaacttgccttccttgttggaagcaagtaaaactccagaaaagttgtacagcaaaataaacattagatctcaaacaaatttgggtagagaccagggattctctggagggaagggagctcccaggcatcagcaaattgttctattggtttgagtcataaggatagctcaagctagtaccaagcaccaaaaggagatttgtcaaagatcaggggcacttccactcagaatcccttcgtggttaccaaactgtgaacccaaaatatctgagtcaggtctcaatcaatttttctagtttattttgccaaagttaaggacacacccataacacagcctcagaaagacttgatgacatgtacccaaggcagttggggtacagcttgattttatacattttagggagacacgagacatcaatcaatatgtgtaagatgtacattggttcagtctggaaagccaggacaacttgaagttgggggagcaggggcttccaggtcataggtagataagaaacaaaagatttcattattttgaatccttgatcagcctttcactgaatacacaatttagtctggctcagtgaatctgcatttttacataaacaatagggctgaggaagcaatcagatatgcatttgtctcagagggatgacttcctgtcccacacctgtgaaaagaagctatcagtttacattgcccgggtgaaattcaacagaactgttttagagtaaagatcttgaggcccacaaaaaattgctgtgggaaaattgtgagggaggtatgtagctttttttttttttttttaatctttgtagctatcttctttacaaacaaaatgagaggcaggttttcctgacacagttcctagcttgactttccccttggattagtgattttgaggtctgacatttatttacctttcacagatctaaaggtggaatttataatttaaagggatgcagatataaaaatttgaaaaatttgtagtctggccatgtaatagaaaaggaaaaagcattttcaggagaggaatccaagggtgctgtggagcaaccatttgcaagagagatgacttgcaagagagcatgactaaaagttaatcatgctgatagttaaggcaatggggaaaagtccccaaaggcacttcagaagataggtagtctctcccatcacaagctaagaggtccaggaggacagaatggtttttggaggacaggctcagggctctgtgccctgtgctgcctagagatgctgctcccacatcccagccactctggctccagccacagctcaaagaacctcaggtgccactcaggatgctgctctggagtgcacaagccataagtcttatcagctatcacatgttgttaagtctgcaggcacccagaatgcaagagtggtggagaactcttggtggcttccacctagatttcagaggatgcatcagaaagcctaggtgtccaggcagaagcctgctgaaggggcagagctaccacagagagcctctgctaaggtaatgacaatcaggaatgtgagattgcagcccccatagagacctgtattagagcaatgcccagtggagctgtggaagcagggccattgtcctccagaccccagaattatagagccactggcagtgtgcaacctcagcctggaaaagctgtaggcattcaacctaacccatgagtacagccacatggactgagcaaagccatgggagtgaggctgcctgaggcctttgaggtccatccctcacaccagtgtgcctaggatgcagatcatgaagtcaaaggagattgttttggaactttaagatttaatgtctgctctgctgggttctggatttgcataaggtccattacacacacacacctatatatataggtgcagtagcacgatcatagttcattctgtctcccaggctggagtccagtggcaccattatagcttactacatcatcaaattcctgagctcaagcaatcctcccacctcattctcctaagtagctgagactacaggcgcacaccaccacacccagctaatttttaaaatgtttgtagagacctgtctcattatgttgcccaggcatgtctccaactccttgcctcaagcgatcctcccacctcagcctcccaaagtgttgtgattacagttgttcagccactatgcctgggcctgttacccctttcttgggccaatttctcccttttggaatgggaacatgtttacccagtgcctgtacaaccattatatcttgtatgtaaataacttgatttttattttaaaggctcatagctttaaggaacttgacttaagtctcaggtgagactttggacttataagttgatgctagaacaagttaagacttttggagactattgggatggaatgattatattttgtatggaaggacatgagatttggaaggccaggggcagcatgcttctttgtcccaaacatccaaatctgtcgctgtttgtgatcctcaattgatttttagtcagcagtcctttactggaacatcctttacccaaacctcatgttgaaatttgatccccagtgttggaggtggggcttaatggtaactgtttggatcctggaggcagatccttcaccaatggcttggtgccatccttgaagtaacacaacttactctattagttcagtgagagctggttattaaaaagagcttggcacctcacttcccccgttgcttcctctctcaccatgtgatctctgcacatgccagctccacttcatcttccaccacagtggaagcagcctgaagctttcaccagaagcagatgctgcagaaccatgagccaaataaacctcttttccttataaatacccagcctcaggtattccttatagcaacactaaataaactaaggcagacattcattataaataaattaatatgatccttccttccttcctctctctctctttttttctttgacagggtcttgctatgtcacctcccacctcagccccctgagtagctgaactacaggcacacactaccacacctggataatcttttaattttttttgtagatacagggtctcactatgttgcccaggctggtaacaaactcctggcctcaagcaatcctctgcctgagcctctcagagtgctgggactataggtgtgagccactgctcccagccaataatataattttttttttttttttttttgagacggagtcttgctctgtcgctcaggctggagtgtaatggcacagtcttggctcactgcaacttccacttcccaggttcaagcaattctcctgactcagcctcccgagtagctgggattacaggcacccacaaccgcacccagctaatttttgtatttttagtagagatgggatttcaccatcctggccagactggtcttgaactcatgacctcatgatccatccaccttggcctcccaaaatgctgggattacaggtgtgagccaccacacctggcccagccagtaatatactttctacattgaattaataaacatctgtgctctttccctaaaattcatttttttttacctgacagatggtgcagacaaacctgtatttttaaagtgcattaaaatattttctattttttcttctttgaaaatctctcccatgatttgaggaagaaaaaaaaaaaaacctcaaagttttcctgtatgtgatcttcaattgattttgagtcagtagtcctttactgaaaagagcaaagaatctcactctaacagatacatgtatgctctgtccagtaacattttatcccctgggtacagagcttacttagactctaacattttagcagtgctctccagattagctcaactacaaaggaaacatttgacccacagacacctgagaagggaaggtgactgaggaatgggtgttgagggactctgctctcctgcaaatattctgaactatcttcaggatccaagatcctatcttaggatccacttaagacctgcacgcatgaagtcattgtaccatggagcacatccttacagggctgccccaaaaatatgcccaacatagaaactaaaactttgctggttatcagcatcactgaggaatagtatttagacttgacaaagtagaggagctgaatctaagaactgtacttaaagccaagcacccaaaagggctatatcacctgttgatgaggtgaagagaaaaatctgcatactggtaacgtgaaccaacaagaaaaccagtctgtccctggtaatagtaagaatagggaggagagaaacatttgagaaatagacaaaaatggcaaaatggggtggaaaggactaataacattaatcattttccctaatcatttataatcatagccctagtctcatgcagttccagcatttgaatgtacaccatactcagagtctgataaaccccaattcaagaaataagtagaaatacagtcctaggttgatagtgttcccagctgggcacagtggcccacgcctgtaatccctatacttcgggaggccgaggtgggcagatcacttgaggtcaggaattcgagaccagcttgggcaacagagtgaaacgctgtctctactaaaaatacaaaaattagctggatgtggtggcaggcacctgtaatcccagcaactcaggaggctgaggcaggagaattgcttgaactcaggaggcagaggctgcagtgagccgagatagcaccaccgcactctagcctgggagacagagggagactctgtctcaaaaaataaaaattaaaaataaataaataaataaataaataaaagatagtgttccctagcacgcagaagaaaccaagacaaatcatctcaacccagacctctcaggattcccaaagttgaagtttaaccaaatatgaattcctaataaaatatcaaacatacaaggaaacagacaaccatgagcagagtcaagagagactacaaactgaaatgtaagacatacacagactgcagatattaaaattaaaaaaatagtatatgaagtaaatacgtttaaagtgttttaactgaaaggcagagataagcagtatgtaaagcagaaagaagggacatttaggtcaacctggaccttcagggtaagttccctgaggatatgatgcttgagttgggctagaaggacaattaagaattagtcaagataggccgggtgcggtgactcacacctgtaatcccagcactttgggaggctgaggtgggcggatcacaaagtcaggagatcgagaccagcctggctaacatggtgaaaccccgtctctattaaaaatacaaaaaaaaattagccgggcgtggtgatgggcgcctgtcgtcccagctacttgggagactgagtcaggagaatggcgtgaacccgggaggcggagcttgcagtgatcgcaccactgcattccaggtcaggcaacagagtgagactccatctcaaaaaaaataaaaataaaaataattagtcaagatataatgccatcaggatatgaaggaaaaaaaagaattaggtggaaaaaagtggtagggcattccataccaagaaatcaaaatcataagcaaagacatggacacactgaacagcatgggggactcagggaaaacttcaagtgtcctctgttactagagtaataaatgcagagcaggaaagagcaagagaagctgaagaagtagcatatcaggagatagagggctttgtataccatacgtaggaagtatggcctcactgaaggactttaaggaggggaataacatgatcagttttgttttatgtagactgctttgttagtagtgagggaaaaggatttaagatgggcaaagctggaggaacagagatcagctaggatcagctacagatcaactgctgcacaggttacaggagaaatgatgagcgtctgaactaccagggtgtctgtaagggtgggaggagaggcagatttgagaaactgcagctaaaattagcaaaagctggtgattacttttgggaaggatgaaggggaagcagcatagaatggctcctgtgtttcttgcttgggtgactaggtgatattaattgatttggggaatacaacaggaagaccacattgggacagatgataatgccctaaataatgaagatgttaggtctgagtacttatggcgaatcaagcttggagatgcttatcaagcaactggatttatgagattgaagctcatatgagaagtcaatgctgaaataattaactacaaaagtggctaattcacctaaggagagacagaagcacagtgatccaagtgtggaattcagggttaggaaataatctgaaattcatgacaagttttataggtttttaaaaaatgctcataagcaaaatataattatgtatagatattaagcaagtcttacagtatcaaaaattggaaaccatctaaaagtaaaaaaaaatagaatggttaattattacagtatatccactttggaaaaatatcatagtcattaaaaatgatgtttaggccaggcgccagtggctcacacctgtaatcccagcacttagggaggccgaggtgtgctgattgcttgagcccaggagtttgagaccagcctggctaacatggaaaaccccgtctctactaaaaatataaaaattaggctgggtgcggtgactcaagcctgtaatcccagcactttgggaggccaaagcagttggatcacctgaggtcaggagttcgagaccagcctgcacaatatggcaaaaccccgtctctactaaaaatacaaaaattagccgggcattgtggcggacacctgtaatcccagctacttgggaggcagagacaggaaagttgtttgaacccaggaggcagaggttgcagtgagctgagatcatgccactgcactccagcctgggtgacaagagcaagactccatctaaaaaacaaacaaagaaaaaaattatccaggcttggtggtgcatgcctgtaataccagctactcaggaggctgaggcaggagaattgcttgaacctgggaggcgaaggttgcagtgagccagaattgagccattgcactccgccctgggcaacagagcaagactctgcctcaaaaaaaaaaaaaaaaaaaatggttaggaagtttacagagtgtagaaaaggtttataataaaatgttaactgctttcctacctttaaaaaacactacgggctggcctcccaacactttgggaggctgaggcaggtggatcacgaggtcaagagtttgagaccagcctggccaagatggtgaaacctcatctctactaaaaatacaaaaattagccaggtgttgccaggcacggtggctcatgcctgtaatcccagcactttgggaggccgaggcgggcagatcatgaggtcgggagttcaagaccagcctgaccaacatgatgaaaccccgtctctactaaaaatacaaaaattagccgggtgtggtgatgcacgcctgtaatcccagctactcaggaggctgaggcaggagaatcgcttgaaccagggaggcggaggttgcagtaagctgagatcgtgctactgcacagcagcaaaaaaaaaaaaaaaaaaaaaaaattagccatgcaaggtggtgggcacctgtaatcccagctacttgggaggctgaagcaggagaatcgcttgaaccctggcgacggaggttgcagtgagccaagatcgcgccactgcactccagccttggcgacagagcaagactctgtctcaaaaataaaataaaataaaataaaataaacactacatatgatttaaacaatataaaaatatgagtaacaaagtccgagcacagtggctcacgtctgtaatcccaacactgtgggaggctgaggcgggcagatcataaggtcaggagttcgagaccagcctggccaatatggtgaaaccccatctctactaaaaatacaaaaaaactagccaggcgtgatggcgcgcccagctattagggaggccgcagcaggagaatcacttgaacgcgggaggcagaggttgcagtgagccgagattgcaccattgcactccatcctgggcaatagagagactccgtctttaaaaaaaaaaaaaaaagagtaacaaggtctggaaataaatacatcaaattgctatagaaacagcaaatatagaaacttgaggttgatgaaattcttccttctacctttccacattttccaaattcactatataatattataataacggagaaaactttaaaacaaacaacatttcctatcacctctatcaggacatagctagagttcctatcaaacacaggacctgacatacaggagcccctcacaaaacgcagtcatgtgccaatacctagatgtgaaggcagctgctgtagaggctcctgccttctagaagcctgcagtctctcctgtctgccagaagcctcaccatggctcggcctccgagatgccatcctgggccggcagggcaggttcagcttctgcccctcgggactcgatctcacctctggccgctgacactctgacccatgcgacttttcggggctcctacttcccattcccaccagcccaccaggggcactgcggcctcacaactccctcatcccctgggaaacaattcccccaggaccgtgggcattatccctccagcggacgtcggccccacaagcccctcacggaagggcggctccgtgagatctcactgtactgaccagtcctgccactgccaggacgctgggcctctcagacactcgatgagaccggtccaactccaggtggcaactggagctgggttgctgccgggcccttaacactacatccctacggagagggcggaacaggagagaggaatagcagaagggaaaggcagaggggagggtggcgaggaagaacccgcgagttccgatggaggctgtggctgcgcgtcgatgctccaccaggacgctggagaggcggcgcgggtcccacaagcccgaaagcccgggaggtggggcgggtcctgcagcggaaatgcctcttgggcgctccgcccgaatctcggttgtgagcttaaatgctcagctctcatatcaaggaagctaaggcgccttcagcctcctgaggagatacccggggaggccgctgctaggaagcctgagagcgcccactgacggccctgccccaagataggctccgtccctgagcagactgggctgggcctctccaaaaccacgctcacagtttgttcattcactgctgagtcctaaccagatactaagcgccagttgctgacgttagagcagtaaactgggtaccaggttcctgccgtctgaaaggacatatttaagccacaagttacaacgtagtgtggaaagcgctgtgtgggggttggggaagcagtgataagggcactcatcccggcttgggagtcaagggaggtctccagtggggcaccagccacagtagcaggacagaagcagatcggatgtaatggtttttaatgataaaaagttaccatctgatgtcttctggttcctctgagacctgctggctgctgggggtggaggggaaaagaagttgaggaggccgtgatcttggacttcccagcctccagaattatgagaaataaatgcttgttgtttaagccagaaaaaaaaaaaaaagaaagaagaaaaaagattaaatgagataataaatgttagagtataaatgtgttccacatcactgaggagcaaaaaaaaaaacaacacattatttaatttttctaaattaaattaactcgggctcaaaaccccatttactagggtggaaagacaaccaacatcaaccatttattggggcccatttccctctttagcatgttgtacattgacaaaaaaaaaaaaaacttagaaaagagcctctgggccaggtgtagtggctcaggcctgtaatccctgaactttgggaggctgaggcgggaggatcacttgagcccaggagttggagaccagcctgggcaacatagaaagaccccatttctaaaaaatacaaaaataaaataaagaaagagagaaaaaaaaaagagactctggtcttcagtctgtcatggttgctcctgggatgaccattgtctaaatccatatggtccattcaaaggcaggcagattcatagcatctctgccaagtatgcacaccagatctctgcagctcccaagacagagtgctagatgcttagttccaaagccattaaatcagcactccctatcagaagtcatggccaggcatggtgtcctcacgcctataatcccagcactctgggaggctgaggtgggcggatcacctgaggtcagaagttcgagaccagcctggacaacatggtgaaatgccatctctaataaaaatacaaaaattagccaggcatgttggcaggcacctgtaatcccagatacttgggaggctgaagcaggagaatcgcttgaacctggtgggtgaagtttgcaatgagctgagattgccccactgttctacaactttatccaggttctgtgtggaggggaatttaatttagctgggtggttttttttttttggtttggaaacacaaagccactaacaatcccatgagacaggacaggtgtggtggctcatgcttgtaatctcaacactgggaggccaaggcaggtggatcgattaagcccaggagttcgagaccagcctgggcaacattgcaaaacactgtctctacaaaaaaatacaaaaattagccaggtgtggtgtgtgtgtgcctgcagtcccagctacttgggaggctgagatgggagaatcacttgagcctggggggtcaagcatgcagtgggctgagatcatgccactgcattccaccctgggtgacaaagtgagaccctgtcccaaaaaaacaaacaagcaatcacatgagacaagaaatccagtattcctggaagaaaattaagccaagttatctttttatcctactagtcatcccatctggcaaggagtaggagacagaaactggtaaattatcttgccataatgtaaataaacaagcacagaataagtgttgagtattaccttctctgtcttccatcaggactcaatttaccttcttcaactagtggttgcaaattcaaataccacgcagataatataaattagtaaaaataaacaagtggaagaaaacaaaatcataggcacaatgatcaacagcaacgagcccttagtcttggcaataaacttttttttttttttctttaagagacatgatttcactctgttgccctgactggagtgcagtggcatgatcatagctcactgcagccttgaactcctggtctcaagcaatcctcttgccttggccttccaaagtgctgggattacaggtgtgagtagtcaccatacccagtcttggcatttactctaagaacagggtgagaactgcagtgaactggagagcacaagttcattccaaagggagcaattgctacttagctccaaatagcctttactttgtgggaatataagtccagtgttgccagattttaagttggaaatattatgtacgatctactgatttacaatattggctactcattaaagttttttttaaaaaaaaacaccgttggctgccgggcgcggtggctcacacctgtaatcacagcactttgggaggctgaggcaggcagatcacgaggtcaggagattgagaccatcctggctaacacagtgaaaccccgtctctactaaaaatacaaaaaatcagccaggtgcggtggcaggcacctgtagtcccagctactcaggaggctgaggcaggaaaatggcatgaacccaggaggcggagcttgcagtgagccaagatcgcgccactgcactccagcctgggcaatagagcgagactccatctcaaaaaaaacaaaacaaaacaaaaaaaaccaccgttggtcacagttaaaaagcactgtctgggccaaatgttacacataagtaggtcatctttatgcccttcaatggtttcagctgctacatatatgctgctagaggtcaaatctacatcccccccatagactgctctcccaagcttcagatccatgtatctgtcccttgcctagctttaccttgaggtgacaccagaacctcaaattcaaatatctaaaatggaacccatcaccgccccccaaccaccataacttggttcccaggtctttgtttcttatctcagtgaaactgcaccaacaaacatccagtttcccaagtcagaaatcttggagtcaccctcaatttcctctctcccccaacctatcctattggtaaacaagtctaatcaattttatctctggagttctacttgaatccatatttcccatgcccaccatcactgacatggttcaggcctcactttagtttttatttaactaaagcaagactcacctaacctcttgccttttgtgtctttaccctcactagaatgttatttccgagacacaaacttcatcttgtcacttccctgtttaaaacttttcaatggtttcacattgaaaagtgacagagttccaacttcttagcctggtgttcagggactttgtgatcttgtctttctaggttcatctcctaccacttccccaacctccatccaaaactacagccacactgaaataccttcaatttccataatggggcatagtttctctgccctagcacatttacacaggctgttcctactgcctggattgtccttctctcactccctacactacatcctcactttcttggttcctcaaataaagcattaatcatctcctctgggaagcacccctcaccatcaacctccttcttcagactggtgggaatctgttctctggccccataaaactctgtgcgcatctctattttcattacctgttacttcactgatcccccaatgaaatgggacctagtttagtgcaaagactctatcttacttctgcagtttaaagactgagcacaatacctggtccataacaggcattcaacaaatgttacatgaatcaatcaatcaatctagttcaactcatggtaccaatggagaaacctctcttcggtttctcaagatcatgtggtggatcagtgatggagctagagaacccaagtctcctcactttcagctcagcacactttccaccagaacaaatcagcttttaatgaggacagggattgaagcgtggccctgaaaggaagggccgacatggaacaaagtggtggttttagggggaaatggaggaaatgagaatggcaaagcacatttatttgtcatccttaacatgaatgcttcacagttcacagctgacacgagcataaaaaagaggggatagaccccaaccattaaagacagaatgaagcttataattagaaaccttaaatagaaatttaatacagcatacattatattattctaagcatatatatttattcatttaatccttgttagaaatgcttgttccccagtgccgtgaagaaatagcacttgaacataaatttaatttcctcagcaaggctatttttactttctgcagaaacggtacactcaccagcagttttgccatgaagagtacaccgaacaaaggaggcagggtcatttatagcctgacgcatccaccctactgctgtgtccggtttccattggctggaacaggacctcgctttctgtatttgtcctgattggctaacaacttagaactttttaaaaagaggcaaaggcagagaacaaaggaaggaggaagttaacttgtggaatgctgagaaaggtaaaaacaccttcaaataaggaagaggaacaggctatgacctaatgcttgcttggaccaatataagcatgccagggcaaatatttaggctaaattgtggaagctaagaacataaagtaaattgatttattacggctagcagatatttaagaatgttaacagaggtctttgaataaattttgcttctaagagatgttactatttattcctaataagatggagaggaaagtctttgaagaggaacctctactttactttttacatcctcaaaacaaccctgtgtagtaagtaataatattattgtgctgggtagagtggcccatgcctgtaatcccagctactcagaggctgagatggaaggctctcttgagctcaggaggtcaagaccagccggggcaatacaatgagaccttgcctctaagaataatatgccaggcaagatggttcacgcctataatcccaccactttgggaggccaaggcgggaggatccctagagctcaggagtcgagaccagcctgggcaatatagagagatcctgtctctacaaaaataaaaaatataaaaattagctgggcacggtggcacatgcctgtggtcccagctactcaggaggctgaggcaggaggagcacttcagcccaggaggttgaggctgcagtgagtcgtgatcacaccactgcactccagcctgggtgacacagtgagattctgtctcaaaataataacaataaatatctataaaataaagataatgatatctttattttatagataagaaaaatgaggcactgaaaaaattaagtagtttgagttttcacaggtaggaaaatgacagagctatgatttgaataaggcagttcggtgctagaatccatgtacttaaccacaatgcctgaagcataattctgaactgggcaatcaaaaggggatcacccacatttcactgtgtgaagcatgaattgcctgatagaggaaattttttttggttctaaattcagggagaaggctgttaagcccaggcctctgtgggggatgggagttctttgttctgtgatgcaatgatgacctcagggtaaactgccagaaggctaagggaaatggaatggctgctggaggacctgcttggggctaagggggatatggggcttctctggggccaactgacccatgccctagcctgcagacactgcggcagcagctgcttccagagtccaggaaatctggtgacactattcttattcgtggtttggcagattcagagatggtggcagcttgggaggttgcgacagcttcatccctggtgctctgggaatatggtgcaaggcaaggtgggtgacctgtgactgtacagctggatgaatgactgctgacaccacatgtgaggtcattggtatgaatgtgggcccaggtgagtgactataagccctagatgtgaggctgggtgagtaaccactgacactagatttgaagccaggtgagtgaccatggattctagatgtagaatgagggaatactgatctccaaatgaggactgggtaatgaccattaacactagatgaggagctgtgtaggtgactggccacacacgtgggattaggtgagtaactgtccactctggatatggagcagactgagtgcctcatagcaaaccttgtgtatctgaaaaggcttcatgcctgagaatatctttatctacttcccaggaactaccacttctgcaccgtgtggccttccttgatcacctgtgtaagcagaaatcagaagtggaggaagaaggggaagaagaggaagagggggaagacgaggcatctctggatccactgaagccatgttctcctaccaaagaagctcccactggagagcaagccactccagccccaccccagccatcctgtggttctgagggcctcctcaaggctatagggataccagagcaaacagtcatgcagcccgtgagcccttccagatccttccccatcttccagattctgaccagctttcctgtgaggcacaagatagcatcagggaaccgccagcagcagagaaaaagccagctcttctggggtctcccctctctgcacagcgagtccttggaggccatcttcctgagctcaggtggcccctctcctctgaagttgtctgtttgttcttctgtcttcttcaacaagcttgccttcctacctaggtccaacctgttgcttccccagtatcactcctcagcccagttttctacccatggggcccatactatggaagatctagaagggatggcccccgatcctcagctgcttccacctccatcttctccttctgtctcatcactactcctccatctgaggcccttccctgtggaccacaagggagttttatctggcgctgaggcacccacacagtcccctggaactagccccctggaagttctccctggatatgagactcatttggaaaccacaggacacaaaaagatgccccaagcttttgagcctccgatgccacccccctgccaatccccagcttctctgtcagaacccagaaaagttagccctgaaggaggacttgctatatctaaggacttctggggaaccgtgggatacagagagaaacctcaggcctctgagtcttcaatgccagtcccttgccctcccctagactccctgccagaactccagagagagagttccctggaagatccatccagatataagccccagtgggaatgcagagaaaactcaggaaacctctgggcttttgagtctccagtcttggacctcaacccagagctctctggaaccagccctgaatgtgtcccaccagcatctgagacaccatggaagggcatgcaaagtagagaaaatatttgggtccctgcagacccagtttcacctcccagccttccctcagtccctctcctggagtctctagtaatgggcccccagggagtcctgtctgaatccaaagctttgtgggagaccatggggcagaaagagaacctctgggcatctgattccccagaccctgttcatagcacacctccaaccacccttatggaaccacacagaatcaatcctggggaatgcctcgctacatcagaagctacatggaaggatactgagcattccaggaattcctcggcttctaggtctccatctctggccctcagcccacccccagctcttgcaccggagctgctcagagttagatccatgggggtcctgtctgattctgaagctagatgtggggacatacaaaagacaaaaaactcctgggcctctaagcacccagcttgtaacttaccccaagacctgcatggagccagccctctgggagtcttgtctgattctcagtctattgtaggggaaatggagcaaaaagaaaactgtgttcctgtgttcccaggtaggggctccagcccatcctcaaactctgtttcaaagtcccacgtaagtgagcctatcgcagaccaaagcaactataagcctgacggggaggcagtggagcaaagaaagaaccactgggccactgagctcccagcccccagctcactctctactcctctaccagagccacacattgaccttgaacttgtgtggagaaatgtgcaacaaagagaagttccccaaggccccagccctctggcagtggatcccctacacccagtaccccagcctcccaccctagctgaagctgtgaagattgaacgcactcatcctggtctacccaagggagtaacgtgcccaggggttaaggcagaggccccactctcccagagatggactgtcccagagttgctcacccatcctgggatccatgcctggcagtggagtagagagctgaaactcaggctgaagaaactgcggcagagccctgcctccagagcccctggcccaagtcaatcattttgcagctcccctattctgagctccacaattccagacttctggggactcccttcctgcccaccacagcagatttatccccccaatccatgcccccactcttcaagttgtcatcctcaagaagttcagcgcacagtacctcagcctgtccagtcctcccactgtcatcacttccaatcctcttcccagcttcagccacaggagtctggcagggcggaacaagggtctcagagaggggagaaaatgaaggggaagatggtgagccaggtcccatcccaagggccatgtgtacacatggaggctggtgtggactatctatctccaggcccaggagaaccctcaaactctaaggttctggtctcaggcaagagaaaggacaaggcttcagcctcatcctcagccaaaaagagagagcaccctaggaaacccaaagcaggagaccatagaagagggactgcaaggttggggttatccacagtcacagggaagaaccaccctgcccaggccagaagcctagtagaggcccctgtaagcacatttccccaaaggtctcaacacaggggccagagctctcaacacactgctcttccccagctgcttctccccaaagcttcgggtccccaggatcagccagaggcagggcgaagagcaagtgacatcctgacccctcgccactgtaagcactgtccttgggcccacatggagaagtatctctccttccctaccctcaaggcttcccttaccaggggtttgcaaaaggtgttagccaaatgcctggataaccatcgacccctacccaccaaatctagtcagtagagaaaaggctggtaatactagcacttggtatgccaagacctgaagccaaaccagggggaaggtggggatgtggagacaagaaatggaaattctaataaactagctgaattagataaatcccattcatgtcttctttggaatctagggtactgaaaatgtcaattcccaattctgctacagccatagcccctcagtttcaagtcccagtagagcactcaggattctgcaggcttaactcttttgtggatcttcacagatgatcacatctggagtccacacatccctactctatagggtgaggctacagggccaggtcagcatagcccaaagctgcccttgagagggaacgacttcacagcatgtgaacaaaaaactacatccattcacacgagcacaggtcatctgagtctaggcaactgtgcttggtcctgggtattgttctcttcttcatccacttgacctgtaagttctccacgtatctttctgaccatttcttctcagccctctgctcttttctctccctgggtcagctcatccatctccaaggccatgaaaacaagtgtcttttaatacgtctagtaaccgtctggatttctataatcaccgggtcatatcctctacccattttctaatgcactatttgttggacattgtattagtcaatgtattacagttttctactgctgctgtaacaaattaccacaaaacaaatttattttgtcagaagtctgacacggagcctgggtgcagtggctcacatctgtaatcccaacactttgggaggctgagatgggctgatagcatgagcccagaagtttgagaccagcctgggcaacatgacaaaaccctgtctctacaaaaaaaaaaaaaaaaaaaaaaaccacaaaaattagctgggcatggtggtgcatgcctatagtcccagctactgggcaaggtgaggtgggaggatcacctgaaccagagaggtcaaggctacagtgagccactgcaccactacatgccagcctgggcaaaagagaccctgtctcctccccgcaaaaaaagtctgacacatgtctcacagggctaaaatcaaggggttggcaggcctacatccttttctctaggctctgggtaggattcactccttgcctttcccagtttctagaggctgcccacattccttggttactgacccccttcttctatctttaaagctagcaaaggcaagtcaagttcttctcacattgtatcactctgacctcttctgcctccctcttccacttttttttttttttttttttttgagatggagtctcgctctgtctcccaggctggagtgcagtggcacgaactcggctcactgcaagctccgcctcccaggttttatgccgttctcctgcctcagcctcccgagtagctgggactacaggtgtgcaccacctacgccgggctaatttttttgtatttttagtagagacagggtttcaccatgttagccaggatggtctcgaactcctaacctcgtgatccgcccgccttggcctcccaaagtgctgggattacaggcgtgagccattttttttttttttttttttgagacagagtttcactcttatcacccacgctggagtgcaatggcacaatctcggctcactgcaacctctgcctcctgtgttcaagtgattctcctgcctcagcctcctgagtagcttggattacaggcatgcgccaccacgcctggctaattttgtatttttaatagagatggagtttctccatgttggtcaggctggtctcaaactcctgacctcaagtgatccacccgcctcggcctcccaaaaagtgctgggattacagacatgaaccactgcgcccgaccctacctcttccacttttaaggacccttatgattacactggacaaagctgaataatccaggacacccttccaatttaaagtcagttgatagccaggcgcagcagtggctcatgccttaacagtcccagcatttcaggaggccagggcagctggatcgtttgcggccaggagttcaagaccagtctggccaatatggcaaaaccccatctctactaaaaatacaaaaattagcctggcatggtatgtgtgcctgtaatcccagctactccggaggttgaggcaggagaatcgcttgaacccaggaggcggaggttgccaagatcatgtcactgcactccagccttgacgacagagcaagaccctgtctctaaataaataaatgaagtcagttgattagcaaccttaattccacctggaaccttaatgcccctttttccatgtgaaataatatatacataggttccaaggattacgacgtgggcatcttgagggccatgatcctgcctacagagatagtgacccaaactattatgtatgttccaaatattttcttccaatttgtatcttattggctaattttatggtgacttctattgtatcaaagaaaaatttttttatgtagttaaatctaccaacactttacttcatgacttctaaaacattttctcctggcactttgataattttgcatatttatgttttagattaccgatttttatggtatgaggtgataatctaaccttccccaaaatcatgtccaatttaccaataccattttttaaaaatagaatgtcttgagcccattccattaaatatggtgtattgtaaaaacatgagtcatttctaagcatctctaggcttcaggtccccatattcaacagcataccagacattatctcatatttgacttgtccaaaaacgtattttccctttaactttttcctccaacacgcccattcctatcaaaatgcatgacatccacctaaatacttaagctttgactcttccttcctccctgatctaagccatcaccaaatcttgtcagccaggctcagtggctcatgcgtgtaatcccagcactttggcaggccgaggtaggaggatcatttgaggtcaggagatcgataccagcctgggtggtaccccatctctactaaaaacacaaaaattagccgggtgtggtggtgtgcacctgtaatcccagctacttgggaggctgaggcagaagaattgtttgaaccaggaggcggaggttgcagtgagctgagatcatgccactgcactccagcctgggcaatagagcaagactccatctcaaaaaaacaaaacaaaacaaaacaaaacttgtcaattatacctatgaaatgtatttcaaatccatcttcccctctccatttccaccatcactattgtcttagtcattatttctcactaaattggttgctctattccttctaatccatcctgcacatggctacaattctctggagatcaactgccccgatctcttcaacaagtgtcataaaagtttgagtaaaaggctaggggtggtggtacatacttataagcccagctacttgggaggctgaggcaggagaatcccttgagcccaggatgtagtgtgccatgacgattgggaaccgaatgatgctaagtttggcatcaataatggtgaccttccagaagtgggggaccaccagtgcctaagaaggggtgaactggcccaggtgggaaacacagtagataaaattcctgcacagatcagtagcgatatagcacccgtaaatagccactacactcttagcctgagcaacagaacgaaaccctgtctcttatttttcaaagtttgaataaaggaatctaacagatgccaacttgtggacctaggttagatattggtttggtccaaatagctgtgaatgatatttgggtcgcttgggggaaactccgaatatggtatgggtatctagtttggttcttgacctctagaattttgcttttagggacagggtcatgctctgtcacccaggctagggtgcagtggtgtaatcacagctcactgcagcctctaactcctgggcttaagtgatcctcctgcctcagcctcctgagtagctaggactacagctgtgtaccaccatgcccagcaaacttttttttttattttttgtagaaatgaggactcactcttgttgcccagactggtctcaaactcccggcctcaaccaatcctcctgtctcgacctctcaaagtgctgggattataggcatgagccaccatcaccacgctcaaccaagaacatttacataaagggaaaggtaaagatactgaccaaggccgggcacggtggctcacatctgtaatcccagcactttgggaggccgaggcggtggtggatcacgaggtcagcagatcgagaccatcctggctaacatggtgaaaccctgtctctaccaaaaatacaaaaaaattagccgggcttggtggtgggtgcctgtagtcccagctactagggaggctgaggcaggagaatggcgtgaacccaagaggtggagcttgcagtgagccgagatctcaccactggactctagcctgggcaacacagcaagactccatctcaaaaaaaaaaaaaaaaagatactgaccaaaacgaaaaagttataatgcagtatgatctcaatttgggtttaaaaataccacatgtatagacacgtacacatacacaaaaaagatccagaaacatatgcactaaagttattaaaacagtgatgacctctggttattggaaatatttttttaattttgcttatatttttaccaatttctttcttagacagggtctcattctgtcacccaggctgaagtgcagtggtaagatcactgttcactgtggcctctacctcctgagctcaagtgatcttcctacctcagcctcccaagtagctaggactaccagcacacacaaccatacccagctaatttttgtattttttgtagagatgaggtcttaccaagttgcccagtctggtctcaaactcccaagctaaagcgatctgcttgccttggcctcccaaaatgctgggattaccagtgtgagccaccacgccctggcctatttttctaaatttctacaatgcacattactgcttctataaaaataaaaggttatttaatgtaaagtgtctacgcataaccacgtacatgtgattgacaatattgtactgtacacttggaaaccgttggatgaattatttggatttttttttttttgccacaagaaataaattgaattatttaacgctgaagcctatgtcactttcttgcctgaatcctccagatgacccacacctgtaagaaagttcagtcctggcatttgagggtcttcacaacatggttcctgatctctccaaatttaccccaggactcttgttgctagtctaactttaagctttatgagcaagtgctgtactttctgacctgtgcctcaaactgttctcctccacttctccacatcaagtttcccaccttcctttaaggcccagaaaccgtattttacatggcattgccttccttgcagccccattaacactgtgtgccttgttgatagcttctgtttcctgatagtaaggctttaacatgaggttctctgaggtcaagctcaaattctcaatccagtgctctttccactctatcatattccctctactctgtatatttggttgagaatcagccagtcagaaggtacatgctgcttccttgattcctctcactagtgtcactgttctgttccaaagctttatttagctcaaacctgtcaacagggtctgagtccaaaactcaccacctgctggccaagggtggaactaaaggtacttttccctctcccactactatggtctccaaagacaatgcaattctgaatttccattttacatgggaacgtgagttcacacttatctgagtagctttataaaaaaaaaaatccaaatcctatattaagtattttaaagctcctagtgggttgtggggctgagcaagggttagcaaaccatttgacacttgccacagttcagctgaaatggaagacctgcatccttcacgggcattgtgtccactgaactttcaggggaatttgtaggatcagtaccttagatcgatctatctagatatatatagatagatcgattttttttttttttttttgagacggagtctccatctgtcgcccaggctcactgcaagctccgcctcccgggttcatgccattctcctgcctcagcctcccgagtagctgggactacaggtgcctgccaccacccagctaattttttgtatttttagtgtagacggggtttcactgtgttagccaggatggtctcgatcttctgacctcgtgatccacccgcctcagcctcccaaagtgctgggattacagacgtgagccaccgcgcctggccaaatataaacatagtttaagacattagatatgttgttccatctttgtttttgcctctatggcatactgctggtcctctatttgataccacattcttggtctgaaacccaacctctaatcgcagtgtttaccctatataaagtgatcagctacggtaagatcacattccagtttctttctaggtataatgtgaggggaaagatggactgcctatacaatttgcctcttggtttaagtatgcaggcttccacagtttagaaagcatttttcaatcattttgtcagactaagaaacttgaggccccaaaagagctatcaccttgttcacagctatacaggtataactggcaactcacatgtagaagaatgaaactggatcctcatctcttaccttatacaaaaatcaactcgaggcctggtgcagcagctcatgcctgaaatcccagcactttgggaggctgaggtgggtggatcatctgaggtcaggagtttgagaccagcctggccaacatgggtgaaaccccatctctactaaaaatacaaaaattagccagaggtgtggtggtgcatgcctgcaatcccagctacttgggaggcttgaagcaggagaatcacttgagcccgggaggcagaagttgcgctgagctgagatggagtactctgaggctgggcaacaaagggagactccgtctcaaaaaaaaaaaaaaatcaactccagatggttcaaagacttaagtctaaaacctgaaaccataaaaattctagaatatcagaaaaacccttctagacattggcttaagcaaagacttcatgacccaagaacccaaaagtaaatgcaacaaaaacaaagataaatagatgggacttaattaaaaagcttctgcacagcaaaagaaacagtcagcagagtaaaaagacaacccatggagtgggagaaaatctttgcaacctatacacccaacaaaagactaacatccaggatctacaaggaactgaaacaaatcagcaagaaaaaaacagtcccatcaaaaagtgctctaaggacatgaatagacaattctcaaaagaagatatacaaatggccaacaaacatattaaaaaatgctcaacatcaccaacgatcacggaaatgcaaatcaaacccacaatgtgataacaccttactcctgtaagaatggccataatcaaaaaatcaaaaaataaaagatgttggcgtggatgtggtgatcaggaacactttacactgctggtgggaatgtaaactagtacaaccactatggaaaacagtgtggagattccttaaagaactaaaagtagcactaccatttgatccagcagtcccactactggatatctacccagaggaaaagaaatcattatatgaaaaagatacttgtaaacgcacgtttatagcagcacaatttgcaactgcaaaactaatggaaccagcccgaatgcccatcaatgagtggataaataaattgaattgtggtatacctgaggtcaggagttcaagactagcctggccaatatggtgaagccccatctctactaaaaatacaaaaactagctgggcgtggtggcgtgtgcctgtaatcccagctacatgggaggctgaggcaggaggacggcttgaactagggaggcagaggttgcagtgagctgagattatgccactgcactccagcctgggagacaacgggagactccatctcaaaaaaaaaaaaaaaaagaaagaaattgtggtatatatacatccagggaatactactcagccataagaaggaacgaaataatggcatttgcagcaactggaataccattattctaagtgaactcactcaggaatggaaaaccaaacatcatacgttctcactcgtacatgggagctaagctatgagaatgcaaaggcgtaagaatgatacaacggactctggggactcagggaaaaggtgggggggcggtgagggataaaagactacacattgggtacggtgtacaccgctcagatgacaggtgcaccaaaatcttagaaatcaccactaaagaacttattcatgtaaccaaccaccacctgttccctaaaaacctcctgaaataacaaataccaaaagtgcaaaaatacccatttcacagcatgagttccagagctgctccagtttagtcaaccagtgtaagtatcatgcatccttgaagattatctatgtagaccaaaacggagcctggtcttgcctagcataaagtctaggatgactaataccagtgttgatcataatcctgaaggacacaatcccaaacaccataaccccaaatgttgaagtcccaaaagatcaaaatccttaaaatcacaacctggacaaaataaaatttcaaattctggggaaaggattagtatgtttttcattgtaaacaagacagttgcatcatgttatacagaagtattaccttgttattgtcttaagtatggtttagacacataagggtgccaagttgccaatgagcagaattgtggacttaattttaggtgtcaattttactggattaaggagtatttagaaacctggtaaagcattatctgggtgtgtctgtgaggttgtttccggggattagtttgtaagtctgagtggactgagtggggaagatctgccttcaatgttggtgggtaccatccaacaggcgggggcccagagagaacaaatacagaaggcaaattggtctctaagaggtaggatagatttttcttcttttttaagattgagttttgctcttgttgcccaggctggagtgcaatggctccatctcagctcacgacaacctccgcctcccgggttcaagctattctctgcctcagcctcccaagtagctgggagtacaggcaagcgccaccacgcctggctaattttgtatttgtagtagagatggggtttctccattttggtcaggctggtcttgagctcccgacctcaggtgatctgcccgcctcagcatcccaaagtgctgggattacaggcatgagccaccatgcccagcctaggacagatttttcttctggtgccttggacattaaaaatttgactccatgaccgcaatgttgactctgtgtgtaagcattatatgtgtgcataaaaatgttgaaagttcctcaataaacgaagagacatctgttttttgtacacgtgcatttgtgaaggataaaatttctcaagacctcgtctctttgggagacaatgcagtggtaacgcaacagtttttgaaccatctcatcaagacttaggttttctgtcacagtattacagatgaccagttatataaagctaggtgcccacaattaccaagcatagtgacaaagcatttatacatttcactttttgacctatttctttatgaatgtttcatctgctcatcaccgttatatccgtgcaactgtcattggtatacctgagtgtttatcttgcaaaaatgttactattccctattttatcgtgcagtggcctatgaaacgttctgttgtgttgtttctcaaataaatacgcttttaaaaatgtaagtaaattttcgaagaatgtttagtatttcttccagaattgtattttgggattttgaccttttgggattgtgattttcagaattttagactttagggattttgatctttggagattacagtattttattcaaaattacggtgttcaggactgtcttttgagattatgtcccaaagccaatcaacatatatttaatttagtaatttattttctctgcactactctctctctgggtaaggcatcactgtactgaccctagaagcactaagtgattactgttgaagaggatagtctattttctgtttggaaaaaaaaaaaaattcaatactaaaattttatattaacaaaaagttttttttttttaatcaaagtacataaaataaaggtggacacaactgtaagtgatcaccaaccaggggatgtttgggatttttagatgcattaaaagagagtatagagaatatccacctgcaagtaagattgtattcttttgcaaccctgcgattttcaaatggcaccccaacacagtctttggtcaggataagggatcctgcaggcctagccttaccgtccacatcaaatataggtggagggatgccatattctccacatttggagctctgtcaggctgctccctttccaccagtcctatccagtgatactgcagacaaagggtgaggcaacaggagacatcataccgatgttgatcaggagaggaagaaggtgcaatcttacttccaggatttcacatttggaagaatgccttgggagtggtgggtagcccaaggctgttcccaggaaaagaagcaggcacagggcccaggactcaggctccattttgacccaacgtttattgtccttttacaacatgtcattttttggtttagaaactgcttgtgattagttttccaacattaactcaaaagcatgtaaaataaatcaacctactctctatataaacatccagcaactgtggcccctacccacctacccaggttggatagggggaagggagggctcgggcagcattgagtcaagtgcagatgctttactgtggcaggtggcagtagtgccttggttcacaccccacacaggtcccctgcactgccccaaactacaacagaaatggcataggcccaaggcccaattccctgttggtaattcactctccgcctaccaaatgaaaatcgcttttattttatcgcttttgttttgtatttttgcaacagaaaccccctgtccagagtcagactgtagctgaactgttcagactggagaatggagcaggctgtgggcgcacccctggtccctctcctgggcaagcgcccccacccccagggaacaaggtccaggcaggccagctcactgcacgctggccaccaccacttagccatacaggtcatcatcattgtcttctgtgtatacactgccacctgtgccgcctccactgccctgactggggccagctccaccctggttccctgaagggaatctgtgtacaagagcaaagccaaaaaagagggttaggacagggcctgtgtaagatttccacaactacccctctagcttccttaggactcccatcccttttggtgtaggtccccaaagtaacttaagcactgtctaatgctcccaaccaacttacctgaagctgccaaagccccgactctgctgaagggtctgggcaaacatctcatacttccgaatgtcattgtcactgacagaacggcgcgcaaagcgcatggcttcttcaaagtgatctcgacggatctcaggcactggatcatcctcttctacctcctatagttggtaaacacagatcactagggctagttaaagcccagcctggatttcatcccaggcctcccattactgcagtttattggtctccttgcccttccaatccaacctgaggtaagatgctaggccatgcttcctaaaattgagtcactgctctgcttaaaaacttgtcaatgcactctggaaaagggaaaactgtagggacagaaatcacatcagtgatggggcttaaggaggggagatgttgactgaagtggctaaggaaactttttgagatagtagaaattttaagtctcaactgtggtagtagttatagaacttacacacacttgtcataaagcatggaaatggtatatagaaagagtgaattttattgtatttatatcataccttaataaaccttaatactttaaaaggaaatgccaatggctttcagtgcttaccacatttggattacatcctacctagcggtctcacttccagtgacatatatactcttaaatctacccagggtttcccaatgattgcaatcctactactagagcacattatttgggctgcttattccctttattcaaattctactctcttcacagcccagctcaaaacctatctcttccattgagaggccaatttctgtgacttatgtgactacctcctaggattagttcatcagtagttgttaagcttttatgggagagagaagggatgtcacagacccttcaaaagggaaagaaagccatttatttgctcattaagtcccatgtttggaacttaatgaattaattaagggtaacacaagacatagtggaaaacaagtgagatgacagagatcttacctttatggaacttacaaacacatgaatttgccttttcattttgggaggtctgtggaccctatcccttccccaaccatcagggataagtatatgagtctcatctcagctcaaaaccttgctctgtggttcacgcctgtaatcccagcactttgggaggccgaggtgggcacatcacaaggtcaggagatcgagaccatcctggctaacgtggtgaaaccacgtttctactaaaaaaaaaatacaaaaaactagccggacatggtggcatgtgcctgtagtcccagctactcgggaggctgaggcaggagaatcgcttgaacctgggaggcagaagttgcagtgagccaagatcgtgccactgcactccagtctgggcaacagagtgagacttcgtctcaaaaaaaaaacaaaaaacaaaaaacaaaaaaaaccttgctgtgtttgctgcactctcatactttgatttccctcatggagcttggttcagactgagaatggagcctgaccatctcttctcggccttattccaaattgaatggattcacctcagcattctttatctttgatgccctattaaaattcttctcagttagatgatctttccaacagcttctactctcaactccagggcatggtggtggctgctgcctggctctccatgattggcacatctggggaaaggatgcagactcaccatggctgatgggtttgtctgcctctctcgttctcgcctaatctcactctcgatggattcacggatggccagcttgcaagcacgctggcaaatctctgtcaggtcagctccagagaagccattagtcattttagccaggaactccaagtccacatcctaaaagcagcagcagaggtaccttagcatttagcctctcctctcgagatacgcagatctttgggctacccgagcactcccaactacagtttgccccttctttggccaccccattttattcctgattctagattatcttgatatcctcaaaaattctaccttccctttagaccaaccctaaccccagtggaatcttgtccagaaactaaagagcactccgtaccagcctgaggactcatgcaagtctcccacagcccatgatcttgcacctgccttggcaactggggacttgcgcaggttagccttgaggatggcaacacgggacttctcatcaggaagtgggatgtagatgagctgatcaagacggccaggtctgaggatggcaggatcaatgatgtcaggccggttggtagcgccaatgatgaacacatttttttttgtggacatgccatccatttctgtcaggatctggttgatgactcggtcagcagccccaccaccatctccaatgttacctccacgagccttggcaatcgaatccagctcatcaaagaatagcacacagggggcagcttggcgggcctgtaggaggaatggattgattcaagcactaacaaaactagatgtctctaggcaaacgtggtggctcacacctgtattcccagcactttgggaggccaaggtgggaggatcacttgaggccagaaatccgaaaccagcatgggcaacatactgagactttgtctctacaaaaaataaaaaattagccagatgtggtgacgcatgcctatagtcccagctactcaggaggctgaagtaggagaattgcttaagcccaggtttcaaggttacagtgagccatgactgtaccactgccctccaacctgggcaacagagccagaccctgtctcgagagagagagagaaaaaaaaaataacactaggtctctcagacctcagaaagaaaatcaagtgacttactgtgcagttgagcagccagcactaagaatatttcaaccctcttaaagaaaaacagcctctattccttgccctcaggcaaatcaatacatagttcagcctattgcagctcaccttgtcaaagatttctctgacattggcctcagactccccaaaccacatggtgagcagctcaggacccttgatggagatgaagttggcctggcattcattagcaatggctttggccaacaaagttttcccacagccaggaggtccatagaacagaactcccttggaaggtgtcatgccaaacttcaggaatttgtctgggtgctccacaggatactaggaggaaaaggaaagagggttcaaggctacctccacattttgaaagaaacctaactaaacagaagcatcccctccattatttcatggtgtacccaatggtatcagatccaggttctctagaagaagactccttagtgcctcaaacctaagaacagtaggttcctaagtcgtgctctcacaactcttgcagcaaatgtgttgacaccctgagatcacccaggtcaattacaatgtactgagacagtgactcaccctggaccaagttgccctacctggaccagctcctgtagctcacgtttgacatcctctaggcccccgatgtcttcccaggttacctgtggcacctctaccacggtttcccgcagtgctgatgggttactctggctcaaggcccactagaaaaggagggaaaactggggatgagacttaccaagggaggggtcaaagcacgtatgtgtgtacctgaggcacgggtgtggtccttacccggaagtcatccatagtaactgctagagagttcatgacctcggcatcaatggtctcatcctctaggtcaatgagatccatcttcttgcggatggcttgcagagcagcctctgagcacagggctgctaagtcagcacccacatgcccgtgagtctcattggctacctgcagagaaagatctacttactatgctgcctcaaagacccagctgctgcaggaggctcagagacaatagaatccttcccctgactgctatccctgggtcctctcatttccttgaatatatactatcaatacctttatgggctgggttttaagtacttaattctggacttgggacctagaaataaggctgctccaacaattctgatttactctaaatgcagcgtcaactatgaaaaatgccaactcccatttcctggattcaatctcagattacttcctttcccctgtccagaaatcaaaacccatctcctcacatcttaaccttatgtctctagccagttcccagcaactgcctagagacactgtaacgcctggtcagccatcatcatcacttcacctgttccaggtccacatcatctgccagcttcatgttcttggtatggatctgaagaatctctaagcgtcctgtagcatcaggaattccaatatctacctccctgtcaaagcgacctgtgggacagtacacaaacagtacacaaacataaacagggctcatctctagtccagaggtaagagacaggcctagggtgaccaaccatctcagccagcacaggattgtcctaatgccagcactaaaaaagtctcaagctctgggaaacctttcagtctcaggaaaaccagggtggttggtcactctagacaggacgtagggtaaaggaaaaagacccctggacccaatcactgtgaagggcttcaagaggattaggtgacttagatgaaggagagaagtaggacctaagcaaggacggggtcaaaagtatctggagtccttaccaaatcgccgtagagctgggtcaatgctgttgggtctgttggttgctgccataacaatcacatgtgccctctgctttaggccatccatgagggtcaacaactgtgatacaatgcgccgctccacctcgccatgagtctgccagaacaggatgtctggtcagaagtgaagtcagggcctttcaacccccctctatcccctcaggtaagctcctactttctctcttttgggagcgatggcatctagctcatcaatgaagatgatggcaggagcattcttctcagcctcctcaaaggctttacgaaggttgctctcagactcaccagccaatttgctcatgatctcaggacctgaaaggatacagaatggagacaataacaaaatgatagtctttcccaattcctcccaaaaatcagttatcttgcttgtttggcccagagacaggtcctgggtgagaaggtggtaacctctgcctacttctcacatcctctaccagccattatcccaggacagccaccaggcaaggctggagagaagcccagggactcactatactcttctcacagttgaactgtaaaggtgacagcaaatgctctaggacctctggctagagcaggagagatggcacaccagatggcacaccactaaacagcattctccaagagccagtgatcaaagttcatttgccccaaaccctctcaaatcactaaccattcaccctttgatttctcattctagcttgctcccgctctgcagtctgtccacaatctttctcaaagggggcaggacagggagcaccaatgtaaaatatcttccctttattgctcttctgtctgtaacataccccagcataagaaatatgctataaacatgaaggagggcatgggtgcaaaaaggatgtgttcataagtgctccagctcataagcccagttcaaaattgggtctagctagacataagatgaaccaaatatcttaccattgatcaagaagaagaaggctccagtctcatttgctacagctcgagcaatcagggtctttcctgttccaggaggtccgtaaagcaggattcctctaggaggctgtggaccaatgcagagtgtgattaggttcccaccttctcccaaaccctaaaatggcttgactagcgctccagagagggtgagaatcaggcttcaaccctgacaatattaagaataagccctccgcagtaaatgctaagaagacaattactttaggccacactcatttctattactagcagggaaaatactgctagaaagtgggcaacatttatgattgcaacttgcataggagactaagggcagagaaactgtagtccaaatgcgtttgaagatacatgactagggaaaggcaagaggccattacactaagggctcaattttagacagaccaagggccaaagactagctaagccatttaagagagcagggtctattttcttcattgccagaggatcactcactccagtaatcatgccctccagaatttatcacactggaatgctgttccttacaatcatcatttttcttcttcaacactaccctttctatggcctcatccacaagcagaacatgtaaactgtccacatagaaaatgaaattatttgtgtgccacccactaggaaaatgagtaacttcatcttcagtgtgttccatggaaacactttcccactaggaaaagattgagaagctacactctagaccagtagttctcaaatgttttagactcagaaccctttaacactctgaaaatttccttaacttccttacgtctactgggtgacattgctctagacaggctggcaaactatggtgagatttgtttttacagggtccattgatacaagaatggcttttatattctaagagttgtaaagaaaaacccatatatatatgtgtgtgtgttttgtgcgcacacgcacacaacagacaatttgattagcctactctggttttagaccatcagctctaatgaatttagagccttaggtaaactaaaggatacgttattgcccctctaatccaaggcaataatgaaagccatgcatgaaaacagtcccaggattagacattgggacaggattagacattggcaccactttagacttgattccagagcccaggatgctcaccttcacaccaattgccttaaagagggcaggatgtctcaggggcagttccaccatctcctttatctgagctagctgcttcctgcagccaccaatgtcatcataccctacttcattcaaggactcttcctcatcctgaatatggaggagataaagaaaggagaaggcaagaatattatatcagcaaaagctgagtttctctaaatcattccactacctagtgtgcaaaaacctaccgtataagaagattctcaacccggcatggtggctcacatctgtaatcccagcactttgggaggcagaggtgggaggaatgcttgagtccaggagttcctgggcaatacagcaagactccatctcattaaaaattaaattaaatttaaaaaagattctcctctaaagggatccggcctcaaagaacaactacaaaaatcccaaggcaaagatttctagcacagtccttgcctctcacattactcgtagtcttactgagaaggggtctctaaaatctgaagctggaaaccctgggaatgggcagaggcctgaagccaccatcagctttacttcaaaaatgatttcaatcacttatatattttgggttcagtctagttttttgaaattcctggcattaggtaaatccgagaaacaattaggcccagaaatgaatagctggcaggtttctcatccctgaaagatggttagttctccaaagaacacccagtctttttcttttttgagacagagtctcactctgtcacccaggctggagtgcagtggcacaatctcagctcactgcaacctccgactcctgggttcaaccgattctcctgcctcagcctcctgagtagctgggattacagatgtgtaccaccatgcctggctaatttttgtatttttagtagagatgggatttcaccatgttgcccaggctggtcttgaacacctgacctcaagtgatctgcccatctcagtctcccaaagtactgggattacaggtgtcagccaccgcagccggccgagcacccagtcctgacagttaccacatgatgccacactgagtaatcataaaatcggatactggaatcagggagaaaactcacctctcgtttgataggctccccttcgcagtggatcactgtgtctggagcaacaatgcaataagggctaggatctgtttccaccactttgaactccacagcacgcatcccaccacggacaagaaaaatgtctcctgcgagagcaaacagtacaagcacagttagaggtgtcaactacaagacaaagtgagaactcatcagaccctggggtcaaaatgccaagctcattagatagtgcccttcattagatattgccctacctctccccaactccaccccacctgtcttaataagcagcaggcaagatgagaaaggtaaactgtgaagagtccctctgacaagaggtcagtgaacaaaacctgacatgtcagaagcccatcaagttctgacttctgccatataggtagcccaagttttcactacaaccaccaatggtagaactgtgcactctggaccctgacccagccaaaatggaccactttctccttcagagatccataaagatagcttactctcctggaacagagaaggggagagatggagcaaaggaaggatggaggaaaaaaagagggtaagacatatgaatatgtgtgcagggtttgcatgtgtgtgtatacaaatatatgaaaatgagtctagcggccgggcacagtggctcacctgaggtcaagagttcgagacgagcctgaccaacatggtgaaaccccgtctctactaaaaacacaaaaattagccgggcgtggtggcagacgcctgtaatcccagctacttgggaggctgaggcaggagaattgcttgaacccaggaggcggaggttgcagtgagccgagattgcaccactgcgctccagcctgggggacagcgcgacactctgtctcaaaaaaaaaagaaaagaaaatgagactaggcttgatggctcatgcctgtaatcccagcactttgggaggccatggcagatggatcacttgagcccagcagtttgagaccagcctgggcatcatagtgagaccctgtctcttttttttttttttgagacagagtcttgctctgtcacccaggctgcagtactgtggcccaatcttggctcactgcaacctccacctcttgggttcaagcaattctcatgcctcagcctcccaggtagctgggattacaggtgcccacgatggggtttcgccatgttggccaggctggtctcaaactcctggcctcaagtgatccacccgcctcagcctcccaaattgctgggattataggtgtgagccacggtgcccagctgaccccatctcttaaaaaatgaataaataaatacaggggaaaagcataaaagatttaaaaaaaaaaaaaagaaaaagaaaatgagataaagatgttccaaggtttattccctacagtcaataatccttaagctcagaattagctctcacctttccggatgggtcgatacgcttccaggaagtacggcttaaggtatacctcgaagagattaccagtaatgccttccactgtgtcatcaatgggcagcacatggatacgtttgccgtacttcacatcagggcatggctggatgctgaggatgacaagcagactccatattaccaaccacacttcgggcccaagcactgggtgtccaaaagggcctggcacagatagctgatagtaagtgaaaaagaaaaggcaggatggctttaggcgaagagaggaaggagaacagggtggaagtgagggcgaaggaacagccccactcactcctaatcagtgagccaaaatcaagagccacacatttagaaaccccacaaagacatgcagggtcttcagggagatatccaaggatgatccccttctagctaatactggtgacccaatattacaagggaaggtcttaagctaacaattgtcagggtcagtgaaacagaagtgaaaaaaacaaaattatctcagccaggtggtcagaacaccttgaggaagtgactaagcactcccaagaagaaagctacatgaaacttagactccattcaaaagaatcaaaagcctgagatgatcctggccaggtgatggttggttgggtaggagtggctagagatgactccaagatggggtaacctcttgcctaaaattatgcaagaacaagcaaaatcactcacattgagagctatcccaggtctggctccaactattcctctctcccgggttaacttaggggcttaaaagacctgctagcagctcaccttccatgcccatacccccacctcattccaaccccaacacaagccatcaattagacatactagtgagagtagtgaggagattatttggcatatacatacacaccctcgagtggtatcctaagccaggatataagtatgataaattacacctctagtaggaaaaaataaagccatcaagaaagttacaggaacgccaatttgtctcaagggacctgcagaaatggattttgaagtcccagggaggcagaaccaaaacctaaagacaaccctgaagcataagtcttcccatgaccaggaggcttcctgcatcgacaggtgccaagaacttggtcctgcctgtaatacatgggtcctgcctgtaatgcaggctatctctggcctcccatccctgtgaagccaaaaaccccacacacacctgatgacatcccctaggcgtacacgaaggttattccgaacaactctattcatccgaatcttctcatcagaacaagtatcatcagaaaggacgatgcaaacagcttctcgtctcttctttcctttcagcaacactgtgtcacctcggaacaactgcaattcatccatcttgggctgaggaaagaaagttaaggcctttgggtcattgggctgacggggagtaagcagcagccctggagattgggattcccagtaaaccccactctatctgcagtcactgcaagaaaaatgagaaaagaaacctgggaaaatccctcaagtaagtgcagtaaggaaagactagtctgtggccacagcttacctgggacaaggacaccacactgttgtcctcattgatggcttcatcaacaattaaccgattgggacggttcttctgtttgagaatggctgttgataggtcatcaccttttgaactagaaggaggaaatggagtcagtagatactcctgccccaagcgcctcgccagtctctaaaactcatacttaggaaagaaacagtgaatagatgaagctgtccctagaccagaaagctcagatgaaggaaaggcagccaaggtcacgaggagcagtatctaccatacatattacaatacccattccagcagctcctggtattttgagcgtcagtgtcccagctataaggccccaagtgagtgatcctgccccagggtcagaaaataatggcctaagaagaagacataatagaaatggaggctgaatagttgttagagaaataaaaatagtcttagacttacagaagagtggttaagagcaggaactctatagtcagacccattgggtctgaattccaattatgccactgcttaattgtgatcttgggcaagttacctaacctctgaactttgatgtcctcctctataaaagaaggaatataatacttatctcagaggcttattgtcttaagggagataatgaatgtaaaatgcttaacataatacctggcacatggtattaatggtcaccatgattaacagtatagagtaaagcataagctaactttccagggaattaagtaagccagacaacctcccttgaggctcagggaggccttaagttctaccaagcaagcctggggacaacgaagcagaatcattggtgctaccctccttataggctaaacctactgatgccagggcattccatagtaccaaaggaatgccaagcataaagaccatcatatttggaaaaaacactaacagacatcaaaccgccagaaagaggctcaaggtcaaaaggaacttcacagtaatatctgcaaaagtacacaattccataaagttggctcaaaaaatcaaaaccaagaaatgctgagacatggggcaaatccaaatccctctcacccaaatcaaagtcgactgggtctacactcagtgttatttcctagaagctaggatcattcaccagacagtgacaccaacttattacctagcccgtttccagctgtcacttactagactcagcaagctccctctccctttttttttttttttttttttttttgagatggagtttcgcttttgttgtccaggctggaatgcaatgctgcgatctcagctaactgcaacctccacctcccgggttcaagtgattctcctgcctcagcctcccgagtagctgggattacaggcatgcgccaccacaactggctaattttgcatttttactagagatggggtttcaccatggtggtcaggctggtctcgaactcctgacctcaggtgatctgcccacctcggcctcccaaagtactgggattacaggcgtgagccacagcacccagcgctctctcttttttaagagcggcctcgtgttagtaaggctcaggaaaacataagcattaaccaaagtaggaaggccagacaatgaaggaagcaaagaaaataaatttttaaaacgaatttcttcattcaacaaattcatgagtctctattatgtaccaggcattgttctaagggctggggatactgaagtcaacaaaacaagacaaaatagtattcccattggaaatatcctcacaatttgcaagagacaaagaaaaatgctgtgctcagctaggaagccatggggttcttacatctttgggtcctgatacacccaagagaaaaacaaaccccattcatctaacaaaatggtaggccttctgctaaccctcacacataggctgcatttttaaccactgcctctaaactagtttctaacgacagtttcctctgctcaaatttgcttcccccattccacaagtctgccactccaggcacaatgctgctgagtaggcagactcttccaatgcttatcaacacactagaggccaagcatgctcaatgtgacagttgagagcaatgtaaacccacgagctctcccactcctgtcccatcaaaatactcttccagggactgcccatcttcttgcttgacttatagaactgggactggagaaaaataaaacgccagatgcctctagtcaccatagttttttattttttgaaacggagtctccctctgttgcccaggctggagtgcagtggcgcgatctccctcactgcaatctctgcctccctgggttcaagtgattctcctgtctcagcctccagagtggctgggactacaggtgtgcaccatcaccatgcctggctactttttgcattttaatagagatggggtttctccatgttgcccgggctggtctcaaactcctgacctcaagtgatctgcctgcctcggcctcccaaaatgctgggattacaggcctgagccactgtgcccggtcaatagtttgtattttaatctcaaagctgtatcctaggaaaacctccattctgcctaccatcccggactctggctctggagatgagtggtatgcccttttcttaaggtaaagcctctaattccccatctacctactgagatcagatgtggtaatctctaaaagactgaatttggcctgaccatgggccaacagcagttctggacactctttggggcaatcctccattgtcttctgtataagtcaatccctttccagaactgcacaggggactccacgggacttggaagggtttcagctaagagtcatcaaggtgaccaagaggttagaaacagctgatgatgccaggttccaagaattttagatttttacttttgaaaataagaggctgactgcatataaaccaaaagaatactttcagaataagtgactcttttaaataagcaactgagtaatactttatccgaattcagaaacttgagaaaaaggaacacacctcaaaaaactaatctcttcaaggaaggaaggtaatttgcatagagtttccttgggctggctgtgttttttttttttttttttttttgcctctaaaagctctctattctaaattgaatgggctgaggtagccaagttttatctaacgctttcctaaggatggaggtggggtcagaaagccccagagcccgggtaatttctcaatatagctggttggggaaaggagtgcgcgcacgtttgtgtttttgaagagttagtgcaactctaaactgcacaccacgaaacctggaaatctggaaaggcgcacaaaacacgaactgagattccaactttagcaagaacctaaaatgttaaagaaaaattcctttctccccacccacgagtcataacattaaggaaaactggctcaaactttctagtatgaacaacaggcctaaagtaagaagaccagaagcgaaaggtagggctcgccctctccctaacagtccttcacgactcaggtcacacacagaggatgcccacctccggccccgccgacccggctccaaaaaggcggctgtgagcttccctgagctcggcgggccttccccgaccccgggctccgcctcggtggcagagctcctgaggccttcacatggcgcaaagtccacgcccaccgggcccggctggggcctcgggctcgcggggcctgctctctccggggaccaaaggctttcggcgggtggtaggccggacggcagactggcgccccaaagccccggggcgccgccccggcggagtgggccggaagacctggccaggcccagacgtccgttctaagggagccaatcgggcgggccggggcctgcatgacacagcacgatccggcccaggctccgacccggacccaacgcaagccccgcctagggggcgcgcgggtgcgcagctggccccagccgggcctgccgggtccacggcccctcactcgccccctagcttcccttccctctttcctggtctccacctctctgacgcgcccacggccaggccccgccgggcctaccctgcgcggctggtcccggtgcgcgccgccgcagcaagcgaacggcgcgcgcacactcactcggctccagaagccatggcgcgcgcctctcccggccggcggctgtggcggcccgcgggtaacggctacgagcggtggcaagcgaccgactgggccggggctcggctcttccaggcggtgggcgagcagcggcgacaaacccgcaagcggcttccctctcgcttcctcccaccggcagcgaggcgtcgggcgaacaacgctggctcctgatccgcgaggtggcagtggcagtggcagcggcagcggcagcgacgactcaaacgacggtcgcagacgcttcgctgagactgagccgagaagagccgaatcatcggaagggaagctgctcccacctcagccaatcagcgcctgccctgcggactctcgcccgcctctccgcgcctctccccagcaacccgcagatcacagccaatcaggaaattcgcttgcggcctggctcccgcctcagtgatgcgacacgcctagtaacgccacgtcaattggccgcaacgctacgcttcctcgacggattggaattctcagccaatcaacgaaaggaatagggcgagatcgattagtgaaaggagaccctttaatcccttagaggcggactctcccacttggctccagttcattggctccggagtttatcctcctggaagaacgtggcacaatagactgaacccttgtattagtctagtcctattgtggtaacccatacacccatcttctcccaaaacctggagatcttctaagacgccatcaccaccctgacacttcttgctccttctcaacgctgcctccaaccacccctactctgaactttctgactagcaccccactcctaccccattgtcactgcaccctctggtaaccccaatcccacagcctttgcagtttctcagcgcttgtgcctttcttcctcccgtcattaatattaataccttataataaggcactcaaatccagagaagtcaaagggcaaccacagaacacacagccaattcagtagaacccaaattagcaagaaaactgcatatgctgggacttgaaaatccttgggccccaaataacaggggtccctgttagtagtcaacaggcagctgttggtgatatgctgactcaattcacctttcaccctgtacccacacagacacatttgactaagacgagtcgaatttctagaatttggaattaggaagggagtgaagagttactctgagagaaacctgcctgtctctaagtaacaggtacctgcccttgtcctgagaggcctatctagaccacccttcagacccaactccactcattgtcactgtcctgggctttggggctctgcattcaggcaatgtgaaggactaaagccactgcctccaaagtgaggattcctgtagccctttcctcatacccagacttcaagttcataaggtagacgatgtcaggaaagggcatcatagacaactagcactcaactagacggtcacaagccttcccacgcaagtatatgtagtaggcagacgagataaatatgaaattttactcgacaacagaaaaggagaaacaggaaaaaaggtgcctcgagcaaagtcaatgacttggtggtggcagagattgtttcctccaaaacgagaatggtagtaactagggcaaatttcacaggcctaccaccaatctcaccagtccaggaattatataggaatggtcacattcctaatgatggtgaagcagaaagccctccccacagagagacagcccactggggacccagctcaagctcttcaaaacgtggcagctacaggtcacaagactttggcagagatgtccgaaattcttcaaggaaggcgtcacgatcagagggacggatccagctcaaatagctttctaggtacagggggagagacctggagagaaagaaggatgatgcctaagggtgaaagattggcagaaagctgggcagccatacccccgctttcagtgttcaccacccacaataggtccaaggactctaggacaccaactgcccctcagccccaagccagcaggcctgagcctcaccacagagcatcttcatgtgaccccttagtttgggcctccagcctccaccagagtgcagtggcctcatccctccgatctagcctcttcagagtctgaagcaggtgaaagtaagtgtctcgattacctgtagccccagcccagagtacagagtcttagaacttgacatagtcttaggcattgttttataaaaagggaaactgaggcctagagagaggaagtatcttgcctacactcacatatggaagcgggggcagatcattcacaaccattcccatcccagtgtccatcatctgccccctactcctgtgcaacccacaacagcagagtcatggtctttgtgtctgaggatatcggggaaaccagggaactcttgggagccctgcatacacactgtgtatatttgaacacctggatatatccctaggtatatatagcacaaccccaatcacccctcctgtctgagaacaccactcttacacttacgcccaagtatttcccatgggcctctctgtccttgcacatctatgcatagccgacgtcatgcaagtacacatacctgggcacatctgcacactgaggaggaagtcctgtaaggctttggtatcctggccgctggctacccattccagtccacgactaattagggcggctgcccgaagctgctgcagtgccgcatctgacttacatccctgctcacagttgaaagctgcccctggggaccactcccaaagtcaagaagtgtcttcccagcctcacagtcaccaaaaccccaaatcctcctctatttcttcttgtgtccacagtccctttctcttaagtctcctggtgggctgggacacattaaagggaacccacttccaccactaccacttccaggaggtaagaggaaaactgaaagtttagatcaccttgttctttttcctcaggtgtggcccggaagagcagctcgaggcacctgaagtaggacacagaacaggggtgaagaggaatcaatttcagaaactctagggtaagtaggtgaacatggagctcaccaactcaggtcccaatcagaaaatcatccctccacaccccctctaggaccccgggctcacctgctaaattcactaattgccactttttgggcacccagttgaacccaggcctggccctgaagcaggtgggtggcagagacccagagtgggcagtatggcagttccttggttccttttctggcatcttcccacagccgggacatcttgggtagcagagatgatgtgcggctgagcaactcctcacatagagtcaaggcatcttgggctctgcctgcctggatcagtgctaccgctgcctccaaaaacacctcaggcatacagggccctggaggggaggggggtggggagaactggagtgggaagaagaagcagtgtcttgaaaggcatgagccaccatccccaacctcttcaccaggctctggtaccatgcagagtcctgggcccccagactggacagacagaatagaggaaaaaacaaaaaattgcagtcttgctgtatttcaaaggggacaccaacccgtctaccccattgcagagaagcttgaagacacacccacccttggctccgagctatccagcaacagggccagcaggtccaagtaatgctctgcagcgtctcctgccctgaggagtaaaagcccataagcctcaccctaggccctagcagggaacctgcaagggtcctgagaatgttctctcttagctaacagatggatgttcatgggccctgaggaggagaaagggagggaaggtcttagggctccaattttggctcagtatggatctaccccagttacagaatggactggggaagagacttcagagtgtcaaagatagagaaggttaatgtcttagagaagagtcctcagttcaggtctagaagcaaggtaagaggctgaggagtggcgacctatgtcctgccactgcctcattcatcccccaagtcacaagaacaaaagcagagtcacaccccaggggaggcatcagaagtgggaagagaagctcaggtgagcaaggggaacctcacctccccgtctgtaggcacctgcttgctagtatgtgcttggtctggctctgagtgccacaatgaaggggtgaggctaggtcaggtggtggcagtagtaattctacctcaatgagaaactgcggggctttggaactgcatgggacattcaaggcctaaaagagaaagaaaaaaattgtatctataatctttgggagccatacttccttatacttggatcttgactagtcaagtcaccccatcacaagcacctcaggaatcctccaccccacatcttcacctggcagttccctacctcaactagcagctccagactctccagctctgctgttgtgtcccccagttgctgatagagcctagaggcctccagaagtggaggaccccaggctgatccctctttcagggctgcaaccaagtacaacagtgctctctgtggatttccctaaagggataggaggacacgggcctcagctacccttacaaagcaaaaagctatacataatgcttgtggtttccccaatccaccctaggactgtctttaccatcttacggtgacaggaccccagtgctgtgtacacctggaccaacacaggccgtggacacaggcctgaggccgcttcatgaaggctgcttagtgccttgtctgggttccctgtgatcagctcctggagacctgaggacagtcagggtgtgagcttggagagggctatagagcaggggtcatgatggggaacaagggtctaagaagcccatggaactgaatgggacaagagagagggcatgagtctggaggaccacttaaaggtagaagagatgagtcaggttgctagctgaccttggcggtaggcaaatgctgtcaggaggacatccttcaatccctgggcatcctgcagggtcaatggagcatctaattcctcagctgggggactccaagttttcagaagtaacagcagatccttagaggctccactctggggaaagaaggacaaccagaagctccaagcctacaacctccccgtcttctcctatctccatctatcctggctagaccttgagctcaagggtcctcttgatccttgaggacacaggcctcagctacccttacaaagcaagaagctatgcataatgcctgtagtttcccccaattctaagagatagatagctatgaggcaagaattaaaaaaaaggaagaaaaacctggggcagtgatgatctattccagcgtgcctcctcactcagggcaaggaccatatttgagttactaataaggagactaaggctgagagctgacttgagcaagatcacaagagccctatccctatccaaaaaaaaattttttttttttttgagacagggtctccctctgtcacccaggctgcagggctggagtgcagtggcgtgatcatagctcacaactcactgttgcctccacctcttgggttcaagtgatcctcctacctcagcctcccaaagtgctgagattacaggtatgagccaccatgcctgtccaatttttaaaaaacactcctaagagaatccccacaatgagagaccaaccagggcaaggtcacccaagagtcccagagagaatccaggttttccgaccaccaacccagccgcctgtccagtacatgatgatgctactgcagctggagagaaaggaggaggaaggaaggaggagaccctcagcttcaggtcactttccctattacctggctgccattcagggtctctagtaacaaggccaggtccccaagacggtcagcactcaaccagagggcagcctgcaggccaaccaggcggtgcagggcagacagcagctccggcagaaggcaggaagcacgaaggacagagtcccacagctccctgagcccctgttccaacctgggcccctgctgctcctgtgtctccagcactgtagagtatacacacacacatagacacacacacagctgaagtagcacctcatcctccatctccccacacactctggctttcctctcctgcaggaccccaaaggtcacaataataatacctcaacctggtctgaagagcacagagaagggcacctctctccatggaggtgacagatgttgtttatcctcccatctccctgcaataacttaaacccagactgaagatggcaggggaatcagggacaatctctggccctcacctctctctaggctccgctggatatcctgggcctgatcctctgtgaaaccctgggccaagcttgccctcaggataatgaagttgcaggtgacagtcagctccaagggaagaacaggaacagctgcagggagccctggagcaacaatgttggtcttacagactgctcccccatggaagatcctccaaataaaatcccaactcagagatcaccccactccaaccaaaacagctacaataaagaacccaccctccagccaattagctaaggatttaaaaaaagaacccaacctttggacagagagtctggaaagggcaaaaaagttatccagatcagaccatcttggaaaccatttttcaaatgccactctgtgagtgtgtaaggaagagagggatttgcctgtacaaagatgattccactccagtctcctctgtgccttaaacaggactccctgccccgagtaattatatcgatcccaaaaacgcaggagcggatgtttctctggctatggaagaggggaactgaccatcctggggaggacccgcctaccttgcagactatggaggagccctctgagcccttccagtgcatcctgagccaactgctgtcgcctcagagtcagaccggagttctgagccacctgccacatgagggaggggttgtcactgaggatcaatccttttttctccccttgcagcagtggcaagggatgcattctccagtcatttctggctctttggtcaagctcagtccctccccatctgttggggtaaatccactgcaaacccgctttcagggatcttgaggctgcaaaccgagggtgccagcaaccgtgttaccttggcctgtcgaacgagccggtcattcttttccctccacaggtccaggcagctggagcccacagaggtggtctggcgggacatggtggccgaggctgggcccggagaccagaagcggacttaggaagggtgaagctggcctgcccaagctcccaaccccagcggggaggggcctgggcacttctgcaccccgccgagctcccctgcttctctcggggtcccaatccacccgcccaggctttccaggacagatgggacgctctctccccgcggcccgccgggctctcaacctcgcctctggttggccgggtctgcgaagctctgggctgcggttggtcctcttgaagagttagttcccgcgggaaactcggggaggaaacgagtcagcaaccccaaacaggcttaggcgggctagaagccggggtcgtgtctgactggggcagtcgcacggccggcggtgcggcccgctcggctctcgcggaggccacagcctcgagaaagggtgggcgggagcgagtttcggccccacagtccgtggctcggcccttcctcgctgccacacccccaggtcctcctgggttcccgcttccaccgagggccgactgcgaggtgcatgctgggagtcgtagtaccgcaccggggcggaacagctccgccccggcggatggtgtttccagaaagcggtaactggagacgagggcgctccgtaatcgtccatcctttctctgctcactgtcgagcaccaacacgctcaccaaggtcggctttctaccgcgtgtagtctgctggcagtgccgctctgtacttgcactgctcaaaagtacctgcccaatcatttcaaattaaatggagctaggagaattgaatatccatatgcaaaaaaaaaaaaaaaaaaaagacaggaaagaaaagaacgcgaccatacatacgtacataaaatcaactcaatggatcacaaactaaatataagagccaaaaatataaaacttctaaaagaaaacgtaaagcagcctaactaacatggtgaaaccttctctacaaaaatacaaaaattagcagggcgtggtgtcgtgcgcctgtaatcccagctaccccggaggctgaggcggaagaatcgcttgaacccgggtggcggaggttgcagtgagccgacatcgtgccattgcactccagcctgggtgacagagtgagactccgtctcaaaaaaaaaaaaaaaagaaaacgtaagagaacagctttatgaccttgggtttggcaacaagttgttagacacagcactaaaagcttgtacaatttaaaaaaaagttaactttattaaaattaaaaactcttgtactacaaagacatcattaagaagtcatacgctggggccgggcgccgtggctcacgcctgcgatcccagcactttgggagaccgaggcgggcggatcacgaggtcaggagatcgagaccatcatggctaacacggtgaaaccccgtctctactaaaaatacaaaaaattagccgggcgatgtggcgggcgcctgtagtcccagctactcgggaggctgaggcaggagaaaggcgtgaaccccgcgggccagagcctgcagtgagccgagatcgccccactgcactccagcctgcgcaacagcgagactccatctcaaaaaaaaaaaaaaagaaaagaaaagaaaagaagaaaaatcataggctggatgtggctcatgctgtaatcccagcactttgggaggctgaggctggaggattccctgaagccaggagttcaagaccagcctaggcaacaaagatggtgtcttttgtagagacattatctctacaaaaaatttaaaacattaaccctggcacaataacacacctgtagacccagctacttgggaggctgaggtgggaggagcccttgagcctaggagttccaggttgcagtgagccatgatcacaccactgccctccagcctgagtaacagagtgagaccctgcctcaaaaaaagaaaggtcacagtcacagagtgggagaaactacttgctaattatatacctcataagggactggtatccctaacacataaaaactcccaaaactcaagaaaaagatttttaaaaacaatcttagctgggtgtggtggttcatgcctgttatcccagcactttgggaggctgaggtgggaggatcatttgagcctcagaagtttaagacctgcctgggcaacatagcaaaaccccacctctacaaaaaaaatacaaaaattagctgggcatggtggcacacacctgtagtcccatctactcgggaaacttaggtgggaggatcacctgagctcagggatgtcgaagctgcagtgagccatgattgagccactgcactccagcgtgggcaacaaagtgagaccctgtctcaaaacaaaacaaaaaacaattttaagatggaccaaaaaaaaaaaaaaagacattttaccaaaaaagatctactaatggctaagaaacacataaaaagatgctcggcattattagctattagagaaacacagttaaaaacatggccagggccgggccatgttatgcctgtaatcccagcactttgggaggctgaggtggatggatcacttgaggtcaggagttcaagaccagcatggccaacttggtgaaacctcgtctctactaaaaatacaaaaattaggcaggcatggtggtgcatgcctgtaatcccagctacctgggaagctgaggtgggagaatggcttgaacccggaaggtggaggttgcagtgagccgagatcctgccactgaactctagcctaggtgacacagcgagacttcgtctcaaaaaataaaaaaacgcttcacacagccgggcgtggtggctcacacctttaatcccagcactttgggaggctgaggcaggtggatcacttgaggccaggagtttgagaccagccaagccaacagggcaaaaccctgtctctactgcaaatacaaaaattagctgggcatggtggcagacacctgtaatcccagctactcaggaggctgaggcatgacaatcacttgaacctgggaaacggaggttgcagtgagctgagaccatgccactgcactccagcctgggtgacagagtgagactctgtctcaaaaataaataaataaaaataaaaacactatacacatacatacataaaatgactacaataaaaacagattataccaagtgttggtgaggatgtgtatgaggaaccctcatacactgctggtgggaatataaaatagtacactcacttcagaaaagtttggcagtttcttaaaaagttaatcataggccgggcgcagtggcttattcctgtaatcccagcactttgggaggccaaggcaggtgaatcacgatgtcagtagatcgagaccatcctggctaacacagtgaaaccccgtctctactaaaaatacaaaaaattagccaggcgtggtggcgggcacctgtagtcccagctactcaagaggctgaggcaggagaatggcgtgaacccaggaagtggagcttgcagtgagccaagaccccgccactgcactccagcctgggtgacagagcaagactccatctcaaaaaaaaaaaaagaaaaaaaagtcaatcacaaatttaccataagactcagcaattccactccaaagaatactcccaagagaaatgaaaacatacgtccacactgagatttgttgcaaatactcatagtagctaaaaatgttcataatggctaaaaactgaaaacaatcaaaatgtccatcagttggtcaaagccaatgatttagcaatgaaaaggggcaaaagagtgcaccaacaaactttttttttttgagacggagtctcgctctgttgcccgggctggagtgcagtggcgcaatctcggctcactgcactccagcctgggcgacagaacaagactgtctcaaaaaaaaaaaaaaaaaaaaaaaagattgaaaacaggccaggctcatgcctgtaatcccagcactttgggggactgaggtgggcggatcaccagagggcaggagaccagcctggctaacatagtgaaaccccatctccactaaaaatacaaaaaattagccggacgtggtggcacatgcctatagtcccagctacttgggaggctgaggcaggagaaccacttgaacccaggaggcagaggctgcagtgagcagagatcacgccactgcactccggcctgggcaacagagtgaaactccatctctaaataaataaataaataaataaataaataaaagaccgaaaacagatcattggcctggggtaggattagggagtcaatgtagggaattttggggggatgatagaaatgttctaaaattaagttgtggcattttgcaataatttatttcatatgacaccaaaagcataagcaatgaaagaaaaaaacaggatgaactggactttctcaaaattaagaatttttgtgtaggccaggcgcggtggctcatgcctgtaatcccagcactttgggaggccaaggcgggcggatcataaggtcaagagattgagaccatcctgtccaacatggtgaaaccccgtctctactaaaaatacaaaaattagctgggcgtggtgatgcacgcctgtagtcccagctactcaggaggctgaggcaggagaatcacttgaacccaggaggcggaggttgcagtgagcccagatagtgccactgtactccagcctggcgacagagcaagactccgtctcaaaaaaaaaaaaaaaaaaaaaagaatgtttgtgcattaaaggatattatcaagaaaatgaaaagacaacccacagagtggagaaaatatttgtaagtcatatatcatttgtaaatcatatatcatatcatatcatatatctgttcagggacctgtatctagcatgtaaaaagaatgctagccaggcacagtggcttacacctgtaatcccagcactttgggaggctgaagcaggaggattgcctgagcccaggagttcaagaccagcctaggcaacatagtggggccctgtctctacaataaaataaaaaattagtcggccatggtggtgcacacctgtagtcccagttactcaggaagctgagacaggaggactgcttgaacccaggaagctgtggcttcagtgagccatgatcacgccactgcattatagcctgggtgacagagcaagaccctggtccaaaaataataataataacaataatccaattaaaaatagtcgaagaatctgaagggacatttctccagtaagcacaagaaaagatgctcagctcagcatcattaatcattaaggaaatgcacaccaaaaccacaatgagatattacttcacacccactaggatggttagaatcaaagacagatgacaacaagtgttgacatggatgtggagaaatcgttacccatatatacttctggtaagactgtaaaacgatacagcaactttggaaaacaaactggcagttccttaaaagattaaacagagttaccttatgacccagcagttgctcagtgtacagctaggtatacactcaagagaaattaaaacatatgtccaaacaaaaacttatacacaaatgtttatagcagcattacataataaccaaaatgtgtaaatccaaatggctatcaatggatgaatggataaacaaaatgtggtatatccatgcaatagagtattatttggccataaagaggaatgaagtaccaatacatgctacaacatagatgaactctgaaaacattaggctgagtaaaggaagataagacagaaaaaggcactactgtatgagcccatttatatgaaatgtccagaacaggcaaatctatagagacagaaaacaaattagtggtaccaggagttaagggggagaagagaaggaatgactgcttaagggtacagggtttctttttggggtaatgaaaacattctggaattgataatgatgataattgtacaacgttgtgaatgtactaacggccactaaattatacactttaaaatggtgaattttatatgaattttacttcaattttaaaaaagaaaaagaatgaagtactgctgtgtgctgctatatagatgaaaccggaaaacattatactaactggaagatgccagtcacaaaagaccacatattattatgatcccatttctgtgaaatatccaaaatgggcaaatatatagagaaacagcagattagtgctagccaggggttggggaggattggagggtgatatctaaacagtagattttcttttggggttggtgaaaatgttctaaaattgattctggtgatggttgtacaattctgtaaatacacaaaaaccattaaatcttacaccttacgtgggtaaattttatggtaaattgcatttcaataaagcttttttaaaaaagaatcagggctgggtgcaatggctcacacctgcaatcccaacacttgaggaggtcgaggcaggaggatggcttgaggccaggagttcaagaccagcctaggcaagacagcaagacccccacctctacaaaaaattaaaggaaaaaaaaaaagaatcattgagttagtgtggaatggactctgatttcaaggaaaagggagggataagataatttttctttttaaaagagagaggatctatgttgcccaggctggagtgcagtggctattcacaggtgcattcattgtgcactacagcctctaactcctgggctcaagtgatccacctcagcctctacatagctgggaccatgcctggctaatttttttatttttgtagagacggagtcttgctatcctcaagtgatcctcccacctctgcctcccaagtagctgggactatagggacatgccacagtgcctggctagaaataatttttaatagcgtaaatcaatgtactaatgtctttatctaatagaatcttatagatacaccaggagaaagaatagacagtggttggcagatcagcaaattagccttaggctccaggcaaggaggctactgcaaaaagtgcagggtacctggctgagaagtggaggaactagggcctaaaatccttccatgggtgctagggatggaggaaaggtttttgttttggtttttttcccctttctcaaaaagacaccatttgctcaccgaactatgcttgggagttgtgtccaccagacttggggagaagcgtttttctaattcatcttacaggccagctggggccaacttcacccccttgcattattaaacctctttctaccatggttaacaacctatcccttttttttttttttttttttttgagagagagtctggctctgtctcccaggctggagtgcagtagcgtgatcttggctcactgtaacctctgcctcccaggttcaagcgattctcctgcctcagcctcctgagtagccggaattacaggtgcacaccaccacacctggctaatttttgtatttttagtagagatggggttttgccatgttggccaggctggtctcaaactcctgacctcaggtgatccacccgccttggctccccaaagtgctgagattacaggcatgaggcaccacacccagctgaaccatacttttcatcatcttactatttggcatctgtaacactagggaccactggccattaataatctgaacttagccaggtgctgtggctcacacctgtaatcctagtgctttgagaggccaaggtggaaggatcgcttgaggccaggagttcacgaacagcctgggcaatgtagcaagactctgtctgtacagaaatttaaaaattagccaggcatggtcccagatactgaggaggctgagatggatcacttgagcccaggagtttgaaactacagggagctatgattgcaccactgccctccagcctggacaatagagcaaaaatatgtctttaaaatgatagtaacaataaaaataatttcaattcttcccttagctacctaccacagcagtgaacgtttatacttcacaaccactactactcagcttctctactttatgccagctaaaagtaggtgctatcccatggttttaacatctgttctgtttttcagtggtatcagctcctcttgttctaggtactgtcaaacctcaaatcccagtcctgatgcttctctccagggcctcttcccaactcttttgatggacatctctaggaggatttcatgccagcatttcaaacatgacaggagtgctggggtgaacggagggcacaaaacatacacatgagaaaagaaccagtggattcacacaattttggcttcaagtcaggaataatgaatgggacaaggtggaatgctacataagatgggcatgtagatctgataaagagtggcacaggttgggaaacaagggaggcttccacagaagggaagggcaaagggtgttctatagtgaaaaggcccagtggagcgggggcatagcactatttggggcttcagacagttaaagtcggtgctgcatgatgcctgggcttgtcttctcagtcttctctctttatcagacaaagaacaggaacttaacaaaatgtgttgcatggcaaaggaaaatagcggtgggataataggattgatttgggaagaggtggaggcagtgaattcagacaactccaaccacttcataaaggttctcaggtgcagccaggctttcctaagatgactgatctcatctgtgcctggtggcaggagagactgatcctcctcacaacccctatagaacagtggggctcccccacatctcagacacacataattatattatcattttattacacttttttttaaatagtagagacggggtcttgttatgttccacaggctggtcttgaactcctgggaccaagcaatcctcccacctctgcctcccaaagtgctgggattataggtgcaagtcaccacgcccggcctattttattccacttcggagaccgccccccttgtccctcagatgcatccaaatcaggagttagggatcatactccactgtggtcctgaattatagaataatgaagtcctagatgtcagcggcccctggctgcatgatagtaagagtatggctgagcctgtcttgcagatcatccagtacctgtacaggccaggctacactgttctccagcactctctgtagccaagtgccagtaatcacagactaggctacctctgctgggccagaaatagctgcctgaaccaggagctcacagcaccatccactctcatcaccaaagctatgcccaggagaagtcccacgctgctcacaatgaagcccacagcctcaaatatgaacctgcaaagaaaggcggagaatctcaggcaacagagtaggtctactgccttttccctgtagaggcaaaaccttggccatcctggatgtttaggatcttcatactttgttccaagtttctccctccccaccacctctacttctcaagcaaatctactcacttaggggcaaacactttccagaccatgagatgcctgcgaaggatggaggctgccaaggcacaggccagaatctagaggaggagaggaggggccacgttacttgtgaaggagaggaggaagcggagcaaaaggagagtttctataggcccctgtaaaaaatggaagcaggagaatagtgcatgtcagtggaaaaaatattgcatgtcctgggctaggagttaggagacctacttcctgccctgccccaagcactgactcactatgtgactttgggcaagtcagtatccatctgcaatgctaacactcaggctgtgcccccaggatggaggaagatatcagtgccacatctgcctctggaggaaaggaagaggatccatgaccacagtttgggaagaaaatcctggctatcacctcagtttttccagtctgtccactgatagagtaatcctcaaatgcaactagcggggtccagatctaggttgtagaggggaaatgatccaggactaggattaaggagacccaggttcaagtctcagaactgccatttgaggccactgggcttgggcaaccacttcacttatgtgaaactcagtcaaggctctctcccacggttttgaaggtctgaaagaaagtgatgcacacacagagaaaaaacaccaactccctgatctctctcctacacccacctgaataccaaggataaagaggtacttgaggcccagctgcagcagtgctgcatagaagtgctgaggcgcatcccggagccgcatctccatcagtggctcctcttcctcctcgggtctgactctggcatcagcttcattccctgggggctgctgtctcttccgcagcccttgactctcacacaggaaaggccagagcaggagcagtgggcaacctactgcctcaagagagggtatggctggaatcaacaggccaccctggctggctcaggttccaattagcctaggccaaggggtgccaaagatccaacaaacccatatctctccattcaaatccaggggtttcctttctttccacaaagccagagtaaacaatggaagcaagtgaaggaggagggggtacctgcaaagaggaggtgggaggcaaaggtgttggctcccactagcaaagcaggcagccaagtacaggagccatgaccctctgggaatcccacgaaggctgcatgccaatggatggctggaaagacaggctggtggcctgtggagtagaaggtctgtgtggccatgagggcccaagccgagactgcctgccatggcacagtaaaaggacctggaagaaaagatatgccacgttacagtcacttcttattccctaatccataggctactgctccacaatcatatactcctactacttcagtatcaattctcatacacactcacatgcctatcagcccaacctccttacagtcaacattctgttattctaattctctctgtggtacaaaagcgccatcaggcttatctgaatcctgctatggccaatctctttctttctctcaaacacatacagctcagtgccattatatattcacaatttactacttccatcactggaaaatcaagaaatgtgctcatgaggatgcagcatttccacagggagtcttagaggactccttgtctctcctctccatgaaccctgggaaccaacaggagggatcaatttgcttggctatggcaggtaagagagaggacaccaagaagaccttcctagttgtgtggggcatgggaccctctgtcaagctcaggaacatgaggagcaacacctccttgaaaacaagaggggccgaactcacatcactattgtctttaagtgaatcagagctgagatatttaccaggggtggtgacgggtatcccagcagcaagcagatgtaggagaaggaagctctgcagaaacagaagcaggaacacaaggctgatgcgctccgcatgcaacagcagaagtgggaaggccaacagggtgagggctgtgaccatagcagctgagtagacactccccaactgataagcagccacagtcaggggaccctgagatttggtcctctctaaccggccccggaactcctcctgcatgtgtcggtagatttgagggaccacataatccaagtcagcttgagaagtgggggggcctgagaagggagtgaggacagtcctggtccttggagcgcctgccccagccttcaccagcactgtcacaggcttccagagcagcagcgcgagccctgaagcagccagccctgctacagcccgaggcagcaccatggatgccccagagaccaggacccggagacgggggggagcctcatctgcccccgacgccaatgcccagtaggcagcagtacccaatgccattaggggcagtccccagcgcacaaagagcatgggtggctcggggctcttgagattaccatagcggcgaagccacaagcgcacggcagctaacagggccaccagcgccgccacacaagctccataccacaaattcttggctcgaccacccaccatggatgccagaggactcagccagggagaggagtggcaaacaggtgtctcttcagggcaacgatgaaaaagcccagctagccttgtacataaaagcaacccaattccaagcctcagggcatatgcaccattgtgccgtggggggtttgttgtggctgaagtgccaaggcggggcattgtgagtagcttaggtggaagcagctggccctcccagtgaagctggacaaccaggagcaggatgaatgagcccaaaaggaagggggtggccctggcctcagctacaacaaaactatcagagaagaacacagccaagcgaaacagcaggagtaacaggacgggcccagggatgggaaacagggttgccaggggcctcttggacccccagccagcccaggctttccacagaaaagggaggaatgagctcactgcagccacagcccctagaagcactagatctagcttcagctcaatagttcccaggagtccagcatacgctatggccccaaccaggccccaggccacaggtgtcaggagtagagggcagaatggaaagcctggggatattgcccactgagatgccagcaggcagataaagcaggaagcagccaagagagcagtaccccccgccatgcggaccagagagaaacgagcccaagactcgatgcacatggcccgagctccccgcaggaactgctgcagctcagcaatcacagtcggcagtgtcgcctcagcccccttggggctctggagaagccactggtagtcagcagaggccttggagaagaggttctgcagctgatgaagctccttagcttgaaggtcctgagtagcagctgagtaggtatgaagaaatcgggacacctggcagagaaaaggtcagaggccaaggggaacaggtcagagacataaattggggcagaggcaagaataggtattacaaaagggggtacctggaagtcaaggacccaaactctgtccagaatcggggaagggagggataacggaagagggataggtatggaaggtgggactaagactagtcaaaggacaaaagagtggttcattatgcttctttcatgcccaccctagctctgtcacctggaaacccagcccgctcacctacctgctgagcattgagatggagagctgaggcttgggctaaagcagaggagtggggctgggagtcctcaccccctgagaatagctcagccatcacttccccgatattcccaaatgggatgggcaggcccagcagcagggccagcgtgggcacaaggctaacttgaggaatcacctctggctcctaaaggaaaatgacagtggtcaacagattcatcacaaagctgaagtcaatgtttgggatggcagacataggggcctaggtaagaaatgagagtggaggatacccaggatcatggatttgggggcctaaaatagaggtattcatgaggatgctgtaatggtaacatgggctgattactgggagaacagatgaggaacatcccaggcctcacctctggtggggtgctggggaagactgctgtggggctatacagaaagagagcagctgagacctccagctcactgtcccctccatggtctccatttgtggtcatcccatggtccccagccactaccagcagtgtgtcattctccagacgctccacaagtcccctgggggccaataaatgtgtcaggagtagaaacggataaatatttttctcaaaaagaaaaaagatttttctccaggggcctattcatccccagctataactccattagtaaggcctagacctttggcaaagagacatgtcttcggccatgatcctgatgcccaaagctacacattgagttaatcaagatggatggagcctctagcttcagcagaaggcctagagaagacagaattcagccaggaaagaagctctaagataagagcttcttcgagattctcagacacaaacccactcccccagccaataccccacactcactggatcacctggtccatctggctaagtttcttggccatttcagggtggtgagggccatgcttgtggccacagtggtccacacccaggaagtgagcaatcagcacgtcccattcaccactgtccactgtgaaggggagaacactgagcacagaagactaagacccactcctcaaccccagccaggctttgacactcctctatgtccagggatacaagcccaggctgttacacccataggtggctcagaatttgtggactaaagcagttctccccagctcccagtcttagaactaagtgctctggccccatgctcactggtggggtagaggtgttccaggatgccattgtccactgtgtctaggtctctgacattgaaggatgggaagaagaaagctttggagaaagcaccagggaaaaggtctttccaggtatcatctcccatgaagactacacgccttcctgcagggacatgaaagagaagtcagagcctgagcaaacgtcagggttaggagaaaagaggaaaagaggccctttaaagacccatcagaagtcccaaccatgcaacctaaagtacagcaattccatacagcaatccttatccttcagggcctaacattttccaccaggaagctttccctgataaccgtactccacccagacctcacacttatccttcctacaaaatgctctcctagttctgtctctgggtatctctactgagttgtttttcctgggtgtatcctgcttcttcccagtcagtgaatgaacagggcctgtatttctctgctttcttctccacacttgcaagccaagatccacatcttctcttcttcccttctcccttttactgagaggtctccaagaataaaacttacactccattcagattagaagcttcataggaacaaagcccagatcccttctcctctgtctcccaaactgagctccctaccagcagggccctggcctctttcttctcctctgtcccccaaactgagctccctaccagcagggccctggcctctttcttctcctctgtccccctacaccataatcaagtgtgcatctgggcacccaaaggtctgactccctgacttcaaattttgaagaaatttgccaaggtacttctggccttcaaagtggcccacactgacctgcactggtgagctgcttaatgagattgtcttccactatggcgtggctggcgaagttactaccagcatcaataaaggtaggcagtgagccagtggtgagggccttgaggcgctgcatggtggtggtaggagggtcaacctgagatcggtagagccgggcatggtggggctgaatctccaggatcctctgcaaggagcttagtttgcccaggaagggtagggagacaggaggctctctaggcacgtgtgaatgctggggctgggcgaagtcaaatcgcagagcatctatcagcaccaacacaacccgcgaaaatcgggaagccatccagcaggccccaggtttcccttggctcccccatggcagggacccagggcctgggggctcttggcagctgctatggttggtgagctccaaacgggtgagcaggaagccactggtgaagagggcaatgccagcgtagaagaggaagcagacccaggccaggaagagcaacactgaggctttctgcatcctgataggggtggggaagtaaattcattactgtggggcaaagaaccagtggatattctggtccctgaatacaagcccagctagaatcacttcctcccggaaaccttcctggagataaaccatttcacagccaacccctcgcaatattactctcctcctatttccaggctgggcatggtggctcacgcctgtaatcccagcactttgggaggccgaggcgggcggatcacctgaggtgaggagttcgagaccagcctggccaaaatggcgaaaccccgtccctactaaaaatacaaaaatgggtggcgggcacctgtagtctcagctactggggaggctgacgcaggagaatcgcttgaatcggggaggcggaggttgcagtgagccgagattgaaccactgcactagagtctggacaacagagggagacgccgtttcatgaggtcccaccccagatctactgaatcaggatcttcgaggggtagagcataggaacgttcacatgtacaggcaggaaatgctaatgctgcctgtacatgtgaacagtcaggagggaaacttattccaattggtagtcaggctctcttacacgccgtttctgcgcctctcccctcgccaatctcaatacccagtggaaagggatcgaagccgcaggggaatccgggcccagccgacggcgccgcctggcgggcaccgaggggacgaaggggaggagtcactctccgcttccgggcggccaggttcgccaggagacctgaggcacgaccttcgccacgcaaggaggctggggcccgggtcgagagtcgactgggcctccgctgggacccaggcgtgcgaccggctctgcctcctccggtaactacccagcctcccgctgggcaccctagccgcggtactgagcaccttggttaggagctgaggggaagagggagactcccttacttcagggtgaggggaataccggggggtgaggttctcgggagaccctggctcacctgcaatggcacccggaagtgcggcggcggcggcgcctgcgacctggcagcacagagatgcgtgcgccagacagagtggcccgtcggtggctccatcgccatctgccggcacctcggtggaagtttggccaggagcgtggggctggccccagtttgatgggatatttagtaattgaaaattggggacaggggaccaagctggaggaagagttcagggaaccactgtccattcatggttacgactaagagcacggctgctggagtcaaacttgacttgaatcctagcttggccgcacatattgtcatcattaggcattacctcatctgtaaaatggagataatacttattttcccttttttgcttagctgagtccaactgagatttcattactcctcctttcaaagcctgtaactaaatcttacgactgaataattaagcaaataatccttcggagtggaggaggggaggctgggcccagtggttcacacctgtaatcccagcactttgggaggtcaaggcaggtggatcacctaaggtcaggagttcaagaccagcccggccaatatgacgaaacgccgtctctactgaaaatacaaaagttacccgggagtggtggcgggcgcctgtgatcccagatacctgggaggctgaggcaggagaatcactcgaacccaggaggcggaggttgcagtgagccgagattgcaccactgcactccagcctgggcaacagagcaagactccctctcaaaaaaaaaaaaaaaaaatgccaggcacgatgactcacacctgtaagcccagcactttgggaggctgaggctggagaatcagttgaagtcaggaattggagaccagcctggccaacatgctgaaaccccaactctactaaaaattacaaaatttagccaggcgtggcgatgtgtacctgtagtcccagctactgaggaggctgagactggagaattgcttgaagccaggaggcagaggctacagtgagctgagatcgtgctactgcactccagcctaggcgacagagcgagactctgtctcaaaaagaaacaaaacccgtccactggtttctcatctcagagtaaaagttcttgcattggctctacatggccctgcacactatctgcctcttccccttctgattcatctagctgccacttctttgcttccctaactctgttccatccacagcagttctgcctcaggacctttgcatttgccatctcctctgtcagcttcagttcccgatgccgaaatggatctccatcaccttcatattgaagctcaactgtaacatcagcaaggcttcctgcaatcccctactttactagttcagcacctcccaccaccacaccccctggaaaaatttcccctcacttccttaatttcttccatagcacaactcatcagcatctgaaattctacacgtatttatggtttataccctccgagtagaatgtgagctcattgaggtcagggaattctgttttcttcattatgatatcctcagcacctagcatatatttgaggttcacatactgaccaaacgaataaaggaatatgttaatttttaaaaaaagttgagttattctcccaccttcatccccatagccccttatctcagttcagacctcatcccttctccaggatcactgaggcagccttctcactgtcctcccagcctcctgtgtctccctactatcccttctccacattgcagcaagacagctctaactaaaacattaatgtgattactgttatttttttcttttttgtagagatagggtcttaccatgttgcccaggctggtcaactcctgggctcaagtgatcctcccacctcagcctcccaaagtgctgggatcacaggtatgagtcactgtgcctggccaatgtgatgttttatcttaaaattcttcatgggaagggaaaaaaacccttcataggccgggcacagtggctcacgcctgtaatcccagcactttgggaggctcaggcgggcagatcacgaggtctggagttcgagatcagcctgaccaacatggtgaaaccctgtctctacaaaaaacaaaaaaattagccaggtatggtggcgcatgcctgtaatcccagctactaaggaggctgaggcaggagaattgcttgaacccgggaggcggaggttgcagtgagccgagatcatgccattgcactccagcctggacaacagagggagacgctgtctcaaacaaacaaacaaaaaatccctattaccctagggataatgtccaaccccttcaacaagaatctcattccttgtgacttggcccttgccatgtagtcacatcccccttaacactatacccttcagccaacttctctcaagcagtgagcctttgtttattctagtccaggacctgacttggtgaaaacttgctaacttttccagcctgagttcagtggcaatcagcaacgctgctactcataagctgatatgctcttcccaccaagatccctcagccagaactttcctctaccacagcatttatcacttttttttttttttttaaacagagcgtctcactgttgccaggctggagtgcaatggcgtgatcacggctcactgcagcctccacctcccaggttcatgcaattctcctgcctcagcctcccaagcaactgggactacccgcacatgctaccacgcccagctagtttttgtatttttagtagacggggtttcaccatattggccaggatggtctcaatctcctgacctcatgatctgcacacctcggcctcccaaagtgctgggattacaggtgttgagccaccacgcccggccacatttatcactttctatcactgtctgcttcctgtctgttttccctacctgaccttgtattctgtgaaagcagggaccactgggtttcaggtatttttgtaatccagtgtctagtaatgagcttggcacttggtagacattcaatgtttttgaataaatgaatgaggagcaccctcagtccctgaaaaccctttaagtatgccagtgcagggtagtagtttctcatgaaagtacttctttcccacgaaaaaacccccaaacacctgcctcaaacacacagccccacacttagcaggaaggggacttcacttcccagccagcagttcagtgaacatatggtttaacacttccaccctatcccacagtttctcttgaagacaaaaatgatagtttcactttacaagaagttcactcttattcatggaggcatcatgctgacaggactggatccaaggaaaatgctagtgactttcccaacttcattccccaatcaaagaggacagtttctggtttgccactggtgagtttattacacgactaaagttcaaataaaaaaataaaaaccaaaatcttggcagggaagctagagccagaatcaggaaaatctgcttccttgtccccagactccctggccaagcccagctccactaactcatcttgactcgatcaagttcctcatcaagacttgcatctgtaccctggacatctctgctgctcccactggagagtgagtctggagtccctggcactggggctttggtgagggctccatatacacccatggcctgaggagaggaacagagagaataccatgaggacacttgacagaggtgcagcccagcctaccaatggctaaacgggaaaagatggcatgggggccagtaagttggttttcctttctccctctctcaaacctgtcttgtaagctctggagttgattttaggaatcttgcaaaccatcagagtaaagtgactctcagaataccagcacaagtatctaccaaaaaaaggtatctcaagaacttccatatttgcaggactgagtggagatgtttcattcttagattccatctctacaaagaacgaagggaggtctagggccaaggcactctgaagacctttatggtatgtaagtgttgatgacggtggtggggtctcagtttggtccctggcaccagtgctctgtgctgggtcctcagagagctctaacctgagccaccatgctggtgacatcgccagggttggagggcagtaggatagtgttggagtccttggccagtttggagaacgcgctgacatactgctcggccacagtcagtgaagctgctgcatctccattctgtgatcacagggggataaaaatcagagatcaccgatacggagaagaagggggggatggggaatgaagaaagcagttcacaataaaaaggaccatgtaatctggctcaacagagcccacagaggcggaactctcctcaagcgtagataagagaaccccttccactgtcaattcctgtccccattcccacccaggggcctctcacatgttgtgtcagagctgcagccaggattcgaatagcttcagctttagccttggccttcgccagaactgcactggcctctcctgcaagagaagggacagagcttgcttgacccatgaagtcaaagtaccccaaagatcctgccccagcaccaatcttcaaaggcccatgccttgctcctccctcagcctctaccctctcctgacctgctgcctgatttatctgttcagccttttctgcttcggaggccaggatctgggcctgtttcttcccttctgccacattgatggccgactctcgggtcccctcagactctagaactgtggcccgtttccgccgctctgcctccacctggaagcccacaacaatcccaatcaacaagccaagggagactgatacagacatgcaactctacccatcataacaggagggaagtctggatcctcctggtactggagccctgaggcccttttcccacccctccttggcccccacctgcatctgcatagactctttcacccggggtggcacatggatatccttgatctcataacggaggcagcggataccccagcagtcagcagcttggttgatggcatccacaatgctggcattcagggactcccgttcctggaaaaagaggtgtaagccccacagcctcaacctacctatcaagggcctacactgagaagggcctgggactgatcttgaccttcagaaaagattaagagtgtcaggtttgtgtcttcaaaccctaactctggctcagatctgcttacccggaagactttgtccagagagagtttgccgagctctgatctcatggttgtttgagctagctgggtgacggcatactcagggtcctccacaccgtagcttgcctgagatggacacggatagtgtaagaagcttgggcacaagattttagtgaagagggcaactgaaaaggctggataaagtaggggacaggtaccttgtaagggtccatgatgcgcaggtaaaggactccatcgatttgcagagttacattgtctgtagaaccaggagagaaaacggggaaagtcaggcctctaggtcccaaccagttctttctactaagctctggatctacagcaaccacatcctaatagcctcagagcacccatgtcaccctgaacccctcaccgagagtcacagccgactgctcaggcacgttgatgacaatttccttgagactctgcacatatcggatccggtctaacacagggatgaggatgttcaaaccctggaaagaggagtcatgggtcctcagaaggctgggaactattgggttgggacctaagctagtcctggagtatgtagggagtcaacacatggaacatgcccagaaaagcagcagctcctaccaagaaataagtcctcagaaggctgaggtgtcactggtaagaaaacccaagagaacaggaatgcaagactaggcccctgaatggaggggagagtcatgagaatcggagccagcagaatagccatctctatgcagactgagaggtagggctgagagtgggcaggggagattcccaagaatggggcctgtgagatgcataggaaaaggtggtaacatggggatgatggtcagcagcctgggccctgtcaggtctggcctacagagtcgggagctaacagtgcgggcaggcccaaaggaagtcctcccgacattgcatgtcgtgagggattggtcatctggctggcccagggtgggcagaagaggtttctcacaggctccaggatccggtggaatcggcccattcgctccaccacccaggcctcctgctgcggcacgaacagtaccacggtgtttcggggcaatccagaggaggcgcggcgcggagcgcggccagaagccagtagagagccctgaaggaaagaagagggtgagcagagatcccatctggccagacacgccgcccctcggtcctgaaggcatctccataaaccacgaccctcaggatcctcggagaatcacatggggaccatgacctctgaccccagtcctctccaaaagttggaatttcgctcttttccagcggagaacccaggtaatctctgtcctgaccctctggaaaggttgcctcgctctcaccctcagcaaaagggccccagtgccccgcgccgcgcgcgccagcatttcccaccgccgcagcgacctccggaaccaacgagacgagcggagcggtcgctcccagaagcctacccgagcctttcctcttgcagttccgctcccccggatgtacttccggcagctccctcccccgcttcaacactcacccaatcagcgttacttggtcgaacggcgcgtcaagttgttccctgggaaacgcagaccttctagagaagggcgaaggctgtggttgttctgggtttagctgttcacgccgaagatccccggcctgatggccaaaatggaggctatttttcgcgggcattatcactcagacaccacgcactgaattattcgtcctcacccgagactcagtttgcccaccagagcgtagtatcgcccccatctgtcaccatagcgactagtggattggagctgactcgttgccatggttgccatagtgatattctctggtagtcccgctgtgttgtgcccaggactcccactggggactgaccccaatcccgttgccatggaaactgggcctaatattgcctggcgattgggccgagattttcccctcccctctttcctcaaagacactgcagctccttccctgtcttcccaagcaaggtttgttatgcccggtcttaaatagagtccagcaaacagcctcaacgttcaaccttgtctggagcatgtcaccttgcccacatccctaatgctctggtagtcaagagacctccgtagtcacctccattttacatatgagggcactgaagttctgaggggctaaagtcattaatagaaccagtattagaatcctgatctacaattcagagttcagcttctacggctgaactttacccaccaacccctccgaaaggagaaaaaccaggccccaggaatcagcagggactagcctaagacctcatgggcccaggcctgttgcctctctggtagaaagggctgagtcccagctccaggaaggccctccatcccccttcacaccctctccccaacaacaacaacaacaacaaaagtagagcttagttcaagtttccaaacaagaatttattctttcttttttaatctttttttctaaaaaaaagtaccaggtacaattttttcctgtttttgatttgctttgttttttcaagtttcagcaaatgcttgttcccctcagcccagccccaggagttaggactgaggctgggtcagagtctggagtggggaatggggtagtttggaaccacatgactgagtttgaggggtgcccctcaccccagctgaggtaggtgggtcagagtctggccaggtgagaggaggcaccccagtgcttggccctgactctgccccctggacaccttcttcagtcaggaccccaaaacaaggagacacaggtaggaggagagggacaactggagtctggagccctaggtgaggggtggttaacccctgtgtgtgtgcatacatgcacactcacacacacataccacacaaagacaagcttgtgcacacacacatacgcataacttggctttcagagataggtcagagggtaggggaagtgaagggactggggaaggacaggggaagctgagtctttggctactgactcagtccctctggaatagcccctcttccctcagctgagggaaagcagttctcctcctgcccccaccgcataagcctcttcaactcctgaggttggagcaatatctgagagtgggaagcggggaggagtgatgccaattatcaggtgtgggaggttaccaaggcaatccaatttgaataaattataaattaaaaataaataaaataacaagtggcccctgcccaggacagggaggcaacgctggcataacttgcctgggaacttgagaaaatctcagggtagctccagttcctccctactacctaagctggcctgggaaacccaagggaggggacaggcacatggagtacccgaagtagggcagggtgtagtaagaatcagaagctttaaacacccaaataatccatttgggcgtgagcatggtgagggctttaattcaagcctgaagggtctcttgctgtctctccatatatgttctctaagatggagcaggatgggcaggtcattagcccgcatgggttcagagtgctggcaatcagggcaaaggtgaataacgtggattatgaggggcctcggtcacagcctgcagttcgtaggggagccctgtgtccagctccaggctccggcgggaaaaaagcaggcggatatctccatgcaggcttaagcggcctgagcgggagctccggaacctggaggaggacaatgtgatcaacgtaagaatccaggctgggttcagtggctcatgcctgtaattccagtgctttgggagacccaggtgggaggactgcttgagcccaggagttggagaccagcctaagcaacatagcgagaccccatctctaaaaataaatgaatacatacatatatatgtacatacatacataaaaatttaaaaataaactaagcaagaatccggacagtatcgaagcaaggagagatcctcttcagggaggggatacctgggcctccccagccatccctgggccctctcctcacctgaggtgcagcaagtagcagaggaggcggtgggtggggttagcatttccctcctcacccacaggcaccaaaaagaggcgatggcgcaggaaggtcatgtgggcagcaggcatgtccgagaagtcaaaggtcacaaggaacatctttaccacagtctggttggggttaaataaggtctagggacaggacagtcaaggttggtagggcctgagggctgctttcctctctccccactcccactccctcagggcaaactcaccacttggacggtgcccaccttgggcacgctgtaacccttcctccccaaggggttcagatccacgatgccctggaaggccagggagccatcagtcaaggtggggactaggaaaaccctgggccctaaacacatgtccctctccacaagctctcaccctgaacctgcccctgccctacagtagagttctcctcacctggccctgactcacttctaggtgaggaataagtaagaaatacctcttgccccctggccccgcccccaaatcctcatcctcttgatgagctgactttggggttggagtcaaggcataccaggaagggagccggggcattttgctcagaaacatcaaagaatgtgacagtgacaggcagcgtgacgtgctgggggcagtatgacccactagctccaatttctgctgtgaagccctcaatgtggccagatggtgcaaaacgtcctcgcagcaatgattcctgggattagggtagggaaaacacatgaagagagagatgccaattcttttccttatccatccaagccacattccaccatcccacctctcccaggaccccggcaatcacaaaccccaacgggagctacctcaaagttgcccagcagggtacggctgacagcaggggtaggaacaggggaggcactgggggggctcagcaggcctggccccttccggaggcttcgaagggggctcctggtagaggaagggaaacacagggggttggcttgaggtattctgggattcctgcttatgcccttggactccaccctctgccactatgtagggcttctgccctggggtcccctactcggatgctggaaagagtacagacttctgcccccattctcagggacagggtagaggaaaaagctggtcacttacagcttcaggcgacgggctcctttcagcctccgccccatgggaccgcagtctgttgggtcctacggagagaaatgattgggaaaagacacagggtgaaggccatgtatgttttggggcagaagctcatcacaaactctcaaaggaacaccctgccccccaggcctccacctttacccacacaaatatccacttaagagtacatgaaggacaggcgcagtggcttgagcgcctgtaatcacaacactttagaaggccaaggtgggtcgatgatttgagctcaggagttcgagaccagcttgggcaacatggcgaaaccccatttctaccaaaaataccaaaaattagctgggtgcaatgtcatgtgcctgtggtcccagatacttgggaggctgaggttggaggatcccttgagcctgggaggaggaggttgcagtcagctgagattgtgccactgcactccagcagtgatggagtgagatc

SEQ ID NO: 59833 - DNA, 3347 bp, Homo Sapiens
gcagcctcagtcccgccgccgcccgctgcgtccgcccagcgccagctccgcgtcccgaccggcccgcggcagcctgcgccgcgccatggccacctccccgcagaagtcgccttctgtccccaagtctcccactcccaagtcgcccccgtcccgcaagaaagatgattccttcttggggaaactcggagggaccctggcccggaggaagaaagccaaggaggtgtccgagctgcaggaggagggaatgaacgccatcaacctgcccctcagcccaattccctttgagctggaccccgaggacacgatgctggaggagaatgaggtgcgaacaatggtggatccaaactcacgcagtgaccccaagcttcaagaactgatgaaggtattaattgactggattaatgatgtgttggttggagaaagaatcattgtgaaagacctagctgaagatttgtatgatggacaagtcctgcagaagcttttcggtaggagagttgagtgctgcaatggatgtgtgtttaattgcaggtggttggatcacctacttgtagctagaaggagttattctcagtttacagtggcttacctggaaatggattacaaatgtgtggagcatggaataacagctcagtgaaggctttagatgtcctcttggaatgtttcatatgaatgaattgtagagggagtctccatgactaggtgggcctgctccttctagcagccaagaatcatcagctagatgaaaagaccccactgtatattaataactagaaagcacgcctccgcctctccagaaaagcatgcctgtgtggcctctgtcggtatatttacatgcatgggcctgagtatgcatttttagacctctgtcaccttcagatgcatgtgtgtgtgttcctctgtcatctgtggacttgtgtgtgtgtgtattcctccctgggtcactttgcagctgttcatgtgaaaatgtaaggacaatggggagagaaaggagaattcaggggtaatgttagtgttgaaaggacaaatttcagcttgaatggagttaaggtgtcccccactgctcctaatctaactgtggcccaaaccgtcccctcagattctcgacttcaatccttagctgccctctgggcacctctacctgaatctgctttagactgaattcatccacttttctaaagctgtttcatcccctctgagttcatagaatcctctcccttcctcctctgcccccatgtatacagggatcagcaagacccatttctacctctcctgaatacatcctctgccattttgacttctctgaactattgaaaaaacttccaaactcacttctttgcttcccatctcacctcctccaacctattccctacacagctagcagaggaaacttttaaaatcacaagtccagtcttgcctgcacttatttataactcttagtgcctctctcctgctggacaaagtccaaaccccttggcacaacattcaaagcattccatcatccgatgacccccagctgtctccttggtctcacccacacatgtggctcatccgtgtagtaatacgtgtaaagtgcttaggatagtgcctgacacatagtagatgctcgataaatgtctgtcatcattggttttactattttttttacataccattgctgcatttttatatatgccacacatattaacatgcctgtacctttgatcatgctagtccttctgcctctaaggcctgccttcctcctttacccaccaggggaaaccattattgctcatccttctgatctctagaattaatcaaattaatcaaatgtgcctccctattatagcctttacagtactgtcacttttttttttttcttgagacagattctcgctgtcacccaggctggagtgctgtggcgtgatcttggcttattgcagtctcggcctccagggttcaagtgaccctcctgccttagcctcctgagtagctgggactacagggcatgtaccatcatgcccagctaatttttgtatttttttctggagacggggttttgccatgttgcccaggctggtctcaaactcctgggctcaagcaacccgcctcagcctcccaaagtactgtgattacagcagtgagccactgcgcctggccctatagtcacatttagaaaagatagtcatatacttttttttgtgttcctccccacacacacacaaatgtttctctctctgagggactatatatacacttgcacatatgtgcatatatgtataggtgtgtagatataaacgtgtacacacatatctgtatacatacatgtaagtatatatacatgccttattataagactttccatgtcatctgtagctgtttaggtaaatgtgtataggcttcccaagggcacgagccatgtcctatatatttatccaggcttctccagcaccatcaggttgtctagcatatgttgcctagcacttaatcaatgtatattgaggctgggcgcagtggcttatgcctgtaatcccagcattttgggaggccgaggcaggcagatcacctgaggtcaggagtttgggagcagcctggtcaacatggtgaaaccctgtctctactaagaatgcaaaaattagccgggcatggtggcgggtgcctgtaatcccagctactcgggacgctgaggcgggagaatcacttgaacctgggaggcagaggttgcagagagcggagatcacgccattgcactctagcatgggggacagagcaagactccctctcaaaaaaaaaaaaaaaaaaagtgtattgaatgaatgaatggctaatgtaatttctaggaagttaaactgatttggttctcagacatcagtattaatgagtgttaatatttaaaggcttgtaaactccaactgaatacagagaggaaatgaaaaagcttcggcacatgaagacatggctaagccgggagcctcaccacgcatctgtcccagtgactacagcttttaactcctccagcagacatctagtcaggatctgaaactgccaaaatgttctatgctaggctgtcaaagcaaggtagaacatggccacagagtaatggaacatggttgtggaggaatcttgcctccaggaatggttacaaaaccatccagcatcacatctatgcaaccccacgttaggcattgcgtacaagcagattagatcatttcacatttcacccttcatgctgaaaaggtgattcactatggaggtgatgcttcttttgtgaacttaagtttagaccctaatctcaaaggtctgaggcagggcatacacattcaaagcccataatgggtaggatactcaggtggagggaaccagtttgcggt

SEQ ID NO: 59834 - DNA, 441 bp, Homo Sapiens
tttttttttttttttttaaagagtgggttgtgttcatttttaaaagggcttcacataaaaggaatgtggggctagtatgacatttctttcagtacattatgtggctggcctcttttacttaatcaattctgcaacaacttactaagaagacaggagaaaatgagccccgagtgttacaaggagcaaaagaattgccaaacctttctaatagtgaaccccagcatcgcttgtcaaaccttgtccccataagaacaccccagaagccacagcctaatgtaatgggctggagcagcagctattttacggagagaagcacccctgggctatgtaactggccacttcatattaacagctaagtgacctatagatacactacactctacagcctcaacccacaggtaaaaggcattttcctcccatttgtggccctcgtgccgaatt

SEQ ID NO: 59835 - DNA, 473 bp, Homo Sapiens
  misc_feature (4)..(4): n is a, c, g, or t
  misc_feature (215)..(215): n is a, c, g, or t
  misc_feature (241)..(241): n is a, c, g, or t
  misc_feature (258)..(258): n is a, c, g, or t
  misc_feature (307)..(307): n is a, c, g, or t
  misc_feature (359)..(359): n is a, c, g, or t
  misc_feature (389)..(389): n is a, c, g, or t
  misc_feature (448)..(448): n is a, c, g, or t
  misc_feature (468)..(468): n is a, c, g, or t
tttnaaaaatttcaggtgacactatagtttgaagctagtttacaaacagaactcctgaaactgatttaggtaatctcttaatctgagtaactcaaaaaattaacacaagcctgatactaatatcgccctggacatcctgacagtgctcttccctactttcctcagtatctaaaatgtctctccaaaagaaatgtcacaacaggagcaacacacantccaaaacaacactgtccacataagncgttaaggctcaaggantgagggtctgacttttaaacggcccttttcggatcaactccgccggggnctgaggaggggcccccaaaaagggcaaaaccctttaggtttccctatggggnctttcttctccatttcgggaaggtttactngggcggccacggggggatgcggaggagggccgggggatcctggggggggagggggaggnacccggggggagggcagggnggaca

SEQ ID NO: 59836 - DNA, 1354 bp, Homo Sapiens
cagtaacatctttaaactgcatagtgttaatttaaagaatcagaacatcatcttttttttttaatatattgcttttcatttcattgccaatgaagttgaataaggatatttattttctgaacatcagaagatttgcagacaaatgatttgagtaaaatctgagcaagttagaaaatgtttatttcttagttttttcagaagaagttttgttttgttttgttttcttttgtttgagacaaggtcttactgtgttgcccaggttggagtgcactgacgcaatctcagctcactgcaacctccgcctcctgggttcaagcgattctcctgtctcagcctcccctagtggctgggattacaggcacctgccaccgcacctggctaagttatctgtagatgacatttcacctgaaggaagttggtggtaacccttacccataaccaaacttaggatttttagatatgggaaaagcaagtatgatgacttacaaagctctgccttaaagggtaatacattggtttaatcaggtttactccacaacagggaattcaggtagcttagttttatatcttctttgagtctaatgacagtcttttgagttgaggagttagtagcattttttttccagccaaaattcccagttgatctttcttcttaattctccagtgttcactagatttgaaattctgccctgcttgcccatggtgctttgtcttatggtagtctcattctccaaaatcatttatcttgaacctcagtgtgacttgtctttccagatctctgcctttgtctgatctctgaaacaccaaagctcttcctttcctttcaaactttccttgtgaccagagtcacaaacgttgctgtgctctgagatggttggttggaaaccagcccaagctgcatttggcacagtatacaccagtgaagacaggttgccaggatgaagccataggctgtctcacagttacagatgaacagcttcctgcccccaggttccccttctactgatgtaactaaggtctctaacccagaactccctaggcaatccactatagcaccattaccgatggttgatggacatgccaaggtattgacctcttaagccagtagtggctggttagagcttggcaaaggagcagccccctcagtttatctcagtgtgccatacaaataatattttctctggatgttacagtgtgaaaaagggtgggaagtagtgccctgttgagccatattagagccccaggcaaaagaaaaaaatgtgcattcctgtatattttttcttctttaatggctaagtttttttccagaatattaaagtagttgaaaaaatagtgaaaaaaaaaaaaaaaaaaa

SEQ ID NO: 59837 - DNA, 566 bp, Homo Sapiens
ttttttctgctcagcggttgaaattaaaaattgtaaatttattttacagttatatttgacatgttgttatttgaacagtgtatataaatccaaaatgtctgataagttaccaggttgagccacttaaagtagctgccattctatttggacccataaaaatggcaattttataatacagtgcgttatctaaaaacaggtcacatatacttatttatcagttgaattttgtaaaaaacagaaccatttttttaagactagtttcttgtctttcatagctttcctggatttcccgaatactttcaagggggaatattatagtaagtttttgctatcaggagattttccagacagaaagcatggtataatccactctcaagaagaactgaaaaaatttggcctaaaagggcgggataactaatggtcacatttttaaagaatttcttggatgaagaaaaaggaagcacaccactagctctcacaatgggagcccttaagtcaggaaagacattctccaagtaccatttgaaacttttgcacttcagtttctttcgcagctcccttttgct

SEQ ID NO: 59838 - DNA, 2405 bp, Homo Sapiens
ggcctttttttttttttttttgacatatgttggttcaacttgtatatactattttgtaaactgtttttcccaattaacaatatacacagatgtcttcattttacacacccctctcctacacaccctcagacaaaaggcaaacctattcaagtttttgatttttgaaaatgtttcaatcagggaagctctgggtacatttcatgaagagaagtgatgaagatatccctctgacataacagaaagtggctgtttagctaggaaaatcatcaaataagtaagtagaaatgcatgcagaaacagaatgagtcaatcccaattaatgtttctgtgtttcctaaaagaaaataaacaccgcacatttgtctttagacagcttagtgtgcaccatggttccagtgtttttgctggaagtgtaaagttgttagcacaggcatatttctcagttagcagaaaacagctgctactggaattagtacccagaaatgaagttatttcctcccatcatcttactgaattgctctgctttacaaacaagaagtgaacattaattacttggaaaataggcctgacccagccaggatgaggctgacgcgtggaaagaggtaaaaataaaatgacaaagctctcttcacttcctatgctagtgtctgaaaacagagctgctcagaccattatggtcatttcaaagttttcattcaataaatagttttttagacacctactgtgccctacagggacatatatttttggcatacaatcaataactacaaccgtggtaagaaattaaggtacatgctgaacacttaccactgcagagagatcttatcgccagaattttagcaatcaagactattggcttttggccttccaaacagataaaaggtaacaattttttgaaaaactgagtacctaaactgccagatacattatatgaattctattatttaatttttgcaatgactctatgagttaggtactgttcccaaacccatttcataaatgaggtaaccaaggatcaggaaggtgaagtaaactaacctatgttttacaaaaaataaaaggcaaagctgaattctgaacaaatctcttctcacttatcacactgtttccctgtcaagccaagccctaggaaaacttacaaagtcagtcaaaatatagctttactgttttgccttttctggttcttactgcccttaaatggccagttccctcatcttccctccagatgcacgttccaaattccaaacttattactctgtggccacaactaaagctctcacatcccctgtgtgatccttcagacagggaaaaagataagtagtgattatctaactgaagtaattcattctagggtagatggctgaattcccttaaccctcccaaccattttactaatttttttgtcaaacatttatcactgtatctcccaatcattttaataaagggactcatttccagttggcagaatgtatgtatatgtgagaaagaaatatttgaaaatggagatctccaagaaaatgttttttattgcagcaaggaatcggttaccttacttttgagaggatgttccactcaaatcaacattaaacaatcaatgctacaatgcaaatagtaaaaaaagcttactggggctcctgctaagacgtggcgctgaggttactgcacccaatgaatgtgctagatagtcatccacgcaggcatttctgcaaatatgtattaagtacctactatttgatagtatatagagtttgggccaatacaggaagaatttttaaattcacatttcctattaatttcagtagccactttacgtcatgctatccaacaagggtacataaaactaaaaccttcagacttggaatatttgtataaaatgcattaatttgatagtaaaacatctgagctatggcatatgtttttttcttttttttagacggagtctcgctctgttgcccagactggagtacagtggtgtgatcttggcttactgcaacctccacctcctgggttcagacgattcttgtgcctcagccttccgagtagctgagattacaggcatgagccatcacatctggctaattttttgtattattagtagaggtaggttttcaccatgttggccaggctgatcttgaactccttacctcaggtgatccacccacctcggcctcccaaagtgctggggttacaggcatgagccacacacccaggcaaaagattcttgatgtatctaaaatggtatactgcatgacaacattttggccaaagataagaccacatgtattttgggagtcccataatattataacagaactcagggtgatgggtgtagcaaactaccatgacacatgtatacctgtgtaacaaacctgcacattgtgcacatgtatcccataacttaaagc

SEQ ID NO: 59839 - DNA, 481 bp, Homo Sapiens
  misc_feature (3)..(3): n is a, c, g, or t
  misc_feature (17)..(17): n is a, c, g, or t
  misc_feature (67)..(67): n is a, c, g, or t
  misc_feature (99)..(99): n is a, c, g, or t
  misc_feature (167)..(167): n is a, c, g, or t
  misc_feature (220)..(220): n is a, c, g, or t
  misc_feature (237)..(237): n is a, c, g, or t
  misc_feature (247)..(247): n is a, c, g, or t
  misc_feature (274)..(274): n is a, c, g, or t
  misc_feature (299)..(299): n is a, c, g, or t
  misc_feature (320)..(320): n is a, c, g, or t
  misc_feature (328)..(328): n is a, c, g, or t
  misc_feature (376)..(376): n is a, c, g, or t
  misc_feature (412)..(412): n is a, c, g, or t
  misc_feature (427)..(427): n is a, c, g, or t
  misc_feature (429)..(429): n is a, c, g, or t
  misc_feature (435)..(435): n is a, c, g, or t
  misc_feature (444)..(444): n is a, c, g, or t
  misc_feature (468)..(468): n is a, c, g, or t
  misc_feature (477)..(477): n is a, c, g, or t
ganacggagtctgtctntgtcacccaggctggactgcagcagtacgatatgggctcactgcaacctntgctccccaggttcaagtaattctcctgcctnaccctgccgggtacctgggattacaggcatgtgccaccacgcccagctaatttttgggtttttaatanagggggggtttcaccatgtcgaccaggctggtcttaaactcctgacctcaagngatccacccacctcagnttcccaaagngctgggattacaggcttgagccactgngcctggccagcatagctttcttaangcattcatgaagctgcaatgnataattgncttgagataacattggatgttaatactacagcaaattttgccatgtanaccacacatttattaaaagggatctcattctttagnattctcccggacttntncccatnccaaagttngccttcattttgaattgaaggtanggattaatnggct

SEQ ID NO: 59840 - DNA, 2480 bp, Homo Sapiens
gtttggaagtgatagcaaataaaagccaccttgaactgggtctgatgcagcattcttaccaaacttcaaacctggactagttcatccttatgcattgaggcttttttattcgtgttcgtttgtttttaccagttaactatcaacataaatttcatttataatattgtatgttcagtgttccaaaaaactggtcctaccaacatagtttggaatgactccattataagatggtgactgcctgtatcaaatctttactgcctttttcaaattcttaccatttttataaaaaggagtcacactactcaatctatacatcagtgttaaatatgatttttactaattttttttttttttaccaacactatcttaaaaaatctgacagcatagagcagtgattaaaggcatttgcttcagggtcaaatatagttacactgctgttttttggacaatttgttattttgaaccattgtttcttacctttataaaatgagcataagataatgttcttttaaggtgagtatgagatacaaatgagaaaagcaataataataaagattcaacaatggaaactgctatttacattatgattgttataattagaaggacaaactgtaatttaacgttcctatagtaataaaatggcatctacagagcaaatctaaacagacttaatcttcatataacaattcatcccagataatttgaattgaccataataacatgtttgaaaggaggctgaaataaaacagggtttgctcttttcaactctttagccaagactttttttaaaaaaaactggtatataaatgctttgtatttcctttcaagtttgaagggaaaataaatataatacttaatagattttcaagtatctctttagacattctcttgtttaggcttgtactaatccattcattcagggtttgactgttgggtgaacttctttgccctattcccagctgtgagaggcaattctccaggtttctaagctttagacctatgcccttctctgatgaggttaattagggtttgggctgaaacccagattcctatatatgtggatagagtgatgtagaagtactttatgataataaatataaatgaaatttagattttaatttagaaatagaaaacatttaggcaactcactgaatcaaaaataaatatagacaaatttaattaatatatttatttattatattttcctgggttgggctttggcctctatttcatatattttgtttatttttcaggatgttctgggataatgtagtccaggttctagttctgcctttgtcacttactagccatctagtcatataatgctgaaaaatatattatgtagctctaagataaattcaacgtacctgcatagcactattcaacatacttgcacagtattattgtcaatatgtagtctaacagataagaaaccactgtgaaaatagtaaaccattataaaaaatgatgttttataatgatacatctttgcacttctaatattattgctttaaataaatgtggtatatattcagcatacagccaaatttacaaaattttatctttttaattttatgtcatatataaagaaccttaatgccaaaataatctttatagtgatgactcgacatcccaaaaatgtgggacccaacagggacattaataaagagataaagcaggctctgtgccgacttgttagaatttggtacgtggcaaatgtgcagtcacacggccttaaacctcccctgggaaactgctcaaacatttgcattcccacaatgtatttattcaggaaatactcttttcctgagaaaaatctggctctcaaacctctccctgagattatgcaagttctccattggggaaatacagttggaaatctagtaaagaatgtttattaacaaaaatccatttgcagatcctagttattctcaatattttgtggatttacaattgagaatactacttgcaaaaagtaaacttcaaaaaaaggaaatagaaagctatcagaattcctgtagagtttgttgttccccttctcctccaacatagttttattctaatgttttctttattcattttctttggtattagtgtgctgtaaactcacccaaaatgaaaaacaatcaaaataaaataaaacaaaatgaaagcacatcagttaaagataaaacaaaacaaaaaacaggctgccaggttttagtggacagaagggtaggccccctggagatcagccaaattgagtggatggaagtaatcaacaacaagaggacaacaacattagccactgctgagcagaaaattagaaagattcttcaatttatttttttttcttttctggttgtcaggttttgtctctcctgtcttccactggtacaccataaatcagcagctaaaatgaaatttccttcttttagacatggcaaagtactcattgagcttagagattaatagtaaaactttaaaaaaaaaaaaaaaaa

SEQ ID NO: 59841 - DNA, 443 bp, Homo Sapiens
tttttttttttatgctggaaatgttttatttttttatgtagatgctggttacaagctgatgctggttacaagctgaattcatattatgtattttctatataagtcaatacatttttgttttttaaaacacagcctagacagcaaagtgttacacaaaaccgctctttgctgcctcagtatctgtacatgaagataaaaagaagaaaaggaagaaaggaatacccacataaagtgaacgtgtgcccatccaccacccccctcaaagaaagaatactgagctacaaacctcggaaaagcttctgggcaatgtgcagagggtttccaaagcggaagttctccccactgaacaaggctaagatgagttcattctgctgctcagcactgtcttcaggaaactggggcagaaactgctggaggtgttcacgttgagaatcacttaacac

SEQ ID NO: 59842 - DNA, 1843 bp, Homo Sapiens
actctgctgccggcttctcggagcggcgctgggcgaccagagcagggtcgagatgtcctacatcccgggccagccggtcaccgccgtggtgcaaagagttgaaattcacaagctgcgtcaaggtgagaacttaatcctgggtttcagcattggaggtggaatcgaccaggacccttcccagaatcccttctctgaagacaagacggacaaggtgagggggtctggggtcctgggaccgctccatggggcacaggggcctgagatggtgggtctctgcttcctgggcctgcatggaaggaacagacttcatctctcaaaccatgctctctaagaaggcatcggaagtgacctagtgagaataaggacgggtggggtgaggaagggctgctcagacagagcccaggaggagcaggaggcggccatcagcagggccggtgcatggtggtgcagcaactctgccccggctctctcagaacagtcctcactgaccatatgtgctgggagaggctgggtgcagggacagagggacggctgagaatgtgccatgctggcttccgctgtgtgataaggggccagtccagtgaccacagggcttgacttgggctgcccctttccagggtatttatgtcacacgggtgtctgaaggaggccctgctgaaatcgctgggctgcagattggagacaagatcatgcaggtaacaggtgtcccaaaggaggagaaataaggtttgggcaagcaggtctgaagcacttgggggtggggagctgccccagcctcccagctgggagagactcactgcagccaattgggaacccatactggcattgccccagaggacgctggctttctctcctgtgtgtctcagccacagtgcttggtgtctcccagccctgggatgttaggctgggggcctacttgaatgacctgggcccccaaagccctctgcttccagatcccagagggcggggagctgaggtgagcctgtgttctctcctggggccaggtgaacggctgggacatgaccatggtcacacacgaccaggcccgcaagcggctcaccaagcgctcggaggaggtggtgcgtctgctggtgacgcggcagtcgctgcagaaggccgtgcagcagtccatgctgtcctagcagccaccaccatctgcgactcctgcctgccgcctctctgtacagtaacgccacttccacactctgtccccatctggcttctgctgaccgctgggccccagctcagaagggctatagctggtcccagaggcctggcctggccttccttcccttctcccatccctggcctggggcctctgggaccagctttctctcctggacaccgaggattggaaataagggcctggagctgagtagtagccagtctgctgtgaccacaggctcaggtccgaccctgctgcttggccacagcagtggctgggcaagtgggaaccactatctcttgggagcccccaaaagctgggaaatgctggaggaaccaggcctttcccgcttttgcctggctgcagggttcggctccgcccctgccccccagccctcgtgtgtccacaccgcagtgcctctgcccctcgggggactggacacacatcctgccagaggcgctacgaagctttgcccagatgaagccaggtgggctccgcgttcactcccactctcccgaggggtgctggcctccccagggtttgccttcttacggatttagacgaggttcgaggctcacctatcagggcagctctcaggattgtcattttcctctttgcctgtgggtttaacttttgtatttttttaatcacaagtttgatacaaaatgtttttatcgt

SEQ ID NO: 59843 - DNA, 453 bp, Homo Sapiens
tctttcagatgggtttcagcccagcagaagcattatctttgccagttggagtgctggagactttggatcggttggtgccactgaatggctagaggtattctttatcatcccttcccatattggacacgagcttgtgggcttaggctgttggtccagaagtgatgtttttataggtttgattttaccacttttgcctttgcgtttaagtctcagtagagtccagaattgaaaatgaatccctaatgctactgtatgtgataaataaacagatttatacttattagtgttttcccttctcttctagggatacctttcggtccctgcctcagcctcctgagtagctgggattacaggcacccacaaccacacccggccaatttttgtatttttactagagacagggtttcgccatgttggccaggctagtctcctgaccctcaagtgattcacccg

SEQ ID NO: 59844 - DNA, 508 bp, Homo Sapiens
tttagataatgtaactttatatgcaaaacacagacgaaaagtttacaatactgtaatgttgcaccaagatagtatataaatagatttaataattttaaaattagttctggggcaggagtgtcaggggcaccagcaggcagtgttccagactgccttaagtggcagctgtcacaggagctgtagcattcagtgttcaatgttagcagtgactgcaggttcgataaaataggccagtggcagggcttaggttgtgatcctgataattggtttaggcccttttattttgcctattttctgagtgtatttctccaggcttcctagagcaatggctcttaaaatgtgatctcacactagcaatatcagcatcactgggcaacttgtaagaaaggcaaatcactgggcctcatcccagacctactgaatcagaaactctgggagtgggacccagtaatcatgtgtgcacatgtgtgtgtgtgtgtgcatgtgtgtgtgtatgtgtgtatgggcg

SEQ ID NO: 59845 - DNA, 1025 bp, Homo Sapiens
ggctcgtcccttcccccacccccagccgccgccgccgcccgcgcttcgcaacaaagccggctgcggagccatggtccacgccgcccgcccgcgaccccgccgccccgcatggtagccggaacgtctctcccttaccagccttcgcttcctggtgcccagctcttaggaccgtgtgtgactctggccttctaccgagacaacagagaaacgcacagcaactcgcatggaggaatcggcgaaatggctccgaccgcggcgctagggggcggggccagcgagcggtgttgaaagcagcaggggcctagaagacattaaaccgataccacagaaatacaaaggatcattagagactattatgaacaactatatgccaacaaattggaaaccaaatggaaatggataaattcctgaacagatacaacttaccaaaattggaccaagaagaaatagaaaacctgaaaagaccaactatgagtaatgagattaaatcagtaatatagagtctcccatcaaagaaaagtccaggccctgatggcttcactgctgaattctactgaacagttaaagaagaactcataccagttctcaaactcatcctgtgagggcagcattaccctgataccaaaactagatatggacacaagaaaaaaaatctataggccagtatccctgatgaacatagatgcaagaatcctcaacaagaccaggtgtggtggttcatgcctgtaatcccagcactttgggaggccaaggcaggtggatcacctgaggtcaggaatttgagaccagcctggccaacatggcaaaaccctgtctgtactaaaaatacaaaaattagccgggcaaggtggcgtgtgcctgtaatcctagctacttgggaggctgaggcaggagaattgcttgaacctggagggaggaggggcagaagttgcagcgagctcagatcgtcccactgcactccagcctgggtgacagagtgagactccatctcaaaataagtaaataaataaagagactcaactagc

SEQ ID NO: 59846 - DNA, 1083 bp, Homo Sapiens
cagcctctgtgtgcagcctggaaattccatccaggcagtaaggtggagtgctcttagggcccatctcatttgtttcctttctttcagggatcattatcagcaaggcttgctgtccaacgtctgaaaaccactgttttatatattttgtctgctttttttgacaggagggtaaatctagtccctgttacagctttttggctggaggcagaaatcttgtttgtgatttttaagaattactctcttaaatttaattttgttttataattatgtaaaatacaaagctctaaagttaaaacaaggtacagtaatattctatataacattttggtcagtgatgaaccacatatatgacagtggtcccataaaataatacattttagttgtaccttttctgtgtttagttaaacaaacactaggtgttacattacaactgcctacattattcagtacacaatatgctgtacaggtgtgcagcctaggagcaataggctatactatataactgcgatgttagtaggctacactatctaggtttgtgtaagtgcactctgtgatgttgcacaatgatggtatcacctaatgacgcattctcggaatgtatccctatcattaagtgatgcattcagaaaagtctagggtctaaccctttgcttttccctacacactcactgaggtaaacattaaaaaaaaaaatttccccctccaccccttttaagtttttattatttccatactattgtttttattattaacataaacaagtatatacatccacttacatctctactttcttcttaggtgattagcagcatactacaaaattctctcaaactactgttttacttagtaatttatcctgaagatcactccatacaagtatatagagatagtcttcattgcctatcttttgaatttataacttaaaagaaggaattaaaaatgtaaaaacattatcactgatattttcaaggtctttacttacgccatgctgaaagagggttttgcatcctggtcagataaagaagcaatggtgtgctgaggaaatccttcatagaagaaaatgtattactttctttttccaag

SEQ ID NO: 59847 - DNA, 2015 bp, Homo Sapiens
aatggctggatgcatgtcagtgcataggatttgagtcattagtgtgccacaaaacattttaccaagaaatggtgcgtcatcaaatagttgaattacaatggtagctgtaaacgggacccaatttacaaaagtaaatagtgtccccttttacaagaaagaaaattaaccatgctcattcagattctgaagtttaattagctttaacttgctaaaagaaagaaattgaacaagtaaatagcatgtacttcaccatatatagcaaatcctgaatcactgccattttttatataactgacccacatgggttctttgctttttcttttatctgtttacctcagattttttttttttaataaaggactataatttgattggcttgtaaattcttcccatttctaacatgctataagactttaagcctaatttcctttgagccttaatcctcttgctaattgatgtgactgagttgtctggaatcaacctccttggtgcaaatgactgagactgtgacgttctatggaagcagtttggtccgggaatgaatcctttcattcagcaaacaaatgccatgccagctgagtcctgaaagagcccatgggcacgtaaaggaatatagttgttttacaacatgtcccccaaaattatttgacactcttctcattagcaagtgggactctgccccttccacttggatctgagctctgtaactgcctgccaatagaatatggcagaaatgacgcattgtatcagtttctgggcccagaccttaagaacctagcagcgtccacttcctgtctccttgtatgctcactcttggaacccagctaccatgctgtgatgaagcctaaagacccaagcagagaggaaccaacttgtcagctgtatgaatgagccatcttggaggtggattctccagttccaggagagctgccccagttaatgctacatgaaacagagacaagtcatcagtcatccatccccactgtgccctttccaagtttgtgagcaaaataaatgactgttgagttaagccatagagtttaggaatgatttgttgctggaacaaggaggtagacacataaacaattttgaagcaatgtagattacaatgacagtgatatttactacgtatcacaggaacactgagtcgagacacctaatccttccttcatcatcaaggaagactccctcaatgaatgagatggcaactgaactgaatctcaggttaaccaggttggagaataaagggtggcgtgttctaggcagaggggacaacagtgtgatcacaagcagtgaggaaggaaacaacatggtgtgcagaaggaattatgagcacttaggtgttgctggagcttaaagctggaataggaagtactaattatgtagccagagataattggcaaaggttgaatcatgaaggcccgtgtttgccaggtgaagacatattgtgtacacacagcttgttattttcattattgttgtattgcattttggattgaagctgtctgatcaggtttgtgttttagacaaatccttctatcagcagtggggaaggtggatttcagggtatgaattctgaagcatgaagaccagtcagatggccgttgcagcagttcaggcaaggacaatgaggcctaaattaagactgcgagggtgaggatggggaagagaaactagagtcaagaaataggtggttttaaaaagaagtatttagagggtaaaaagaatactaactggccggatgtggtggctcacgcctgtaatcccagcactttgggaggctgaggcaggtggatcacaaggtcaagagatcaagaccatcctggccaacatggtgaaatccctgtctctactaaaaatacaaaaattagctgggcatggtggcgtgcacctgtagtcccagctactcaggaggctgaggcaagagaatcacttgaacctgggaggcggaggttgcagtgagctgagattgcaccactgcactccagcttggggacagagtgagactccgtctc

SEQ ID NO: 59848 - DNA, 543 bp, Homo Sapiens
  misc_feature (543)..(543): n is a, c, g, or t
aaatagagatggggatctcgctgtgttggcgaggctggtctcaaactcctggccctaagcaatcctcttgccttggccttccaaagtgctgggattaacagtgtgagccactgcaccaggcctttatggtgtgtctaaatggcacttccttagagacctttccgatcacctgaagtacatgcccaacagaccatcccaattattctctacctcattctattgtctatttccttgtaggttttatcatgagtactattttgtctttttatatcctccctcacctcgaacgaaattcgacttccaagagggcaagaaccttatttgcctttattcctgacatgtagctgagtgactagcctcggctacgtgtcagtggatgctcaacagaaactggttaaatgaatagtgtgagtaggtgccaggcactacgctagacagtaggatctggaaataagagagcatctgccctctgaaagctccaagtttagtggggaaatgaacaatcaataaactaccaaagaggcagttaagagtgatatgaan

SEQ ID NO: 59849 - DNA, 3267 bp, Homo Sapiens
acttgacttacaagcagcggccgtacaccttcctcttgcctagaaaatgccactcctcggggaaagtccagaatggcaagatgtccaccaacggtgtgtccaacggtgtgtccaatggcctgcaccttcatagcaatggcttccggctgccggagagtaggggacatgtcagcccccaagtagagctaccaccatacctggagcgtgtgaaacagcaagccaatgaggcttttgcctgccagcagtggacccaagccattcagctttacagcaaggctgtgcagagggcccctcacaatgccatgctttatggaaaccgagcagcagcctacatgaagcgcaagtgggatggtgaccactatgatgccctgagggactgcctcaaggccatctccctaaacccatgccacctgaaggcacactttcgcctggcccgctgcctctttgagctcaagtatgtggctgaagccctggagtgcctggacgacttcaaagggaaatttccggagcaggcccacagcagcgcttgtgatgcattgggccgcgccatcacagctgccctcttctctaaaaatgatggtgaggagaagaagggacctggtggcggcgccccagtccgcctccgcagcacgagccgcaaggactccatctcagaggatgaaatggcgctgcgggagcgaagctacgactatcagttccgctactgcggccactgcaacaccaccacggatatcaaagaggccaatttctttggcagcaacgctcagtatatcgtcagtggctctgacgatggctccttcttcatctgggaaaaggagaccaccaacctggtccgtgtgctccaaggggatgagtccattgtcaactgcctgcagccacaccccagctactgcttcctggccaccagtggcatcgatcctgttgtgcggctctggaacccccgaccagagagtgaagacctcacaggccgagtcgtggaagatatggagggtgcttcacaggccaaccagcggcgcatgaatgcagacccgttggaggtgatgctgctcaacatgggctaccggatcacgggcctgagcagtgggggtgccggggcctctgatgatgaggacagctctgagggccaggtgcagtgccggcccagctagaccctccagccctggtccccagcccctgctactggctggaccctctgccctgggcaggaggtcaggggattctgttttggtttgtcttccccaccacccttttttttcatttcccctgttttgtttgttagtttggcgttaggggtggaggttgctacaacttgctggctttcggactctgggctgattgtcccctgactatccccagccctgaaaaaaagagcaggaggggacacccctccatatgcccccccccatctcctgctttcatgtccctggagggctctggcctgcctcaaaaccccttctgcctcaggtggggaggaacaagctgaactgtcttcagggactgtcctgccctttagctggcagcagcaggaggagtgggattcccaattggtaagggctcgccttggcctgttgccactcttgctccctagcctgcaaggctagctcccctgtggtcttcaggaaaggttttgaaaaaggatgggtcccaccctccctccagagccaccagtgttagagcggagcccaaaggaaggatgggagccctggagtgggcaagaccaggccacctgctgaggtcgctgtggagcaccctcgctcctctcctggctactagctctggccctgcacctactctcactggccacctctggaggctctgcctttcccaagggccctggcagagggtggggcactgcaccttaccccacccatccatgccagcacttctgcactacggccattctcctcttgggcgctcctcagcctcactgtgacctttctgccagagctcccagccaggcctactctgctgaggtggcgcttcctgctaagggcccttctctgccctttctgccctccttcccatcccacatgctgagccgccacaaagaccaaagaagtgatggcttttctctgtcccctgctgctctgaggggagaggggtgggtctcctgagccactcagatgggaaagtcccttactcggcccctccctccccagcagccccaagctttacactggatgcagcgatcaacccaccactcaccaggcctctcctcccctctgcccccggctcttagctccagctgctccaggtagttggttcatccttccccctctctccctccctgcttccccttcagtgcttacttggctccagccctccagctgcagcccctggggaaaagcagcctcccttctcctctccctccactccctcgctccctccctcagcccctgtctctgccaggtgcctcctctcagtcaggcttcagagcagccctggagacaggagggccatgttaaaagctttttcacagttttaagaagacaagtggagggtgaggatagtggtggggggtctggcaccatctcattgctttaatcccagcaacacaggtggcagcttctcccccttccttcccaccccagtccctcttcccacccccctcttctagcttggtaatgaagtatatttattggtgaaggaaacagctgctgctgcttctcctgctgctgggacctgctcccctgtctcttctccgtgacctttctctagccagggagaagggagagcaggagtattggggctgggccctggggcccaaggaccagctgggtcccctttgctttcttgtgttccagccacctgccatttcctccctgcctcccaccctccctccctgccccctgtcctgcttcccaccccctgcctgcccagcctgggccctgcagtgtggagagacacataagccttactgtcctctgggggcaggagccgagcctttttgttgctccgctcccaggagagtgagggtgacgcaattgattaaaaccattttgttctaggtgtggctggtggcatttgtggggtgcagatgggtcttggaaccaaagtgagggcacctggtccctcacctctgtagctctatgacttagtaaccacacctctactggacagaatgaggcctgccttgaagggtcaccgtgagcagcggccacccagcccagcagggctgagtgcagagcccagctctcatggctgtgatttgtaatcatcagctttcactctctggctgttttctcatcagtaaaataagggacttgg

SEQ ID NO: 59850 - DNA, 435 bp, Homo Sapiens
tttttttttttaattaaaacagcaaccaggtaactgccccaacccatcagggaaaggacccgggatgggcagtcgttttttcaaaaaaatatattttctttttttaaaaacaacaccaaagcaaacccatagcccctgtcaagccagtcctcagggagagtgagctggaaggctccccctgcacttctctgagcagagatcttgggcccctcccactggaccccagcctgagcagagggcaaggctctgcatgctggtaccctagggggttgggggagaagcgatcagctccaaaccatgcaagaaaaacaagccaaacccataaagcaaaagaaaaaatcaacagaggataaattaaaaaaaacacgaaaggtgaatgacacttgggacaaatggctcgcacagagccaggtgggagcagccccctcggttcct

SEQ ID NO: 59851 - DNA, 2175 bp, Homo Sapiens
aacttttagaaaccaaatgatcttaattgttattgcccacccctggcttttccgggtagaaaattcacagtaggaatgattgttaagagagagtgcttggaaccatgggttaacaggaaaggctacctaacttcacatatctgcaaccagagcagccaccaagcattacttagcagcaggaaaatgattgtatttgagttcctgtgtgtccaaaactgaggcaccatgttctttgaaaacatgccacctcaaggctgggattacaggcgtgagccaccaccgcacccagcctagatcaagcattttattctctagtgtgtctcaagagttttctcttccagatgtgtgaataagagtactcatgaattcaagccacagagtggagcagagatcaaagaaggtaatgtttaattataataaatgtgtttctgtccagattcctctgtatcactcagaggtgtattttgtggctgtggtttatgaaggcttcaggccttaatgaacctgagtgttagatttcctattcttagagtataggttatttatccctgaaccatttcaaataaatgtagaaatccacttgttagtctcatcttctttaacattctttggaaatgtaatttgtgaatacatttctagtaaatttctcaggaaattaatccaaaacagagtcatctttagtatgttaggtaggaaaggttatcaaaagtttaattaggagtgttacactgttattcggtactactttgttagaggcatttgcataggagataagtcttataaataataagatgcacaggttgggctttcacttctccgctgtgtgactgggacattttttttctggacagtttggtgaggaggagggctgtttgaaatagctggaggttcattaactgaaccaagacttactgagcctgctctgtaggtgccaggcactgttatacatagttagggatgaagtcatgaacaaaaaatctccacccacacagagggggaaagaaatgtactattggagttatggggttgaaatttcagtcaaggtgatatttgggtaaagggctaaagttagggagctaccatgccattagcttgggcaacttttcagacagagggaatattaagtgctaagccctcaagcaggaaaatctctgatatattctaagcacagcaaagggaccaatgtggggaggtaagcagggagaggaggaaggtgaggcctgaccaaacaggacccaggctgtgcagggccttgtattctatgcctgactgcagtggaatgagatgggaagccaatcttaagatttacattgtgactatgaacttgggatacagtggcactaagggtataatttatgacaaagttgctaatctggtataatccagaccaaccactcaatctctctcagccttcatttccttttctgtaaaaggataattttcacctcatttacttcataggactattataaagataaaaatgaaatatatgaaagcactataatactggaaattcttagtgataatttttaacaatgacaaactgttttaattgtaacttacttaaattgtgtgtcttttaagttattctgatttccctactgataccacattttgtctccatttctttgctagggtgtgaaacacataaggttgccaacacaagttcttttcacacaactccaaacacatcactgggaatggttcaggcaacgccatccaaagtgcagccatcacccaccgtgcacacaaaagaagcattaggtaaagtattttatctgagtgtgtagcacctgatgacaagttaatgaaagctcttttgcaacctgtttacaattattctttttgttctttaaggtttcatcatgaatatgtttcaggctcctacacttcctgatatttctgatgacaaagatgaatggcaatctctagatcaaaatgaagatgcatttgaagcccagtttcaaagtaataactatttaaaagctactaagtgcatagcattataggtggttatcacagaaaatatcaagaattatttaagaggtgaccctgcccttgattagcttgtcacataaaggcagggaatgcatgaaataaaaataagacagttcttgacaaggtactcaatgtgtgtgatagatttgcttgattaaagggaaaaaaaaaaaaaaa

SEQ ID NO: 59852 - DNA, 5005 bp, Homo Sapiens
gttagtttggcctattgcagcgtcccagcatctgtcgcgtttctcatgtgtgattgggctctggcggcccatcctggcggagacttcggctagcaggccccgctgcagaccccaggccggctcgggtctacctgcgccagcgctgtacctgggcgaccttggctttgcccccaccggtgacccggcccgcaggacgtgtgggtgccgctcagctccccccgcctcggccgccgacccccagctccccggcggggcctcctcctgccacgtgacgcccccgccaggggccccagcgccctcctcgcggccgcgccgttccggctcccgagccccgcctgcgcgcggcctcctcggcgcagccatcctcttggctgccgcgggcggcaaagcccacggcatctgccatttgtcattcagcccgtcggtaccgccccgagccttgatttagacacggctggggcgtgctctggcctcactctccgggcgggtgctggacggacggacggacggggcagccgtgctcacagctcagcagcgcggggccttggcgcgcggggcgcttccccgggtcgccgtcatggccgcggaggtggcacgcccgagcggcctcgcctgagctccgggggtcgtcgccccgcagggtaggtgtttgggtgctcgcggctgcggcgggcgggctgggggcagcggtggccgtgcattgccgcgctgcgaggacggcgctgggttcgcggccgcgaggagggtgtgcctttgccgcgccgcctacgtgcgggtccgggctccgcggggccgggtgcgggaccccgcagatcgtcacccgcaacccaggcagccccaccgcgagtgccgccggaccccctggacgccgctgccagaggcgttcgcgcctatctggtatgaggtccacagacccgattcttacaacctggcgctctaacctcgccaacgggccaggaaaaaaacagaacaaggaaaagaagaaaaagtctgttccaagtaataatgggactagacagtaactgtttgcactttcgtctcttatggaaaatatgattattttgatgctttagtattacagactgtatcagacatactcttaaaagtatttaaaaacgtggggtcctaaaaatttcctagatcgggacagctgataatgcgacttctgttagtctccgcatccaactttcagggcggaatggggatttctaccttttactgaatatactcctgtaattttgaatattttttctcatcaaatgtgttactttcatgttttaggaaaccaataaaaatcaaaaatagaaacacccagcttaggtcctccttcttccaggaatcctcctctaacccctccctcccaggcaggatcggaggcccctcccgggtgctttctggggcctcactgaggtcctggtcccctaagtcctcccccgcagcccctccgcgtattaacccaccggtctcgctgggctcagagattgcttacttagcacatggtaagtgattaatactgtttaatgaccgagggaaaagataaaatgttctctgatgtttcacgcttttcgctctgaagttaaatagtggtaaatttatatgcgcttagataagaacatttaacagttaaggatctggaaaagttgacgacgtccgatgtccgtgtttcctgatccagcagttgcacgcctgggtattcatccttaagaacaatgtttttcagaatttgaagtccattttagtgggtcgtaaagtcatttaaatggatgatcagaatttgtaaaacacagacggagaatagaacatcagtgtctctcaggtcataggggtgttcgctttatgaatctctctccccctcctcagtttcatacatacacaaatgtgtgtcatgatgtaaaacgtcattccttagtatgagtcatggacaaaaaagtttgaaagccactgccctagataaattttaatacatgtccacaagcagacgtgtacaagaaggttgactgtaatggcagaaaactggatgccgccttcatgcctacctgaaggagaaagataaattatacaccactcataaaaagggcacactgtacagtggccaatgaagtatttttgtgtttcaacacaaatgcctttcagtgttgaaccaaaaaaaaaaaaagttgccggagaatgctgtgtgatatcttctatgtaaaattcagaacctggtggagcaaagctgttgtttagggatgcatgtataggcattaaaagtagtaaagaaaaaaagtcaagctaatggtcatctcctagtggggaggagagggtcaggggctcagagatgctggaaatgctttatcgcctgacctgtgcaatggttacatgggtgtttgctttgtaactctttgttaaatgatacacactgggtttgaatgttacatttccccccaaatatgttaaaatatgggtgttgcaaactgaagaagcctgagtctagggctctccgtctgttattcttatttcctggcttctttttagaaaaaaaaaatcttgctcagggaggagtacctagggaatttatcagtaatgttttatttcataaattccatggtggacataccagtattcattaaattattctttatgtattcttataacttaatttataatatttcaaaaagcatttaggagaaaacatcatttggtgtgtttgctttcccaaaagtcacatttacatgttttgtacacaactggaatattttatatagtaattttagctaaaatcaaattttgttatgaaaaacgaaatactaaaaagtatataaaaatcacagaactttacagactttcagcgttttaaaatgctaacatattgtatttacctcaataatttctgttcctcagttctttcaggccacatttttagtgctcaatagcctcatatgactttaatattttattatattttattatgttatatattttacattatacattatagaacagaatatttccatcattgcagaaatttatattggaaaacattctggatacaaatatttgttatatacttgcagatattaaactgtagacattaatccttatgctttttgtcttaagatactctactattaatgaaatgtattctgaatatttttctaagaatttttaagtttatgttttgtccacattttgttctttaatttacctgagacatgtatatattgagatgtatatattttatgttatgagatcaagcttaattaattttcagattcccacatgaaaaggtaattgtcccaatatcagtgattagcagtgccacttctgtcacatacagtacccagatatgtttgggcttatttccaggctgttaatcctggtttatttgtcatttgaaaatactgcagattttcatttactgctgctttctatgtagtatattgttcagttctaagaatttaagattttttcattgtgatattttttcttcccctaagagatttgtagaaagtagtctagttccaatgtggaaggttttgtgagttatccttttgttactgatttctaatttgcactgtagttagcatacgtgtcaaggccaacaattctttgaaattcgagaattgctttatggttttaactgctccttgtatcatcaagaataatttgtactcacagacttttgaggcaatgtatgtaggtgtgtgtatatatataatatatacacatacactttatatatagattatatataatctctctgtagagtttatataaaaattaaatatatttatataaatgtatatatatatatgaataaaatctcctgtctctaaggtttatgtttcattaattcaggaaagttttgtcttttatctctttattttcacacatttttgtcctattctttaggagctatgattagacttctgttagacttcctcactctatcacccacatcttttaaggtagatttaatgtatttaatatattttttatccatgttgaattctacatatgttttttagttctataatttatgtacaacaaaaaaaagtgtgtagcttggtgaaatttacatatgtgtatacctttgtgattactacccagataaacatataaaacattttcattccttctgccccttcctatcaatggagccactcgcttcccccagtcaactactgtcccgatttctatgaccatgtattattttcaaatgtttttaaacttcatataaacggagtcatacagtttattcttttgttcacattgtattcatccatgttgcatgtataagaatttttgtttgttttttatttttgctttgtatcaagggttggcaaactatggcctgtgggccaattccaacccactgcatgtttctgtttataaaattttattgggctgtgttcacccaccactatgcctggataattttttgtatttttagtacagacggggtttcaccgcgttggccaggatggtcttgatctcctgacctcgtgatccacccgccttggcctcccaaagtgctgggattacaggtgtgagccaccgcgcccagcccactctcaagattttgaagacatttgcctttgttttcctccagaaactttatagttttagctgttggatctgtgattatcaccagttgatttttgtgtatggtgtgagggggggatcaagatttattttgtatatggacatccatctactctacacatttattgaaaaaaacaacacctttcttttcccattgaattgcgtggggactttgttaataaatgaatggtcatatatttgggtctgtttctggactctgttctttccacttggactaattatccattcttgcatcagtaccatacttttttaattactgtagtttatggtaagtcttgacatggtattgtaaaccctccagttttgttcttttaaacaaatgttttgactatttaagtgctttacatttccatataaattttcaaatgtgcttgtcaatgtccattaaaaaaaaaaaaaa

SEQ ID NO: 59853 - DNA, 499 bp, Homo Sapiens
tttttttttttttttttccttagcactccttcctttgccccctataataatcccgtcccctcacatagtattcccttaagaatggtgaaattaaatctaaatatagctctccccttttactcctattccagcatagatcattgcaagtaattaacctttgttattccatcaaatctagaatgcaaacctacatgctaatttacttaagtcagactcaataataaatctgcgtctatagcagctaaactcaatgaagatcctggatgttgttcagttatttggattactaacatcttctttttgaataatggcacttgactttttcaggcacaaaccatgttttgtattggtcttgacagccactataaagtactcccccaagtgtcagtaacaaagatgatttgtatgtggcttgcagtcttccagtgttctaatagctttctcattccaacccagaaacatggaacacagggcagctggttaaagctgatacaagcat

SEQ ID NO: 59854 - DNA, 452 bp, Homo Sapiens
ttcaaagacagacacagtttatttataaaccaaagaggccaggagcctactagccacccccatccccttccctcttcctgagcacagacatggctcccccacctcctcacaaggtttttggtacaaactgtggtttggcctaaagcatccctaaggaccctggtggggcagggtaccctctgctcccaccacctgggatgtgctggggaacgtggagtggggcagcctgatattgatatcccgcggccccggccagggctctggagctgctctttgctgcgctcatccaggacttccacgaacttggctggaaaccagcctcgcaggccgttgagctcccccacccagcagtgctcgtccttctgagacacgattgtgatgatgtcgttcttgcggaagcccagctcgtcgtcgtcgtgccgctcaaagtccagcagggccttggctcggcg

SEQ ID NO: 59855 - DNA, 596 bp, Homo Sapiens
  misc_feature (576)..(576): n is a, c, g, or t
cctgctctctttcccattctttgcctctatcccttattgtcttggctgcccaggtctgcattccaggggagcagctcttggccacaccccagctttacatgggtcttgctgcaaagtatatgcagctgcagtccctccccgcatggcccccaacttcacctgcaaaggtgttgttgctttcatcctgtccccggcttccttctcccggctggcacaagccttctcttccagtggacttggtcagccagctgctgcctgccccagctctcagaagctgcctctgctactgctgcgttttgccggaaggggctgcccagatacactgagcaatgctttggcagagttttaaaacttaaaaaaaaatccaaacactttcacttatcatcccaggagagctctcagcaggcacggctgaagagggacattaaaatgtgtatttttcttcagacagcttttcctttccatgacattaactctcttcactccaatcatctcacctcccaactcccaaatcacagcttccaatctcccggtgttaacacacatctatttcaaaaaacgaacacatcactgctntattcgcaatgcatgtggga

SEQ ID NO: 59856 - DNA, 559 bp, Homo Sapiens
ttaatcatctataaagattgtccattctaggctatcaggacaggttgaaacgggatcacagatcatagtgtcggagacccactactcaaatttacctaagagtactgtcccctgcacaagaaggcactgctggggaagtcaaacactctgctcctggaccgttccccacacagtggccagagtgatccgatctgacaatgccactgtccttctgtaaccttctgtggcctctcattacccaaaaaagacccaagctttttacaaagccctacctgatctgacccttgatagaagcagtttaaaactcacctgcttgaggattttaaaagttattcaaaaaaaggttttactctttgcaatcacaaaatgaactggattgaattctttaaaaagccttgtctttgaaacactcattgcaattctagaaataatagttgtctttctgtggtgataaaaggtatttgcagcagaagtacttagatttctacacatgagcaaaatggatctgaatcagaacaatgacattctctaaaaacatgcttaaaaacagcagttacca

SEQ ID NO: 59857 - DNA, 198285 bp, Homo Sapiens
gatcaggctctttctctctgtaaacctgctcccatggcattcttttctgcttcaattcagtccatccctgaccacccacccagccacccatgctggaaatctgagatatctttgactcctccaccttcccactcccacagctaatcagtagccaaaccctttagattctacttcctaattatcttgatattctatctcctctgcctcctctaattatgacttaattcaggctcttattatctgtcatttaaattattgctgtattgctacaggagtggtgtgtatatgtgcaactgttcatcttggtatgctatagactcttgcccagcagttttgcctcaattctttaaaagctccagttcattgtttgaaatatcaatcagaacattttttccaaaatgctaaaatgattgtcattccccagttttaatatctctatcatctgctaagtaaaagcaagctcctccttgtggcgtagcagggcccacgtgatctggcccttgcccgaatttgtagcttatcacaacatccttctaccccccattacctcctattatacaggaacacccaagcgaccttcacaacattcatatcaactagtacacagggtctccaaagaggacctctggatgcctgtgatctttgtacttctgcctaccctttgccctggcgtgtttttctcttccttcatgttctgctggccaaattgtttttccttcaagtcttaggagcctgcctgattatgttcctcctattccgcatcctcataaaattactgcgacttccaaaacacttggcacattcttatttgaatacattacattgttgtgtaattatcccttggccccctcccccagcactagactctaagctctttgaaggcagactatgcctattcatctttgtatttctagccctgggcccaacacccagaatttcttgtattttcaatatatgtctgccaaatgaattagagctaatgcctgaaggagaataagtttttttgagaaagaggaagagccaggagggaggagaaggcagggtccgaagagccctgggggtttacttggggaagatgcggttccccattgcagcattctgccaggaggtggcactgctctgaagagccagctggtcgcttacagactgaggctgacagcttgaaaccaaagagggaactccaccaggaagcaacattcctccactgggcttcccagcccagttacatgccatactctgccctggtcaaacagccaagtcttcaggaggttactggccccaggcgtctccccagtgactgatgatgttaaaccctacgcttctctgattggtttagacaaaatgacaagggcacctattggaaatgatctggcaaaacatgatctaaggccaccctctcggggagggagttggggaagctgggttggctgggttggtagctcctacctactgtgtggcaagaaggtatgggtcatgaacagaaccaaggagctgcgctgctacagatgttaccacttctgtggctgctaccccactcctgggccgtccctgaaggtaagatggtactcctatttacttccatcctgaacctagggagcccactcagctttgtgaggaaaagcgctgtgctttgtgagtggtgggaagtcttatgaggcagtggaaacaacaggggagtggggaaagacagctgctatgtgtggttggtaaacgatatcagtgatgctttgcatgttccatttaagacaatctcttgaagcggagattgttctctccattttacaaatgaagaaaatgagactcagagttatttgtgcaagttcacaccattggaaagtggtagagctgggatttgaacaaagtgaatgttattttcactcctccactcaagattctactctgctttctatcattaacttatcttgtgattcttgaaaagtgtcttagtttccttctctgtagaggatggggcagaatggaagaataatctggaagatccctcttcctccaaatgtctgtttttctgggtattgggttaaaggtttcctgctggctgagcgattcctgccaagagcttcaaagaagagggattattttatgcagttatggggtcacttctcccattgctgtctttgggaggcctggtaggttaaggaacagaagacattttgagagacgcttggtgccaatgaagtggctgaagaaatgtctggatacaggttttccaatttaccatttgtgtctggggatagtgggaggcagtcccatctatggcttggggaggctgtagccattcctcctctttcccttctaagagtgagaaacccatccatggccttctctagtcaatacagtggcctggtatgaattagacaaaggaatcccctttgggaggatacagccctatgccaggatgtatggcatggtgagcagaatgcaggctttcacttgcttctttggctaggtgtctttgtgcagcccccaaacacacaatgaacagtgactctgaatctgtcactttattttatatatatacatttttaaattttttatttgatttaatttattttttttgacacggcatctcgctctgtcacccaggctagagtgcagtgacgtgatctcggctccctgcaacccctgcctctggggttcaagagactctcctgcctcagcctcccaagtagctgggattacaggcgcatgccaccacacccagctgatttttgtatttttagtagagatggggtttcattatgtttgccaggctggtctcaaactcctgacctcaggtgatccacccgccttggcctcccaaagtgctgggattacaagcttgagccaccgcgcccggcctttatatatatattttttgagacgggctcattctgtcacctgggctggagtccagtggcacaatcatggctcactgcagccccaacttcctaggcacaagcaatcctcctgcctcagcctccagagtagctgagaccacaggtgtttgccaccacacctggctaagtttttgtattttttgtagagacggtctcgctgtgttgcccaggttggtcttgaactcctgggctcaagcaatctgcctgcctcagcctcccaaagtgctgggattacaggcatgagccaccatgcctggcctgaatctgtcactttagaaagtagaactctttacttttgccaactggcctttttataggcaggggaagcttggagagatgccataatttgttcttcaccccctttgggagggggagtctaaataacagacacaggaaagggtctcacctcagcccacgctccttaagcaggccttgcttgtttttgttgttttgttttgagacagagtctcactctgtcacccaggctggagtgcagtggcttaatcttagctcccggcaacctctgcctccctggttcaagcaattctcctccctcagcctcccgagtagctacaggcgcatgccaacatgcccagctacttttttgtatttttagtagagatggagtttcaccatgctggccaggctggtctcaaactcctgacctcatgatccacccaccttggcctcccaaagtgctgggattacaggcatgagccactgcgcctagccccaccttgctgttttttaagttggaggagaaggctcccacctccctgaacctcaccctgtgtcctttgcagctcctactccaatgtggccagatgacctgcaaaaccacacattcctgcacacagtgtactgccaggatgggagtcccagtgtgggactctctgaggcctacgacgaggaccagcttttcttcttcgacttttcccagaacactcgggtgcctcgcctgcccgaatttgctgactgggctcaggaacagggagatgctcctgccattttatttgacaaagagttctgcgagtggatgatccagcaaatagggccaaaacttgatgggaaaatcccggtgtccagaggtcaggagttttctggggagtgaagggaggagggctgcattaacctcattgatctgtacactgaataattccccttgataccagctccccatctcaaatactttctggttctcttcatcaccttaatttttccaccagccttggtctgcaccctgtgttcttttggtgggccgaagtacctagcatgtagtaggcattcagaactatgtattgaatgtgatgaattcaacaggtaccaactgatacctactgaatattaacacttgtgctactatgcccagcaagatggatgggaagagtggaaatatctgatgacgtgactatgtcttagtgagaagacagtgcatggttagacatcaatgtgagctctagacaggaagtgctgaaggaagtcatggtggaggggtccagagtagcctggatctggctctgcttctacgtctagctgcagtccttgcctggaagaagacctcccttcagagcccagctcctcgctcatctctgtctcccaaagcctgacccactgtgttcttctctgccctcccctccatatgccatggcccctccaaacacagagataccatctaaactagtctctttttccccctacacttcaatccccccaccagggtttcctatcgctgaagtgttcacgctgaagcccctggagtttggcaagcccaacactttggtctgttttgtcagtaatctcttcccacccatgctgacagtgaactggcagcatcattccgtccctgtggaaggatttgggcctacttttgtctcagctgtcgatggactcagcttccaggccttttcttacttaaacttcacaccagaaccttctgacattttctcctgcattgtgactcacgaaattgaccgctacacagcaattgcctattggggtgaggctttctccctggaattctggtccttttgggggcaaaaagggatagatccatgggaggaggcttctttctccactggtaccttgtttagtccattcctaccctaagcccatcccagtctcccatgtcatcccagacacccacgtcatttccctgggtgggaggctccctaactaggtccccaggctgagccactcatttcctccagtaccccggaacgcactgccctcagatctgctggagaatgtgctgtgtggcgtggcctttggcctgggtgtgctgggcatcatcgtgggcattgttctcatcatctacttccggaagccttgctcaggtggtatgtcatctggagggggcgggtgagcctgtgggagccagatacagtggtgcatgcgtgcatgtgtcaggattattttgtggcatggggggacatatagcgatcctcaggcccttgggtgtgggggcctgtatccagcaccatgggggcacatcttcccagttggggacccagttacacacacacagttatgggtcacaagaattgctttgagtgaaaaaaggaatcatggggtgctgtaggaagggtgcttggagatgatttgggaacaaggagagatcaacttctgcagggtgtggtgcaggcagggcgagcaaggcctttgtgggggaggaggaggaggagaaggaggaggaggatggatcccctgatgcctttcctccatccctgtctctcccccagactgattcttccagaccagagtttgatgccagcagcttcggccatccaaacagaggatgctcagatttctcacatcctgcccaggatctcctcttagggtagaagaagtctctgggacatccctggggtgtgtgtgtagatttcccacctggggactctgctgtccctgggcttgcatcccagggatcccagagtggcctgcctatcacaaccacatcccttccccccacaaggcaataaatctcatttctttatatcagtgtggcttctttcttaactcatggtatttgtttctggatatctcaacttgagtgggttgtcgtttcaaattcagcatgccttaacctgaacacagcttgacctcgttagggagggaaatagggaaaacccctaatttgccagctgagctcttattccctggtcttggcggtacatgatgtttttccatctatcggtttgtgcaaaatatgtgagaaacgaaggcagagttattttctaataatctgcttacaaaatggttaaggaagctgcttgtgtgttttgtgcgtgtgtgtgtgtgttgtgtattttactgtttgtgaaaatgtttatgtctcgtataggctgccctgaggaacatataactcccttcaaccctcaccgtaactgagaaacagaagctcagggatgggaagaataagctcccaagtgctataccaatcagttatgtcagttctgggaaaacagtatcatgaagcccctaacatgaagtgaaaacagcctggaagggcaaagaattcacatgtctttcctgacaatctgttccttggcctgagtgaactgtccaaggagaactgcacaggtgctgtcctgggaagataacgaaaggtggcagcacatgaccactggtggtaaattgctttgcatatgctttctttcttgcattccttagggtctgggagttgctttggatgacagggtggcaataaagttgagagggcaattatttggtgagggagtttctgttcttggcattgtactagagtctaatctaaaagaaaatattaaattctccctaagagaagttgcactgtctctgaaccatctcatttctaacagcatcatgtgtaccggttaagaagcatgggctctggaacctgactgctggggattcaatcgtaactgtcagcgtttagctgtgagcccttgggcaagttacttaacttgtgctttggtgtcattttctgtaaaaggatgatgataacaatggtgtcccccttaccactctacacccaccatgttgccaacatttgaaagtcaaataagtattagcgaggataaaggaaaatgtgaactgtaatatcttggtctgttggtgggaatgtaaactgtttatgatgcccgaattacagaaattatgaactagttgagtgaaaaagttaatataggaaataaggcagcatatcctcatgctgtgaagcttaaataagttaatacctacagaatgcttaaaatagtgtttggcacatagaaaatgtgctgaataaccctaacccttatcattattggtcttgatcttcagaggagaacttagttgcctcgtagacttctttctcttttctgaaaatatacctcaatactagcttcaagtattgtattttctccattttagatgtttttctttttattctcatgttagtaattctagatgtggtgctttctagttcttcctaatttctctgtctctctgttttccaacttatctagatatttcctgtcaggcaagacttaaaagtgctttattatgctgtgtgactttagacaagtcacttcccctctctgggcctcaaagtcttcatctgtaaaatgatgggcttagattagatgctctctgatgaaaccttctatgatactgttacttaagtactctagaagcactcaggtatcctctctagtctggtgccccttttctaatatactatattacgcactattcccagcaggaatgctattcttgtttaaatcttttttcctcactcttccttgaggtattatatctgattttggtttagggcatttgcccaggctctttcctctcatacgggagctttctctattctgctcatcttgttcctgtcttaacccactccataggtccaactccagttcaacttattccatgaacctgcccctaatttctctttattgaaatcttccaagacttaaagcactcaacctaaggattgggatatgccgctttatttcctatgttaattttttcgcccaactagtttataatttctataattcagggatcataaacagtttacactcccatcaacaaagcaagatagttcacatttccctttatgctcactaatgcttgtaattatttgactttcaaatgttggcaacatggtgggtgtagagtggtattttgttgttttaatttgcttttctctcattactaatcagtatcatattgtttgattattttggctttttaatatgtgttactattaagaagaacaagtctccattccttcaccaccttcccaaaaaatttattttccttttctttatcaaaatatcctaaaatactcttggactttatttccttgtacattcataatcagttgttaaattctcctgaaacctactgttactttaatttggggtagcatttaggttagagatgtggggagaggttgtcattatgttagcatggcctatccatgaatatggtatatctctacacctctcaggtctttgtgcacttcaataaagttttcttttttcttaaaattcttatatttgatatgttaattcataaatatgctatggtttttattgttattataaatagtaggcaattttcagttattttccaattgattattggcaatacaggatttaaagtaataaatcctgagttcaagtaatggttttattacttagtatctgggtaaatctgggcaaccacttaacctccctctgcctccattttctcgtgggtaagatgaagatagcattcttcaatagttgtggtggcaaaaaataaaattaaaaaaggaaaaatagttgtggcaaatcagatagactatccctagtagttcaaataatttgactgtaggttggaaggatggtgaactgactacagaaactataatccaaaggtcagggtctagagcagtgaatcctgacagggtaggagggtgtgtgtgtgggcggaggtgaggtaaggggtagatggcaggggtggggtggggattggacagattgggcaagtaatataatcttggcaggatgtaggtgtgtgtagttttgaaaagacactgaagtcacgaatgtggtcttatgctatgaggcgtgattaactggttgagcaattttgtgtttataaaatggagacttcagttaaaaccgtctgccccaagaacctgcgaactgacatggagcaactttaggaagtgcctagaagagatttattattatggccatactctcagaaaaaaacaagaaatcacatttgtgacttcctccaacgtgcagtgccagtgacgttattgtagcttgtctttgttttagctaacccaggctctcgtaggacacctcctccctgatggcacctcacagcattgtcaagcttgtggagctatacaccagacctacaatgccaactgccttcctcctctccaacacaaatccagcccagtattcaaggctcattccaggccctctcgactgagagtactccctgtctaccatgtccatggtgatttctctcttctcttttaagaccactggccttattgcttacttactttaatataaactatttaaagtgtttgttctcactccccaattgacgtacaagcaaagcgatatgggggcagaatccatatcttctcactctgtattttcccagtaatgctttgcacacaaaccctgggactagtttactgcaggcatgtggtggtcaggctaagggcagaggcaatgggaaaggagaggactcactctttgggtggttgtgtagaggcaataaaagaaaggcaacatgtgggaacctggttggggctccatacctcttcggtcccggtgctatatcaataattaacaaataagtaacaatggacagagcaactgaaatgttattttgaattggctagaggtggaaagacagagctatatctgtaaaaatggaagggttgggaggaggagaggaaggaaaacactgctgagcacaggtgtctgggttttctgtccttctttattctaaaaagctccctcagtgtttgaattaatagagaagtgaaatcctctcctaccatttcctgttgtggcctcacagaaggtttcacatctcctttgactgccggagcagagatctagacataagagggaactacattcagccccactgttactggctagggccatgttcagtgctggcacaggaccacacagccagtgctcccttgccagggctaggctttgtagacattgaaaaggatcccaggacttggttcctataaggttaggctaacagcttacctgggcaggatggggaggaatgtgagggggaaatgtattgggggggtgtgggggaaaattcagttttgaaacttgtcaaaagagaaagtggaagggacggtggttctcagagcagaaggaactctgaggacaggaaagataagacttgggtgaattgggttatggattgtgactcttctctttctctctttctcagcggaggcctcactaactccctttatttgagccatcccagttccaagatgtagtgagtgtgtgggcatgctcaagagagtgtgtatgtgtgtgtgtgtgtacacacgtgcatgtgtaacagctgtataagaagaggagttacagcctttagaccttgggtgtgaatctttggacctgttttccaacctgggaaatgaggacaattaacaagttttttttttttttttttttttttgagacagtctcattctgtcacccaggctggagtgcagtggcacgatctcggctcactgcaacctccacctcccaggttcaatcgattctcctgcctcagcctccagagtagctgggattacaggcacgcgccaccacacccagctaatttttgtattttttgtagagacggggtttcaccatgtttgccaggctggtctcaaactcctgacctcaggtgatatgccttcctcagcctcccaaagtgctgggattacaagcgtgagccaccatgcccggccaacaagtcttttaagatgagatgagatattatagaaaggacctacctagcactgtatctgtagaagctctacagattatgcactccccaccccatattctgcccattccaacacacttgacagttcgttagcagagttagagtatataagcaaggtgagtgggggcagtggctgggagctatggcagagcttcagttaatctcaattagttacacaacgaatctttcgtttttggtaataatctttgtatgcattttttatccccattttcttcataggtgttagattttcctgagatcagggactttgagggagggcaggtaagtgtggtgtcaaggggccccttccacaatcctgttttgtttagctcactatttaataaaatccaagagttctcagaaactaagatgtgaagaggcagccctgaaacctactggggagcagaaggaagccaatttagagtttcaagttagtgatggaaaatccatcaactgtatagttcacaatgggatagaagaatgaattgccgtttaaaatctgctttttcaggccaggcacgatggctcatgcctgtaatcctagcactttaggaggctgaggtgggtggatcacttgaggtcaggagttcaagaacagcctggccaacatgatgaaaccctgtctctaccaaaaaaaaaaaaaagacaaaaactaaccaggagtggtggcacatgactgtaaccccagctactcaagtggctgaggcatgagagtcatttgaacccaggaggcgaagattgcagtgagccgagattatcccactgtactccagcctaggcgacagagtgagactttcaaaaaaaaaacctgtgaaaaaaataaatacgcaaatacataaaatctgccttttcaagacacacacgtgaccaagaagcatatgaaacaatgttcaacattactaatgattagaaaaatgcaaatcaaaatcataatgagataccgtctcacaccagtcagaatggctattattaaaaagtcaaaaaataacaaatgttggagaggttgcagagaaaacggaaggcttatacactgctggtgggaacataaattagttcagccattgaggaaagcagtttggcaatttctcaagaaccttaaaacagagctaccattcgtcccaggaatcccattattaggcatatacccaaaggagtatacattgttctaccataaggacatatgcacatgaatgctcactgcagcagtattcataatagcaaagacatggaatcagcctaaatgcccaccaacagtagactgtataaagaaaatgtggtacatatacaccatggaatactccacagctagaaaggtcgtgctcacgtcttttgcagcatcatggagctgggggctgttatcctaggcaaacctacacaggagcaggaaatgaatactgcatgtctcactttatagtggagctaacatgagacacatggacacaaaaaggaataatagacactgggccctacttgagggtggaggatgggaggagaagaggatcaaaacactacctatcagatactatacttattacctgggtgatgaaataaatttttacgccaaatcccgatgacacacaatttacctatataacaaacctgcatgtgtacccttgaacctaaaacaaaggttaaaataatttaaaataaataaaaaataaaatcttacttggtattctcaaaaaataaaaaacaaaatctgtcttttcaggggaagaaaagtaggaaagctttatctcattttcctagtggcttcataatgcagggacctgcccccagggaacagggtatagtaggggaaacacacaggggtgtttagagtttggcgaaaggcaggtgagctctgggcactgacccgtcaccagctatttttcaaggagtctgagaggtgttaacctgcggtctaccccgtgagattgctcagagtgtaggaggatatggtttactagctccggaaagcagctattataactgaggaggaaatgaagcttgactggctagaacagaagcaacaatggaggcccatggagggattttccaggcccctattcctgatctccatggtggcgctgcttcccttattctgcagtcttgctttgagaccagacaattctgtactctgtctgtgccttcttccttctcagcagccctgcctctgccacctgccccagaagggctctgggtcctctcatctcaggacagacaagggtttttgtaattatcttcttgggtaacctccctgtaaggaataggagaggttatctggtcctggtcttttgggagagcattgagaagaaaaagttaaaccagtgggcagcccaggctgcatacatcctgggaatattgcgattattctctccagtaatctacggaaatctactggttgttctgcagaaaaagaattaagagagacaaggagacctgttgtctaagactaaggcaggatgacgtttacctagtaactgatgatgctaggctgaggcactcagtgatttgtctctacatttgtccctgcctacctagccaatctgtccctgtttgggacactggactcccgtgagctggaaggaacagatttaatatctaggggctgggtatccccacatcactcatttggggggtcaagggacccgggcaatatagtattctgctcagtgtctggagatcatctacccaggctggggcttctgggacaggcgaggacccacggaccctggaagagctggtccaggggactgaactcccggcatctttacagagcagagcatgatcacattcctgccgctgctgctggggctcagcctgggctgcacaggagcaggtaaggacacttcttctggggactctcccttcccctgctcctgtttcagggtaagggtgttccgttttgtaattgcatttgacaccccagatagtttgtctccctggtatacattcctatagcactttgtactttgtagcaattttaatgtaattaatctgtataattatctgtgcagtgtatattccctgctggaatataggcaaggacaatgttcatcttatttattgctgcctcctcagctcctagcacagtgccttgcatgcagcaagtgcttcataaatatgtgcgaagtgaatatttaatatttccagcacaatacaaggctgactctttctcttgaccctttttctctctcaataatttgccttactgaaggtctgtgttctgggcaaattgtcatgtttaaacatgcaaataatctcggggggctactcctatccctgtgcttagtcttgcataaagaggagactggatctaaaaacttatctactacttctactgactccctcaaatcagactttcagaaacttcagtgtatgagcttggtcagtagatgttccctgagcaggaaatctgtgccagactagctggatgtcaccaaggcttaggttctgagctgaatataggaaaaatcaactttttttcttctatatgctcacactcaacacttctttgaccaactgtgtgaggttttttttttttttttactcataccaaccaattctcctatattagctggatatcctataattcaattccattgtgacattaactagagttaacatagacaccaaaggttaaagactcagtcccataagactgcctccatttcagacaccaatcacaagtagtaggttcccaaattacccacatcttctgtccaacttgcctacaaatcagaggttcccatgaccccctccttggggttggtaatttgctaaagtggcttatggaactcaggaaaagtttacttattattgtagattttttacaaaggatattttaattgataataataattataaatattcatggggtggataatgatgttttagtacatgtaatgtacagtgatcagatcagatcatcatctcatttatcatttctttgtgttggaaacattccatatccttcttctagcgatttgaaatgatataaagtattattgttaatgacagtcatcccacagtggtatagaacactagatcataattttgcatcctttaacaaaggatattttaaagcatacaaaggaacatccagatgaagagataccagatctggaagggtcccaatcacaggagctctgtccccacagaattggggtacttcacctcctggcatgtggatgtgtttaccaactgagaagttctctgaactccatagttccgggatttttatggaggcttcatcatgtaggcatgactgattattaactcaatctccagccccttccccttcagggagtatgggggatgggactaaaagttccagacttctaatcatgacttggtctttctggtgaccagcccctcctgcaggagcccaccaagagtacctcattagaacaaaagacactcctgttatctaggaaattctaagcgattaggcactctatgtcaggaaccagggtcaaagacaaagctctgtgcagagctcctaaatatacgtctgtatgttttatatatttattatttgtgtatatttattatttatatatttatttatttattgccaggccagtagaagacattgacctgttctcccttccctggctcctctaggtggcttcgtggcccatgtggaaagcacctgtctgttggatgatgctgggactccaaaggatttcacatactgcatctccttcaacaaggatctgctgacctgctgggatccagaggagaataagatggccccttgcgaatttggggtgctgaatagcttggcgaatgtcctctcacagcacctcaaccaaaaagacaccctgatgcagcgcttgcgcaatgggcttcagaattgtgccacacacacccagcccttctggggatcactgaccaacaggacacgtgaggagagaggggtgcagaggggctaccaggaagtgcagttaggagggcaggccagggaggatcccacagtggcccaggggtttgagatttgagcagcaaataagagaaaatgtgtggatctgaaatgtagaaagacggaggattgaacctcaaggggaacaaggtggctgacgtgagtggaacaggagtaaagaaggggaggtgaggcttgaaccgcgaggtgccatgtggggagcttatgcagaggctggggcatctcaggatgcatacccaagatgttcttgccttgttatcccagattttgatgttccagatctgatgtgggcccaggcatgggaatatttggaatcccaggggattctgacacatgctttttctcacccttaaactcttgcattgacaatggcttgaagtttgtgaaagtaaacttgaagatctccacagtacagaacagtgtgtctcaagggtggtttctgaaccacctttctcagaattgcctggaggaggtgcttgttaaagatgcaagccccttagtaccactccagatctgttgaaagaaagtatctggggatacagcctaggaaatctgcattttaacataattccttggatttttatttaagattgtgtttgaaaaatgtcaagatagaggcaagcaagaggatcacctaggagagtaaattagtaaaagatggcagtattagcaatctctttagtttgactacattcattccaaatttaagagtgagtcctaagttaggcttgtttccttgaactatgtgaggagaaaaagctttaactagcaaaagaacgtattaaacaagatttggagaaaaattccttttccaccttaaaaaaacccaatgtacaactctggattactcttagcttccttatttcaaatactttccagtttatgtacttgaaataaatacaacaacttctagaacagcttgcagttcagatctggcttttactaattgtaatcaaacataattctggaggaggaaagaaagaaaggggcaatgaaggaatgggagagaagaaagagtaatgcaggaatacattctaacggttccccttcaaggggcagcatggcagagggggctggggtggaaagtgggttgcaaaatctacgaagagttgcgatagggaagaaaccaggttgaggaagcagccagaatgtcaccctccttcctaaacatgtttttttctcctatgcagggccaccatctgtgcaagtagccaaaaccactccttttaacacgagggagcctgtgatgctggcctgctatgtgtggggcttctatccagcagaagtgactatcacgtggaggaagaacgggaagcttgtcatgcctcacagcagtgcgcacaagactgcccagcccaatggagactggacataccagaccctctcccatttagccttaaccccctcttacggggacacttacacctgtgtggtagagcacattggggctcctgagcccatccttcgggactggagtaagtgtatggcagatggatggaattagggtcaaagcagagaaaatgagatgtggatcgatacatggtacatggtagacagcgaagtgctgaaaatggggactgagtctggaggaacttacggggggcttaggaccagaatggggaaatgggataaagaaatggaaatatttaggttggtgcaaaagtaattgcagtttttgccattactttcagtggcaaaaaccgcaattacttttgcaccagtttaatatttagtctgtgctattgctgctctggtggtgtggttgatgttgctgcgtctatgtttgagggtgagaggggagcgtgcttgctttgaaatgaggatgtaaatttggcaatcatattttcagaaccccaaattgtaatacactattctagcctccttagatttcaactattctggtgccagaagcagatgggagctgaaggaatgatgaaggttgaagaaggggggcttttcttggtgtggggcagtactgcatttggcctgctctaccaagcatacgggagtagtaaagccacggctggcagaccatttggcatgcatgctcaggggccagtggataaagaattacttacagttcaaacactgtttgaactcagtgtcgggagtagttaaaggtatcgtgagaagttgcacacagctttggggactcttggaaaagaaagaggaagaaatgaggaagaggaagggtgtctacaaagggccagagaacaggatctcagatcagctgctgtaaccaggtttccccttgtgggaagtgttgtttcttgctgggcagttgggaagggaatggagaacagagaagagagtggaaatcacatgctcacttgaactttcctggggaacgtctcctcacagcgtgcacaagagcctccctttagaaatggagtgttcattttatcatgggaaaagaatctgagtgggacatgattcagaacaggaccggcccaaggaagtgcaggggctgtggagtgggatggagacaagctctgaaaggacacatgggagatctagatgtagaaggtacacaagtagtaggataactcacaggatggatccactggaggttaagacatgtggtaagacagtgtaataggaagctgctcagttggagaaagtaaggaagcaaacattgttaccgtgggggcaatggagaggacagtgaggagccctttatcctgataagggtggctttgaggtaaaggaaggaaagaggatgccttgagaggccccactgtattagagaggacctggaagccaggatgctaattctggggagatggattccccaggcttactctaggagtagaggtccatgggacgagggtttgatttgagaaagatcattttcttgggagtgggtggtgtgagctagacccttggagctgggataaaggaccttttaacccactgagaggtggctgcaataaatggaattgccctgggggtgagcaacagaaactgggtcaagtaagtttctattttttgcagcacctgggctgtcccccatgcagaccctgaaggtttctgtgtctgcagtgactctgggcctgggcctcatcatcttctctcttggtgtgatcagctggcggagagctggccactctagtgagtgactcgctgaactcccatccccactcttggtcccactctctgcttactttctgtttgtgattaactctctccttcctactgcatttgctatgaatactgctagatattttcatccacaaagactggtataatcaagtatcttcctctcttaggttacactcctcttcctgggtccaattattcagaaggtaacatctctgttggtctgtttccctacttgccctttggtaggggtgcgggttagaggggtcagtgttgggttcaactaatcttgattattatatgggtgagcttccatgaggatctaggcaagggcatgatttaagctgccattgctaggattaagagcaggaaggagcatcctcctcttctaccaagtgggatgtctgtggagaggaggctgaaggtgcttcctttgtattagttgttggtgccctggagttttcagtatcactgtattaaggcatgggatggttacagtgacaaacgatgggggcaagttgggttgaagcctcattatctcccttttatttattctgtaggatggcacatttcctagaggcagaatcctacaacttccactccaagtgagaaggagattcaaactcaatgatgctaccatgcctctccaacatcttcaaccccctgacattatcttggatcctatggtttctccatccaattctttgaatttcccagtctcccctatgtaaaacttagcaacttgggggacctcattcctgggactatgctgtaaccaaattattgtccaaggctatatttctgggatgaatataatctgaggaagggagttaaagaccctcctggggctctcagtgtgccatagaggacagcaactggtgattgtttcagagaaataaactttggtggaaatattgtttttccatgtcttcttcctggggccctggggaaggaatatgggcaaagcagggactgaggttaattctcttctgcttgagtaggggagaaatcaatgccttcttccattttcccacttagacatgacagaatttggggccgttttctgatttataattcataaggagaaattcaactgtggtgggttggagtcacagagtatgggcaaggaagggaattaacagcttactcacctcatacaggatcttatgaggattaaatgagttcatacttgtaaatggctaagaacaccgccaggcacatagccagcctgcaatagtgacgttagctatattcgattattcaactttctggccaggcattgtaccaggtgctttgatcctcatcacaaccgtaaggcagacccctcatacccctcaggattcaggggacagagcttaactccagattgagttctagacagttatttcttccataccctgaatgcagaagggaacatagcttgagtgattattatgtcttaggcactggtctcagacctttatatttgtagctcattctcttctcacaataaccacacaagggacagattgtttccctctatgttacagacaaaagatgtgaggctcagagacatttaagtgacttgtccaaggtcaaagaacagatttctgtaggatgtttgtctacctgagctggaagtagcagattactttattctgaagaccctcatgctggtgagcacacatctcttcagagccaccgttccattcccttctaccccaagaccaaggagagccctttgggggaatggactccaccctaaggaagagaggatgctggctggtggtttgttgtcccacgaagggcgacacctgctggacacagaaacctagggtgtggaattgtttttggaattagagctagatactagaatatgggtaagaaaaagaaaccaagaaatgagttgatttggaacacctccataatttcttcagaagcatccttggaattagagcatctcttctggaaggggttaacagaagaagtcagtggaaggaacttaatctctacattttaccatttttatgtttcattttcattttttctattcactgtttttgtttttatttttgtttgtttgacaaagcaaattccttttgaaattctagtttagtctaggaatggggggctttgggccttgtctatatctgggcagttttatttattatttttattttatttatttattttttttcgagacagagttttgctcttgttgcccaggctggagtgcaatggcgtgatctcggcttattgcaacttctgcctcccatgttcaagcgattctcctgcctcagcctcccaagtagctgagattacaggcgtgcaccaccatgcctggctaattttgtattttcttagtagggatggggtttcaccatgttggtcaggctggtctcgatctcctgacctcaagtgatccacctgcctcagcctcccaaagtgctgggattacaggcgtgagccaccgcactaggcctatctggacagttttaaaggagaagctgcagatctgaagggtctagttctagtcacagcagtgggaatcaaagtggcaggatcccagagaaaggaagtagagagttagctaatgggacggcttccagttccttttctagagatttccagtgcaggcttttctctgccctaactttgtaggttttttgttttataggaaaggctgtccccttccaggtaaggaatagggaaaagtatatgtaggtctgctaggatccagaaagtcagaatactataggtagaaaggggagttcttacacaggggaatgagtggtacttgaaaggaaggtggaagaagggtgatggtgcaccaattgtaggaggatgaggagaagagaatggatgctgcatgaggagaatggaatgtaaacataatggattgccaaaaaaggagtgcgtgtgtgtgtgtgtgtgtgtgtgcacttgagcacatgtgagagaaagagaggaaaaaaagagaaggagtggaagagagtaagagagagggagcaaaagggtgagaggagagaagtggagtgggagaaagaaggagagggacatagagagagggagggaggggagcgggggaagagagagagagctggactttcgggttatacataatccaagctgcacaaagaattgttttcgcccttcaatgtcttgttgttttaaaagctgaacttggagctagaattggttttaaaggtcatctagtccacctcccctcccatgaaagaactgggcctgtgttaacaagggcacacacagtgcagggagttccttcaacacttggggcagataacaatattttagagaaacgcgttgaccccacatttgagcttcttcttttgaccattaaagacaatgagaataaatctcaaatacaccacgggaggtggtatccttggcattttttttttccctgagggagagcatgttcctaggttccaggttctctttgcctccctacccacgaacacatgcatgtgaaagaaacagacaagattgacatttaatcccaatgtctatttatgaaaattatctttaggccattttctcaagtttttctctttccaaagtaaaattgggcaaatcagatgaaaaacgagggtggagttcaaccccatcctcaaatccttttttttttttggcttgagtgtctgtcattcccaagagccctccaactgccttgaagcaaggcatgggggatttctccgtggtgcttcctgccactacttggccagaccagtctccaggggtttcagagagtggagaggccccaaacctatagagactactcccagatggggggctccttgtttctccagacccttcctcttccatttcatatgaggcttccaagaggcccctggccgtgctggtctggggcagggaataaagaaatggcttttattgtatcagagtctcaacagaaaacagatggcatactcgaaataggacatttcaaggaaagtttatttattagcaaagtatttacaaagaactgggtggaggatagctgttactaccccaaggtccaaagaggccggggacagaaggggttatcaggactcagaaggacagcaagccctgtacagtcaccaccttgccaagggcagtgcccttcagtcaagggacacaacagcttaaggtgaccttgtagggaggaagccaagggattagaaacactgacctcactcccctcttccctctgctcttaggctgatgctggaagcaagaagaagccagggagcatgggagccattcaatgtcatgcaggtcagcacctgaggcagaccccaggtgcagaagtattgagagtgggtccagaaggacagatggaggacaggaagtacattcacaacaagaaggaaaaacgtcaatgttgtggggtggagagagaggtgcaaaatctgggcttcttttggccttggacaatgacaagcgcatagtagcaacagaaactaagtttgtagtttcctactggggagtttgggaggacactcacttctagttctgtcttccccacttgaattttgattgtggttatactgaatttatagaaatttggggttaactgacttgtttttattactaaatcataccatgcaaaaacaggatgttttctcatttattgaaatcattttgtttgctctttattatggtttttaaactttactttttcatagtagtcctgagtatgctcagttaattcttaggcatgttgtagcttttgctgctattgtgattggtatcttattgcaattctacttttgaatcagtaatttctgatgtagaagaatgtatctaatttaaaaaattgtggttaaaaaaataacatttaccgtcttaaccactttgaagtgtacagctcagcagtgttaagtatattcacatttttgtgcaaccaatctccagaactccttttcaccttgcaaaaccagaactctacacccattaaacaacaactcctcatttctctcttcctctagcccctggctactatcactctacattctgtttctatgaatctgactacttcagataccctgtacaagtgcaatcatggagtttttgtcttttggcgattggcttatttcacttagcttaatgtccttaaaattcatacttgttgcagcatgtaagagtgctttcttcctttttaggctgaataataagctactgtatgtatatgccatattttgtttgcccattcatctgtctatggtcatctttgttgcttccacctcttggctatcgagaatagtgctgctatgaatatgggggaaaatatctgcttaagtccctgctttcaattcttttgcatttatacccagaagtggactcttgggtcatatagtagttttactactgattttttgaggaactgccgtactgtttcccatagcagttacacattttacaatcccacgaacattgcatataaaggttctaatgtctctacatcctcaccaacacttatttcttccctccctctctcccttccttccttccttccttctttcctttcctccttcatttgctccctccttcattccctcccttctttcctttttcctttcatttttatagtagccatgctaatgagaattagatgatgctatggttttaatttgcacttctctaataataagtaatgctgagcatcttttcatatgtgtgtttgccacttgtatatcattctcgaggaaaaattgtctgtttgaaagttttgtttgccccctttttaactgtttgtataaacaattattgttgggttttatgagttctttacatattctgaatattaaccctttattggatatatgatattcaaatactgatatatgattttcaaatattagaaattaataatttttgtaagttgatcttatatgggacaaccttgctcgatcctcttattggttttagtggggtttttgttgttgttgttgtcattgttgttattgatattctctctgtctctctctttttccaggtagataatagtatcatctgcgagcattgttttgtgttttccctcttaatccttagtgttttatttttcatgttgcttgactaggatcttcaatgctgtgtcaaacagtagggtgataatgagcattactcttaaaggaaataaacctaaatattctcattaagtataattttgctgtatattgtagattcacatgcagtggtaagaaataataaaaacaatcctgtgtatcctttacccagtttcccttgatggtaacattttgcaaaactatggtacaatatcacaattaggatacatggatacagccacaatacagaacacttctatgatcacaaggattcttcaccttgcccttttctagacacacccacttccctaccatcccataccctccttaatgtctagcaatcactaatctcttatccatttctatgactttgtcacttcaagacaaatttttttttgtcattttaaaacaaatgattaataaatggaaacatatagtatatacacttttgggattgacttttttttctctcaatgtatttctctggagatcatacaaggttgttgcatatatcaataatttattattgcctagttgtattatatggtatgggtatagcacagttagtttagccatctgtccatcacatctgggttgtttccagatttggctgatatgaatataagtttttgtgtggacataagtcttaatgtctctggagcaaatgcccaggagtgtacctgctgaattgtatggtggttgcatttttagttttttaaataaactgtcaaagtgttttccagagtggttgcaccagcaatgtgcgagtgattgttttactgcatcctcacaggcatttggtattgtcactattttttttattttttttgagatggagtcttgcactgttgcccaggctggagtgcagtggtgcgatcttggctcactgcaagctccacctcccgggttcgcgccattctcctgcctcagcctcccaagtagctgggactataggcgcccgccaccacgcccggctaattttttgtatttttagtagagatggggtttcaccatgttagccaggatggtctcaatctcctgtcctcatgatccgcctgcctcagcctcccaaagttctgggattacaggcatgagccactgcgcctggcttattgtcactattttttatttcagccattctaatatgtgtgtagtgagatcttattgtggttttaatttgcgtttccttaatggctaatgatatcgaacatcttttcatgtgcttatttgccatctgtatatccttttaatgaaatgtctcttcatgaatttttcccattttctaattaatttttttcaaactgttgattttttttctttttttttctgagatggagtcttactctgtcactcaggctagagtgcagtggcatgacctcggctcaccccaacctctacctcctgggattacaggcgtgtgccacaacgcccagctaatttttagtatttttagtagagacagagtttcaccatgttggctaggctggtctcaaactcctgacctcaagtcatccactcgcctcagcctcccaaagtgctgggattacaggcatgagccagggggcctggcctgagttttgataagttgttatatattctagatactagtccttttttggatacatgatttgcaaatattttcttccattatgtagcttgccttttcattcctttacaagtctttcacagagcaacagtttttagttttaatcaggtctaatatatccattttttcattttacagatcatgtttttggtgtcaaatctaagaacttgttgcccagatctagattcagaagattttcccctatcttattctaaaagttttatagttttacattttgcatagaagtttgtaatccatattgagtcaatttttgcagaaggtatgagtcttagattaaactgctgctcctccttctcttcctccttgttgtctttctctcctcctatggcccttgaatgttcaattgttccagcaccatttatgtttttccgatgtctgcagggtgtgtagggatattccctgtggacatttctatattctttctttcttctttgtcagtgtagtctgctagaggttcatcagttgactgatcttttcaaagaagcaactttttgtgtctcactctgtggcccaggctggagtgcagtggtgcaatctcacctcactacaacctccgcctcctgggctcaagtgattctcctgcctcaaccttccaggtagctgggactacaagcgcctgccaccacatttggctaattttttgtaattttagtagaagcagagattcaccatgttgggcaggctggtctctaactcctgagctcaagtgatccacctgccttggcctcccaaactattgggattacaggcgtgagccacagtgctcggccttcctttcttctttggatgtattttgatcttctttttctgggctcttgagatgagagtttgaattattaatttgtgtacttttttttttttttaaagagacaaggtctccttatgttgcccaggctggcctcgaactactgggctcaagtgatcctttcctgcctcagcctcccaagtagcacccagtttttcttctttttaatgtatgcatttaatgctataaatttccctttcagcactggtttagctgtgtcctataattttttttattattttgaaaatatttcgtgggttcatggtaggtgtatatgtttatggggtacatgagatgttttgatacacgcctggaatgtgaaataaccaaatcatggagaatggggtagccattccctcaagcatttatcctttgagttacaaacaattcaattacattctttaagtaacttaaaaatatacaattaagttatttttgactatagtcactctattgtgctatcaaatagtaggtcatattcattctttctactttttttgtacccattaaccatccccacctccccgctcagctatccactacttttctcaggctctggtaaccatccttctactcactatgtccattagttcaattgttttgatttttagatcccacaaataaatgagaacatgtcatgtttgtctttctgtacctggcttatttcacttaacataatgatctccagttccatctatgttgttgcaaataactggatatcattcttttttctagctaaatagtactccattgtatgtatgtaccacattttctttatccattcatctgtcgatagacacttaggttgctccgaagtcttagctattgtaaacaatgctgcaattaacataggagtgcagatatctctttgaaatactaattttctttctttcgggtatattcccagcagtgggattgctggatcatatggtagctcaattttaatttttttggaggaacttccaagctgttctccatggtggttgtactaatttatattcctgccaacagtgtacaaagccttctccacatactcaccagtacttgttattgcctgtcttttggatacaagccatttttttttgagatggagtcttactcagttgcccaggctggagtgcagtggcccaatctctgctcactgcaacctccatctcccaggttcaagcgattcttctgcctcagcctcccaagtagttgggactacaggcatggcccaccatgcccagctaatttttgtatttttagtagagacagggtttcaccatattggccaggctggtcttgaactcctgacctcaggtgatctgcccgcctcggcctccctcagtgctgggattacaggtgtgagccaccgtgtccagcctgcatacaagctattttaactgaagtgagataatatctcattgaacttctgatttgcatttctctgatgattcataatgttgagcacctttcataagcctgattgccatttgtatgtcttcttttgagaaatgtctattcagatcagctcattttttgtttggactattgaactcttttttcctatagagttgtctgaactccttatatattctagttattaatcctttgttagaggggtagtttgcaaatatcttctctcattctgtgggttgtctctcctagaaatttttgatatgttgtattcttattttctttcaattcagtgtatttttaaatttcctttgagatttattttttgactcgtagagtatttaaaagttttcgcttagtttcttgactttcctctgtcatctttctgttatttatttctagtttgattccaatgtagtcagagaacacattctgtataatttatattcttttaaatttatcaatatttgttttatggccctggatatagtccaacttggtatatgttgcatggacacttcaaaagaatgtatattctgtgcggccaacaagcatgtgaaaaaaatgctcagtataactaatcattagggaaatgcaaatcaaaacaatgatgagacaccatctcaccccagtcagaatggctattgttaaaaagtcaaaaacaacaggtgctaacaaggttgtggagaaaaaggaacacttgtacactattgggggtaatgtaaattagttcaggcactgtggaaagcagtctggagatttcccaaagaagcttaaagcaaaattcccatacaacccagcaattccattgttgggtatatacctaaaagaatataaattgttctgtcataaagacacatgcacatgcatgttcatcacactgctattcacgttagcaaagacatggaatgaacctagatttctttatccagtgctcatcaacagtgcactggataaagaagatgtggtacatatacaccatgaaatactacacagctataaaaaatgggatcatggcctttgcagcaacatagatggaactggaggccataatcctaaacaaattaccgcaggagcaaaaaaccagctaattgcatacacatggacacaaatagggaaaaatagacactggggcctattgagggtggagggtgggaggacagtgatgattgaaaaagcacctatcgggtattatgctgatgatttttcctctgctgtctttccgttattgatttctaatttgattccattgtagtcagagaaaagtttgtataatttaaattcctttaaaattatctgtacaccaaacccttgtgacacgcaatttacccatgtaacaaacctgcatatgtaccccttgcacctagtaaaaccggaaaagaaaaacaacaaaaaagagccaatgtgtattctgctattgatgggtggagtgtcctgtaaatgtggatttgatcctgttggttgatggtgttattgagctcttctacatctttgctgattttctttctagtttttatttttttatttttattttttttgagacagagtcttgctctgtcccccaggctgctggagtgcagtggcaggatctcagctcactgaaagctccgtccccaggttcacgccattctcctgcctcagcctcccgagtatctgggactacaggcgcccgccaccacgcccagctaattttttgtatttttagtagagtcggggtttcaccgtgttagccaggatggtctcgatctcctgacctcgtgatccaccccctcggcctcccaaagtgctgggattacaggcctgagccaccactccctgccttctttctagttttattaatagttgtgagagttgtgttgatgtctccaattataattgtggattttctattttttctttcagttccgtcagtttttgcttcacatattttacagctctggtgttttgggcataaacatttctgactgcaatgtcttcttgatagactgacccttctattattataaaacgtccttatctttctctggtaattttttttgttttggctctgaagtttaccttatctgagagtagtacactcactcctgtattcctctaattaaggaaaacatgttgtgtctttttccatccttttacttttaacctgcctatgttgttatatttgtgtggttttattgttgtttttgtttgttttgtgttttttttgagacaaagtctcatcttgtcacctaggctggagtgcagcggcacaatctctgctcacggcaacctctgtcttccagggtcaagcgattctcctgcctcagcctcctgagtagctgggaccacaggtgcacaccaccatgcctggctaatttttgtattttagtagagacggggtttcaccatgtaggccaggctggtctcgaactcctgacctacctcaaattatccacctggcttagcctcccaaagtgctgagagccactgagcctggcctatattgttatatttgaactgggtttttttttgtttttgtttttgttttttgtttgtttgtttttttttgtagagtgctgggtttacaggtgtaagccaccatgcctggcctgaactgggtttcttaattgaggtatttagatcatttgcatttagtgtaattttttttcttaatttttatgtttaattattatgggtacacaaccgttgtatatattagtgaggtacatgtgatgttagttacaggcatacaatgtgcaatgaccaaatcagagtaattggggcatctaccacctcaagaatttatcatttctttgtattaggaataatgtaattattgatatatgtattagcttggggtgccataacaaaataaaactaggtggcttaaacaacagaaatatattctctcacagttctggaggttggaagtctgagatcaaggcgccagcatggtcagcttctggtaagggctcttcctggcttatagagagagttgccatcttctgggggcagagtgagagagaaagagagaggaaggctgggagggagaaagagcaagagagcataccctggtttctcttcctattgaattaatcctattgaatcatggccctacccttatgaattcatttaacctgaattacttctgtaaaaggccctatctccaaatatagtcccattggtggttagggcttcaacatgggattctgtgggacacaatccaacctgtagtaacatgaagggcttaattgtttttcatttattttgtttgttctctccagttttcatctctgtttactcttttctgactttctgtggcttacttgggcattttttagaacgccagttttatttatctacagtgtttttgagtgtattgatgcataacttttaagtggttgctttaagtattacatatacatgtaacttgtcacagtctgctggagtcatcatttaccattttgagtaaataataaaaatcttaccttcctaatttatgtcccatccctttatcctcctcactgaaaatacgattgtcttaaatgtttcctctacatacatttagaaccacatcagtgttataattttggcttcaaccatcaaacatactttagaaaacttaagaggagaagaaaaatttattgtatttacccatctatttgcttaccttgttctatcttcttccttgatgttccaaggttcctattttatcatttccattctgtttagataacttcttttagccattttcattatttctgggcaggtgttctccccccgcccccatctccattgacatcttagagagggggccccattactggcttgcagaaatgaaattcttagcttcctaattggtcttcttggataccactgcagagtgatgttggagcaccttgttacagcttcaagagggtgaaagtttaggtctcccacttggtctttctggtgtgaatggcagtagagtcacagttattgctatggtatttgcctagaactgaacagttactttctaaggcttgacaggcttgcctgcctctgtcttggtcttttggctagtgatatcagggcttttgttgtaagtgttgttggggctttttctgtttgtttgtttgtttgtgccagttggtctttccaaattgtcactttcttcagctccaagcccagcatatatgtggcaaaaagaaagcccagggaactcactagtatgtcattcctcagatcctgagattctagctgttctgccttctcatttccaccttttagagtcttcttatgtttgttttatatatatataatgtccagagtttttagttgtacttagtgagatgaataggaaaaagtatgtctactcaatttttccagaagtctttgctgtcaacctttactaaattagtaggtttccttttattcctggttttctaaaagtttattttttaaacataaatggttttttacatttaaaaaatagtttatcagaattgactcatttcattgtattttccttcttaatctcctaatatagtgaattatattgagagatttttaaaatgtgaaacatctttgcattcctgggataaacgctatttgttcatcctatagttacacatttactgttggtgttatttagttaatattttacttgggttgttgtatttacttttataaagcatggacgtaaaacttgcctttcttgtatttccttgtttgtttttgtaataaaaatttctctaaacaataacctaggcagattttgttcttcattctgtttcctggaataataaatagaaatgtcttttcaaagggcagcttttgtttttgttcatctattttattgtttttatctctctttttcttttatgactatctttactatttccttcctcctttgggtgtattctgttcctctttacctagcgtttgagttgaacactcagcttattgattttggtctttttttgtgtttcctagtaagtgtatttaaaggtaaaaaatttccttctaagttctgctttaatcatatctaacacattttgatatgcagtgttttaatttttatttaattctacatattctttatatttttcttttaactcacaggttacttgtgacatttaaaaactttttattttgaagtaattttagaagagtagtacaaagaattcttacgtacacttgtccaaattcaatgatttgcaacattttgtcatatttgctttctttttctctctgtctctgcttccctctctgtttttttcctaaaaaacattaatattcctaagtccatttagggacttactctaaatggttatgaaaaaacattagagagaaaaaatggtttactctaaaatggttaggaagtctggagttacatacacacatgcccctttcctgctaaatatttcaatgtatttcctaagaacaaggctgttctcttacataaacacagaaaaacagtcatattaagaaaatttaacttggatataatattagctaatccacagtacatattcaaattttaccagttttcccaataaagaaccttataactccagccactcccagtctcttgtcctgcaatccagaatcaagcatttcagtaagttttcatgtctctttggtcatttttaatgtgagagagtctatcagtttcttatttattcaggttttattaattagcttgaacttatataattttattattttgcccttcaagaactctgctttttttttttttttctttttggtctagtttatctaccagtttttgagagagggtttgtaaaaatcatcaaatgtatttttaaaaaactcaacttctaactgtagttctttcacttgttgctttataaattgtgaggctgtattgttgagtttatatatatttatgattactatatcttcttgtttctttaaaagttatatgaacatcttttcttttgtcctttatgcactttattttttttatttttatttttttttgagatggagtttcgttcttattgcccaggctggagtgcagtggcacagtcttggctcactgcaacctccatctcccaggttcaagcgattcttctgcctcagcctcccgagtagctgggattacaggtgcgtgccaccatgaccggctaatctttttgtatttttagtagagatggcgtttcaccatgttagccaggctgatctcgaactcctgacctcaggtaatccgtcctcctcagcctcccgaaatgctgggattacaggcatgaaccactgcacctggcccaaaatagaatttaaggttaaaaataaagtgcaggctggacgtcgtggctcacgcttgtaatcttagcactttgggaggctgaggcaggtggatcacctgaggtcaggagttcaagaccagcctaaccaacatgatgaaaccccaactctactaaaaatacaaaagtagccgagcatggtggcacatgcctgtaatcccagctactcgggaggctgagtagggagaatcggttgaatccaggaggcagaggctgcagtgtaccgggatcgcaccattgcactccagcctgggcaacaagagtgaaactctgtctcaaaaataaataaataaataaataaataaataaataaataaagtgcataggccgggcacggtagctcatgcctgtaatcctagcactttgggaggctgaggcgggtatatcacctgaggtcagaagttcaagaccagcctggctagcatggtgaaaccctgtttctactaaaaatacaaaaaattagctgggcatggtggcacacctgtaatcccagctactcgggaggctgagacaggcgaatcacttgaacccaggaggcagaggttgcagtgagccgagattgtgccattgcactccagcctgggagacagaggaagactctgtccccctcccaaaaaaaaatcaattctattttgttacatattgagactgttgcccaactttcttttgtgtcatatttgccaccaggtaaatcttttttccctgtttttaaatttcaatctttacatatctttctgctttaagaggatttgccatatgcattcatattaaaaactttcaataaactaggtattgaaggaatatacctcaaaaataataagagccatatatgacaaacccacagccaacatcttgctgaatgagcaaaaggtggaagcattccccttaaaaaccagcacaagacaaggatgccctctctcaccactcctactcaacatagcgttggaagtcctggctggggcaattgggcaaaagaaacaaataaagacgtccaaataggaagagagaaagataaactatccctgtttgtagatgacatgatcctatatctagaaaaccccattgtctcagcccaaaagcttcttaagctgataaacaacttcagcaaaatatcagaatacaaaatgaatgtgcaaaaattactagtattcctatacaccaaacaacagtcaagctgagagccaaatcaggaatgaactcccgttcacaattgtcacaaaaaaaataaaatacctaggaatatagctaactggggaggtgaaagatatctacaaggagaactacaaaccaccgttcaaagaaatcagagatgacacaaacaaatggaaaaacatctcatgctcatggataagaggaatcaatatcattaaaatggccatactgcccaaaacaatttatagattcaatactcttcttattaaactaccattgagatacttcacagagctagaaaaactattattattattattatttttttgagacggagtttttgctcttgttgcccaggctagtgtgcaatggtgcgatctcggcttaccacaacctctgtctcccaggttcaagcgattctcctgcctcagtctcccgagtagctgggatattacaggcatgcgccaccatgcccagctaattttgtatttttagtagagacatggtttcgccatgttggccaggctggtctcaaactcctggcctcaagtgattccccctgcctcggcctcccaaagtggtgggattacaggcctgaggcaccgtgcccggccagagctagaaaaactatttaaaaatgcatgtgaaacaaaaaagggccagaatagccaaggcaatctgaagcaaaaagaacaacgttagcagtatcacactacccaacttcaaactatacagggctatagtaaccaaaacaacatggcactggtacaagaacagacacatagaccaatggaacagaataaagaacacagaaataaaactacacctatgactgtctgatcttcaacaaatctgacaaaaacaagcaatggggaaagtattttctattcaataaatggtgctgggaaaactgggtagccatatgcagaagattgaaactgcatcccttccttacaccatccaccttaactcaagatggattaaagacttaaatataaaactcaaaattataaaaatcctggaagacaacctaggcaataccattcaggatatactggcaaagatttcatgacaaagatgccaaaaacaattgcaacaaaagcaaaactgaccaacaggatctagttaaactaaagagcttctgcactaaaaaggaaactatcaacagagtggacagacaacctacagaatgggagaaaattttgcaaactatgcatccaacaaaggtataatatccagcatctataaggaccttaaataaatttacaagaaaaaaaaaccattaaaaagtgggcaaaggacatgaacacttttcagaagaagacatacatgcagccaacacgtatatgaaaaaaagctcaacatcactgatcattagagaaatgaaagtcaaaaccacaatgagataccatctcacatcagtcagaatggctactattacaaagtcaaaaaataacagatgctggctaggttatggagaaaaatgaacgtttttacaccgttggtgggagtgtaaattagttcaaccattgtggaagacagtgtggcaattcctcaaagacccaaagacagaaataccatttgacccagcaatcccattactgggaacatacacaaaggaatataaatcattctattataaagacacatgaacacatatgttcactgtagcactattcacaatatcaaagacttggaatcaacctaaatgcccactaatgatagactggataaagaaaacgtgatacacatacaccatggaatactatgcagatataaataagaatgagatcatgtcctctgcagggacatggatggagctggaggccattatccttggcaaaataatgtaggaagagaaaatcaaatgccagatgttttgacttataagtgggaggtaaattgtgaaaacacatggacacacagaggggaactgcacacatgggcctattggagggtggaggtgggaggagggagaggttcaggaaaaataactaatgtatactaggcttaatacctgggtaatgaaataatctgtacaacaaacctccctgacacaagtttacctatgaaacaaacctgcacatttacccctgaacttaaaagttaaaaaagagtatttgttataaatcacacatgatttggttccctttttcctccattattagagcctttgttcttttattggtaactgctgaagtaaagatttacttttgcaactcatttcacattctgtttttattgtacaatgtttcttcccttttcttgctttccatttgatagactgatttttttctgctgtattaaaagttatacatactgattctgttcttatggtggttgcctttaatttaacacagtgagcatttaccttttaaaatgtcttaactaccttaatatttatatcttgcctcctaagttctttagcatactcttatgttcttttgattttctacttccctccctctaatgccaattctcctaccaagtagatattacacacacacacattcatttaccctcttttaaaaatatggtcctggatttgttgacaaatcacccttatatttgttgttgtaaatttcttgatttgattctctttttgtgtacttcctctaagagtgtttttttttttttttttttccacgtccaagagtgttttaaatatgagcctttggattctttgcatgataataaatttgttatgccatctcacttgaatagcaattttgatacatataaagttctaaactccagtttattttccttcactactataaaaatattattttattttattcttgcattcattgctgttgaaaagtctgacatcaatctgatcttactcctttgtaaactgttcttttttttttttttttttctgatagggtatcactctgtcacccactggaacctccacctcccgggtttgcctcagcctcccgagtagctgggactacaggcacacgccaccaggcggggctaatttttgtatttttagtagacacagggtttcaccatattggccaggctggtctcgaactcctgtccgcaagtgatccacccgcctctacctcccaaagtcccaaagtgctgggattataggcgtgagccactgtgcccagttgataaactcttctttctaagttttaaaaatatttatttgtctcaatataacgagcataggtgtggatttttctgaagctcctgttaagtatcctttgaacccttttctctgaggtctttcataattaaaaaaaaattgtaaatttattagtcattattttctcacgtatatatttttttcctctcactgtgagttctcttatgattcagatgttgatacttctatttctagcatacattttgctgaactttcttttatatttttgatgtctttattctttcctactgtcttctgggattatctttcatcttatcttttacctcacaaattattcttcagctatatttatcctggtacttgtctaatctatagtatttacaacttctactgttatagttttaacatctaatattctgtctttgtttttgtgagttactggttttgctttatgttgctggtatcttctattatcttaagtatatttgccattttgtttcaagttcttggttcatcttcttcacaattctgcattagatagtatatggtgttaatttgttgtctatgttttgcaatttttttgttccttagccatatcattatgttgatctgtgagctcacgtctccaggagggcaccagctagtctgtggggtaatgtgtaatggggaagagataaagtcaaatactggtctgtgtccctccagatccagccctggtagagagcccagaaacactgtggatctccccatttgccactactctttcaggcaactcctaggaaaagcacagttgggagtaggcaggtgctccacgttgggattcaccagcgctgggagttggggcagtggtcgtgagtagtggagaagagaatacccaaaagctcacccctagtttcatctgttccctactgatttaccttgaagatacaagtagcctggcctgttgcagcctgtttatgtatgaaggggaggcaacaattgtcccaagccgattgggaaggacatagtgcagaaattaaaaagtcttcctgcagcctgttctcccactgtggcttatctcccaggatgcagccctgcccattctctacgcacaccagctcaagacagcagttctgtctctcctggcaaatataaaaacactttatacttatttctggtgttgccagctccccagatccttgcttccttttgcttctctacctttacaaaaattaattttgggtgagggagctggaagcctgaacctacctatttgccatttcacaggaactggaagctttatttctggtcctcaaagggcaaagtgacaagcgacattcaatagctcatggcctgaggcttcctgatgcccagggtcttacactcgtagccaggactgatgtgttgtcatagccattccaagggtctcttttcaaggtgtccaatggggtggcaagcagggattctgattcatctatgctccagggacaggagagaaaggaacttggagattcatgaggtaggcatgaagcttggatagtgggaggggaggaagatagatgtgtgttgagcatttattgtgcactctattgagcccttgctgggtacaccttgagggctaatttacttcacagaatccaggaggaatgccttcaggggtactttcaggaaagtatccatagatttttaggaggctgtgtggtgaagctatgttcatactactagataatatttaccttataggcttcatgatgtataaatctgcctttcctctaatttataatagaagcatccatatgatttatgaattctttcagattagctcttttaggccatcctagctaaatactgagggtgtttagtatcctcagggtgctttgctgcagctgtccccagctggtctcgttttttcctattttctaattggtctctacccccattcctccctcagtctgtcttgacagatggcagatgcatcttcctatgtggcagtgcttggcactaggtttgcagcaaatgcttgttggattgattttctttagatttgaaggttaaaaagagagtttttctctttataggcacccatcccaatttcttctccttgcaatgctcagtagttgctaccaggaagggctgtcaccaggttgtgtcctaactggaatgagctcttgagtgggagtaagcaatgtttgttggtaggtcaaagggttaacaacagttttaagctcttttttcccatgggaagatgaactccagtttaccttatacttactgtttctttgaaatgtactgtttggataaatgtgaaatgtcagctgtattttaaaaaatcacatttatttatttatttatttatttataagtgtggaaatgacccctggttggtgaactacatctatgctgggcagactgcgggcaggcatttagacttggtggacctatatgaccagacccgtatgaaaacctgttgggaaatgtaggccctggactctgttatggtgtgtttcttgaatccgaatatgcctgttttcttggaatcctcactcatgggttggtataagatgtggttcctgtcatgtgagagattcttccatcctagaatggctcccccgtgcctctcccctactcctgtggtcttgtctactatgaccatgcatattcccatgagatgagagggttaagaatcagcatctagaatacataaagactcctgatgaagatgtctaatgctgtcaggctgacaagctatgtttccatatccaatattcctctacaaagctaaataaataagttgccgtataacagcccaccaagtcttttgagtgtgtatgttaatctgaacccaaggcacaactaatttgtatgaagtaagcattgtaggattttttttcctacaaaaataactttctcttcattgctgaaattctgttgtaaataaacaagtggtaagcagaggatcataaaatgttccttgctcaaagccttaaaattcccaaaactccagcattcaaatttctctggacagaattggaaccaaaatgaagtcacagttaataataaaacattacatttgtgtaatgctttgaatattctaaagattttattctacttttcctgtcttctcttctctgactgactcaatatggcttctcttgtacctgcaaaaagatgacttcaaaatccatttctccaattttgaacccactacagtacttgatatccatgtatgccactatttagaagcaaaggaaataaaatcattgaaatgacactttgaaatagacttggtaggacctgaaaactcactgaatccaatcttctcactcagacagttgagtggacagtggtttaatccactgaaagaggaaatacaagggaaggacatgtttgagaggtgtttagagaatgattgataaaaggtcttagaagaggtgagtgtccactatttttgcactggagtatctacccctgctccaaggtccctcatgttcacatctgttggggatgatgggagggccagaagacagcccacctcatggaaataagagtagccaggctacatggagtaggtcgggaagcaaggaggctcaggaccaaggaaaggtttatcgaataaatattatgaaatgctcagctggtatatgaagagcagtgagggttgggggtatcaggatcacaatccatattcagttccaagatgtctggaccatttcacagttgggatatggtcttcctctaaggaagaacatgggctgtttttttcatacttctgatcacagttggcaagaaggaatggttggagtaatagactagtagttgggttcttagatttgtttcttaatcaaattctcatggctaatggcaagatagaatatgcttatacaggacatttatctgaaagttgtgttacagacaacatccattagaatcatccagggtacttcatgaaaatgcagatttctgaataacctctagaactgctgaattaggatccctgggctggagcctgagaatttgcatttaagcctacttcttagcaattcttatgtacactaaaatttaagaagcatatgtaagctggttaattatgaattattcttatcaatgaaaaattataccaaatgagaattaaatgggacaactggatatttcattgctttgaagaagctggtgacaacttcatctaagacttcccagttgctctttcagtattacttctaaatttactattgcagtttatttttcattaaatcttccttctactggtacaaagaaaaatatctttgtcttcccttttaattttatttatttattttgtttgagacagagcctcactctgtttcccaggctggagtgcagtggtgtgatctcggctcactgcaacctccacctcctgggttcaagcgattctcctgcctcagcctctcgagtagctgggactacaggcgcctgccactatgcctggctaatttttgtatttttagtagagacggggtttcaccatattggccaggctggtcccaaactcctgaccttgtgatctgccagcctcggtctcccaaagtgctgggattacaggcgtgagccactgcgcccggccaattttattttttaattaaacatttctgagacattttggctttaatgaaaatgtttccaaagcatgttcaaagcgtagtccttagtttgatggtctgaagaatggaatcatttattagtggagttcaataaatatttattcgcatttatacatacaaggtcctttggacagagtaagagacacaagacaccaccactccctgaaagagcacacaaaacaattacatagataagaccaacacacacatttgaactgtggtattgaaacttaaaaaaaaaaaaagcctaaagccctctcagtaaaaaagagttgagtacttatcgacacttacatgtttatttatacattatcccatgtactagcatatggcttgactatatacaccagaactcacactgtaacaaatagaaagtttataagttaccaaaataaatagaaactttaacacttccttcctgtatcctcaaggatcatttgcacattccctgtagtgtgcacattccattttgtaaaccagtgtttttagaaaacaatgcctacctatatataaccaagcactaagttctgtgttacagattaaaaaaaccattttagagtaaagagaaataagagcaaacccagactactagaactggtaaatgaaaggaatagcattcagaaaacaatgtatattcaataaatagataaaataataggaaacatttgctttgggttcatgtcaaagcctattaagaaggagacatagacataggacaaaatgcatatgtagaggaaaaagaaacaaaatatagaaatgtaaacattacttccttctggcaaaatgtcttctagcctttggtgaggtatttccagacatttataggctacactctgccaatgattttatttaaggatgacacagtgaatgcttatttttatgtctacaaaaaaagttacaaaatttagttattcacacattcattcatcagtgcctcttgatattggaatgtttctccctattgctttatggattgactgtattcctgaaaagcttgaattatattttaaaaactcagccataagctttgtgggagacagactgtacctgtcaagttccctcttgtatctctggcacctcgcatagcatcaggctcatagtgaatattcaagaatgtcctctcgatggttgcaatatatttgaaaatctcagcattgaaaggaattctgtgacaaaccacttaaaaaagttaaaatgaatgaacattcagtaaattctgattttgatgaaacacagttgttcataagtggacaaaactatcctttaagtaaacccatggggacatttgagttgaataatttatagagacttataatctgaaagagagcgcagacatagtctcatattcttttaccacacagataaggaaaagctggagctcacagaaacttgaaagagcttgcccaaggccacatcactatttaggagcagttattttaatatgtaacaaattacgtgtgattaatctttttcagaaggggttactgcaggttttcttaaagtaacagtattagataatattttataaaacttaaaaactctataacataatgcttcataatgtttaagaattcataaacatttagtaaaaatattaaaaacatgcatagcaatgataaaactgacttcacattggtggttatatctgggggcagtgaaaagaaaatggaaggattcagaggtatcaattttattgtagtcactgatttattaaaaaaaccattgaaacaaataggacaaaatactaagatttaataaagctgggtgtttgggtaatgggggtttatttgcctttctgtgtgtttaaaatacttaacaatacaaatattaaaactaaaattagtaagagatttgtaaactaataggttttttaaaataccaagcagaggaacaaagtcaactgttatttatccaaagaaccattaacagaaataggctatatatatatatatatatatatatatatatatatgctaaagggtttagtcaacaaagtagatattctataattagcagcatgaaggagttagagtacatcttatgttgttataattaatagtaaatatttgtaacatacagaaaatacatggaacaacagtcatgcaaccactactcaaatacagttgtgctgtttgcacctgacttcaggtccacctttcttttccctcaccagatgcaattactagtttaaagttagtgcatatcatttgttattatgttgtgagaattgtccttgtgaaatatggacatttagtttattttaatggttgcacaatttattgtagaaaggcaacacaattttatttacttttttatgcactgatgggcatcccctgactttccaccaattataagcaaacctgcaatgaacatccttatgcatacttctttgtttttgtatttgagaatgtcttcaggtctctagggcatataaacatagaattgcttgtctgtaggattcttgtctctttaaatttgtacaacactgcatatgtgaaataagtagttgaaataagtgggaaaactaacccttccaccaagattctatgcaaattcccatttcttcacatttctgcttcagcacgtggtattgttaggctatctaccttgagataataaagttattctacatttcccccccaaagctttaaacctttaccttttcacatttagccttttatttcatttaaaatttatttttgtaatggtgtgaggtagagatctggtttcatttattccccatggtgatagcctatgttcctgcaatattaactgacttatccaacagttctcaaaatgtgatcagaggattcctggggatgttggaagggagagatcccttggatccttttagagggtcaacaaggtcaaaaatattcataaaattaagatgttatttgccttttttttactctcactctcataagtgtacagaagggttcgccaaagacaacaatggcatgtgatgaatagtgatgactatttctctgatacctaacagattgtgtgcctgtgtattgtattttctagagttttcaaaggtagtgagtttacggtataagtatgtagttttcagaaattatttcttttctaccatgctcttaccagctatcttcagttatacctgttataatctctgtaatctcattatcttccaagaaatcatttttaaatcctaaagtttttccttttacacagaaacataacaaaaattatgtttactttgttgttttgcaataatatatttttcaaaaatgtttttaattaaaaaattttatctgaatagggtggatggttggctttaaaaagggagaagagaaaacacattttctggtgtctagattgcctatgtctagagatgctgaaaaggatgacattgacatatcagcaagttatctgattcctcataaaaaggagaaatctattccaaagaaactgagcacaactatacacaacaaaaatatgttgaaagtgatcttttgttcagctttatagatgttaataatttatcatattgtgtcttgtgcagtaaaacattttcaaacacttatatggttccaacaaagttgcagtatcattttgggaccaatcattcagaatttattaaaaaaaggaattaaataaccgaaatgtagatgtaatacactctttaaaagcttcttacaggataagccatcatattgtattggctagaggagcacacacaatcacagagagactaataaaggcttgaacagttgacattgctgaatacctgctggatgaaaaatcaccacaagaatgcatagtgctggcattttccaatgatgcaataacttgtcaaattaaagatttaactgcaaacataaagactgagttaatatatcatctaaagaattgtaccttagccttacaaagggactgatctacagatggctatacatcctgttttgctttcattcatcaggtatcagcatcaattgaccattgatgatcttcttttatgtgaattctgggcaacaggggttctgaaacattaaaagtgttatatgacttttttgaatctggtggtttatcctcaacaactgtgttaactgtgttaacatttgcactgatggtgcaaaaatggtggattttatccaatggtgggtaaaatgactggtgtcttagcacgaattaaggcaatggcaccaaattttattagtagtcattgtattcttcaccaccacacattcgtagtaaaaaaaaaaacagttttactaaaataatgtccttgatgaagttgtaaaaattattttctactaaatctcaacccttaagcacatttaaaaaaattctttgtgacacaatgtgatgtacccataaaacacttctactgcatgctgaaatatagttgtcttttggaaaaacacttgtttgagttgcaagctgaattagccactttttcttttctttcatggaaacaccatcttttcacttggaaaaaaaaagtgacagaaaattgattattcagacttgggaatttggcagacattttcttgaaaataaacagtgatactatcactttagggaaaacaactagttgtatttgttgccagtgctaaaatttaagcttttaaaagtagaagttggaattttgaaaagcttgtatctgctactgtgggatacttagaattttttctgatatcagcagcaacattaatgaatataatatttttttgagacagggtcttgctctgttgttaaggctggattgcagtggcatgaacagggctcactgaatgcagctctcaaccttatgggctcaagtgatcctcctgcctcagctttccaagtagctgagaccacagatgtgcactccactcttggcaaatttaaaaaaattttgtagagatggggtcttgccatgttgcccaggctggtcttgaactcctgggctcagacagtactcctgccttggtctcccaatgtgctgggattacaggcataagccactgcagccagtttgagtttttgatattgcatgaaatgtttgaacatttcgaatacctccataattcagtaaacagatatttcctaatgaccatataatgttacagaatcttacatgagtaaaaataatttcaaaatgcggataggccaatagatttcaatgacttcctgttgtttatcccctgaaccagaagatttacactcaccctagattcttacctttccctcaaccccttcattctattactcagtactcagtgtaaattccacctcccagacagcagacagctcttaagtgtatgctttcctgttcattactatttctaatgccctcattcagaactctggcaacttactttatgatgtcaaatctcttacgtagcataagaggccactgcccacctctcttctctagcttcccccatttcactgtattgtctagtaagctgatcttattatagcttttttttttttttttagacagagtctctctgtcgctcaggctggagtgcagtggtgtgatctctgctcactgtaatctccacctcccaccttgagcactcctctcgcctcagcctcccaggtagccgggaccacaggcgcacaccactgaacagggataattttttttgtttttgtagagacagtgttttgccatgttgcccaggctggtctcgaactcctgggctcaagtgatccacctgcttcagcctcccaaagtgctgggattacagccactgtgcccagcctattatagctctttataaaacaaaaacaacaaaaaaaccgaacatattgattcatgactccctacctttgcattcacatgattcctttgcctggaatgtcccccttcttctacctgcttgggaattcctagctatatctactaaaattctattcagatgtctttttccaggaagcttttcttaacctaactcacgccattaagttattcgctttatttttctaggttatcttctatttgtttctactgttgtactcatcattctgtaaggtattggggctctgtagaatttctgttacaaaattactttttggtttgataatatttacctacattgagcaatcccataagaaacaggcctgtgaaactctctattgggtttcctaaaacaatattgttgagagattatttaattacctagctttctttttatagggacttgccagagaaatatatttctggtcttatcatattagttactcttcagatttgttttagaaaatagtcaccattaacaccttttagaattggttggtggaaagtttccaatcaaaatcgtggtccacctctagcaagctgtaaaattttatgatctccaattagcctcagtttaaactctagtcaggcatttagcttcacaaaaactgaagtcagggatagtcagttttcccatattagtagagagctgggaagtgctgatgtgcacaacctgcagcctgaaatagttgctttttctaaataacagtaaaactgttgctctctgaggatggataggtggatgctatttgttgtttgcaaagcttagggaaccctgtggttgagattttttccaatacatgcattttttttccctttgcaaagggactttggataattgttaattttcccaagaatataattataattcttttattgtttaaatagagttaatagtttatctacagtttcactttctgcagtttcagttatccatggcttgaaaatattaagatattttgagagaaagaggaagaaaaagaggtgtcagtcacataacttttattacagcacatcgttacgtttctatttcattattagttattgttcatatcttactctgcctaacttataaactttaacatgcatatgtatgggaaaaaaaacatagtatatataaggtttggtactatctgcagtttcaggcatccactaaggatatcagaacatattctctgcatatttaggagcaattaccgtatgatatttttttctttctgtgtaaacacatggtgtcatagtccattttgtgctactgtaacagaatatcacagactaataacaaataacagaaatttattggcttatagttctgtaggctgagaagtccaaaatcaagatgctggcatctgggaagggcttttttgttgcatcatcacacagaggaaggtggaagggtgacagagagagcaagaaggggctgaacttacccttttataacatcaccaatcccaccctaatcacctcttaaatattccacctattaatactgttatcatggcaattacatttcaacatgagttttgcaggggagaaacattcaaatcatagcacatgggttaggtgagaaatgaagagtgaggtatacaagagcatccagaaccatactatatacattccagctgttttggtgtagaagcagcacaaatgtagaaactgcattgtttcttgataaaagggtcctggaaagatgaccagctatacagtttccactagaggaaatgcagattggcttgtacgactttagagtatgaaatataaagatctggagtctgttccatgttttttcaggactggtgtgactatattatggataacgaaggaaaggagcctcctttgaaagaagcatctaaattagggatgggctcctcatttggaggatgttagaaactacgaatcaatgtctctcatgttcaatggagctcccatttttatcggtttcatgagactattattaatttatttgaatccaagatgagtctcaaatatacccagaagaaaaaaaattaagaaatgaaaccaagactcctaatgctttgaatgttcgtaacattcgagaaaaatttgagcctgggctatataatcaaagtctaggatttgtgaacctaacagggttccactgtcacctgttttcaagagagtgctgagaaaaattccaatctataccttaaacaattaggttaaatgatttaaagaaattagccttcagaggactgaatttttaatgatttttctacttggaaaatgtgacttctaaataaaaaaagtgcttgcttattataaaaccttggttcaaaggtaaatactatgttctgacaagtgtaaaataagtacaagcacatgtgaaaataactgttaacagcaaatgcttaagaagtgttcttgttttctaaaataaacatttcctgttcctaaagtttttggatcagaaaatggaaaaatataactctagttaatggggatatgcaatttgactgtagaccaataattaattgtcataaagactttaaaaatccttctagattaataatgtgtagaggagtcttagaggattactcagtaaaataaattcaaggtaacaatattaatctaagtttctttaatattcttgatctgggtaaacattttcataaattaattttgtgaattttgagtttaaaatatgtcctgctctaatttcaccatgtgtaaaataaaaaggcaatcatagtattttagtccatataaaaccatgcctccatttataaaaacagactttttttggacagtttaacagttacagaaaaactgaacaggaattacagagagttcccgtatgtcccctcaagccctcttccctccagtttccactattagtaacatcttgcattagtgtggtacatttgttaaaattggtgagccaatattgatacattattaagtccatagtttacattagggttcactctttgtgcagttttattggttgttatattttattggttttgacaaaggtatgacatgtatccaccattacagtatcattcagaatagtttcactgccttaaaaatcctctgtgctccacctattcatccaacccttcccatggaccactggtaaccactaccttttcactgtctccatggttttgccttttccagattaccatatagttggactcatacaatatgtaatcctttcagattggcttttccttagcaatatgcatttaaggttcctccattatccagagatggttttagttgtcacaacttgggtagagagatcaggggtcaatgctactggcatctagtgggtggtagagactgaggtagctcatgagcatcctacaatgcccaggacagccccctacaaaaaagaattattcagccccaaatgccaaccatgctcgaggttgagtaaccttgtgttaagagtgacatgtggcatgagaaatggggcggttttggctcatgttgtgatattctagattcaggtatttccctgagcagagaggctgaaatgctgaaaatttttcatttgatgaccttgatgcttcctttcctgaccatcgtaaagaacaaatggctcctttgctttggcaagaaatactgaaggtggtggcttttttctgtttgttttgaaatgaagtcttgctatgttgctcaagccagtcttgaattcctgaacttctggtctcaagtgatcctcctgactcagcctccagagtagctgggactacaggcacatgttactgcaccagccttcaacgtgattttttttatttcattcaggtgacaaactcatgctgaggttcccaatttttgtctcagagctaggatattctaaatttgtaaaaaaaaaaaaaaaaaaaaaaaagttaagaaatattaactttctatgaaacactctaaatactaacaaagagcttggtgagttctcccacttacctgtgtcccatctgtgcttcagttgcaaatatatatatatatacacagagagagagagagagtcttattctgtcacccaggctccagcgatcctccctccttggcctcccaaagcactgggattatagggatgagccactgcccccagctcagttgcttattttgcattatttcaaggcagtggaggcaaaacgctcaaaattaatttctcacagatcaacatcacatcttggagtaaaacaaacacatattgaaggtattttaatgtatgttttcttgaacttcttctaactaataggggaaatattttcattaacttttaccaaagatttctggatagtgtaaatatatttttctatttgggtaacagtttatagtatgctgttatttctctgttcatttatttatttttatcatatacctcctagagtaagatttaattgatggaatgttttgtggattctgctgtaattaatgcacataatagcagtcagtaatagatttctgtaaacctatatttattaattatctaataccttctccttcattttgctgttgatttccactaagtagattaaattgtgttcttaaaaacagaaattcatttgtgtatggatacaaaacagaatgttcccaaatgcaatcttggatgtgatgctctaaactttagaaatccagcttcatttattttggattaatttctcccgcttggaggctgacacactgttttacatctatcaaatgcatgattataaaattaacaattttgtacaataatgaaattaaacacacacacacatgaactgtaaactatacagcaccatctctgtgtcatagttttaaaaggcacttccagatgacataaaaaatgaagagatattttttaagaacctattgatttttgatctccaattttgtgtgtggggggttgtttttctttaaccctagttttatctaatttgagattcatgaacaaggtatctctaagggaaagagcagcaggtataattattagttattttataagactttgtgaagtctttggtatagttctaaaaacaaagtgaaagaacctaatgtatgtataaaaatagttttgcaagtcaattggtttctaattctttgctttcaacaaaattgaagaagaaccttatacttgagttgtcagctgacagattattaaaaatattatttaataatagcccattatgtgagttttgcatacgactaagaagaaattttaaaaattgggtgaagttgcctcaacaagtctttattttctcattcatttatatcccagattcattaacaataagtaacatttgtcaacatgaaattgggaaaataaagtccctatccatctcattaagagatgcatttctagttaaattttaccattacaaacttacacttttatttaccaaaatgtgtattacagattgagcatccctcatcagaaaatctgaaatgctccaaaatctgaaactttttgagcaccaatatgatgccacatgtaagtactgtacttaacacaacttcgtttcacatataaaattattttaaatatggtataaaattaccttcaggctatgtgcataatgtatataagaaacataagtgaacttcatgcttagacttgggtcccggcctcaagatatctcattatgtatatacaaatattttaaaatccaagataatctgaaatccaacacacttttggtcccaagcatttcaaataaggcatatccaatctgtactgacattattttgatctctaacagttggtaatcctatcttaatccatataacttttttttgagacagcatcttactctgtcatccagggtagagtgcatgcagtggcacgatcatggctcactgcagcctcgacctcctgggctcaagtgatcctcctacctcagcctcccaagtagctgagactacaggcaggagccaccatgtccagtaattttttttttttttttttttttgtagagatgaggtttccctatgtgcctaggctggtcttgaactcctgggctcaagtaatcctcctgcttcagcctcacaaagtgctgggagtacaggtgtgggccactgcacccagcccatataacttttacacttacaacaagaaattaaaaattcaatgtaagaacatattttgttgcaaagaagcagaataggtggctcaataaaagatttccaagaacaaagaaaaaaattacattaggatgtaaccagggttgagaactcaaaaaaaaaaaaaaaaaagaaaaagaaaaattctacatggggggtagaataaaaatatgaattcaaagtgggaaaaaagagcaatgtaaaatttccaaccattaagaaagaggttgtttgtatattttttaaattaatgataatgggtgtcaaaacattatgatatttagattgaattgaacatatgagcgattaacagttttattttaaagtgttaatatggagaatatgttggaaattatatattttttgcaactatctggacacatgttgacaattttaggtctgtctaagtctatgggaggaggcatatgacatttcacaatccttgtaggagagatgtgaagggaagacccctgagctattcttcctccttcttgtgttaccccagtaggaaaatggacttataactggagaagagaagctaggtgtcagcagagacatgatggagtggacatttctttcagtcctttaccaggaagtcctctcaaactgaggaggaacatactaagggagagacacactagtcttgaagcccatggcattcctgaagatccacctcacaccccaaattaccaaaccccaaagctctcttcagctcagtaggttgtcctttaattttcagtaacccttccctacagcagaagaaccaatttttcttttccctcataatttgaatccctcccactaatttatttgaagatgaagatattatcctcttttactaccagtgaaaatacaatgacttgagaagagaaaatgatctgtgtgacgccagggtagaagtggaagttgtgggccctcgaataaaccactagtcttatacttgaagcaggataaacaataaatgccaaacccaaggcagaaactagaaacatggaggaaaagaggcataaatgcctcatattagacagttacattctaagaaatctttcttgcagcagttactttcctacaatgaccaacttcctctgactccaaatttactccttatgtacacttgggttagatattcctttgactatccaatcataccattgtatagtaccatttacacatgcatacatgctcacctaaagaactttttgtgtgtgtgtgtgtgtggtttttttttttaaatcgagtctgggacctggtttcgctccattgagtcactggtgaaaaatttagtaaatctacgaagagagtttagtaagtgtaagaagagtctgctcactgtgtgtgatattccaatagattcatgtgttctacacacagggatctcttggatataagggaggcatttctcaggtgtctgggtgactttctggtcattatccaggttcctggctcagcttcccaggtctctttgaataagcagaggggatccacattcagacaaggctcctggggctctgaccagaggggctggacatccctggtagacctgacattgggcactgagactcctggaaaacttaagctgttaattttgcagttctccatcttgactgcttctcggactgaccatcagttggtgggttttcatcagccttctgcctcacctcctctgatccaagcagcagcagggactcacttgcatgcactggtcttgtaggcagtgacttttaagccacatcctctgtctaccaggctaaacttgcctgcctgagaggcatactccttccatcctctatcgtacatctgtgagctaccaactctggccctagtgtgatactgccagaatgttgtgtacctcatctatttagagtgggaagcccataaggcaaactgaagaggccccgtatcctcactccctttctgctcagttttttcatttatattatctcaacttcactctactaaccagagcaccaaggaagggtaggttagcaattacgtctatgatgactatagagaagtggggagatgacttatgatcctctttgtgctggattccctactgaaggcatctgatggcttctgatttccctggtctgagaagaaagtccctctccacctctccctccttactctacctcaggctgaggggctcaggcaaccttttatgttgcatatggcataggtatctctgcctcactccagaagggaccaaccaatagccacctactcacctacttctgaggtctagtgcctacagacctggtgttcataaatttaagttctggatttaggtctcctttcctgtagccaggtgatcagtgaccggcaaaaatcaagatcccagacttcctgagtaacctcatcaagactgaggtaacagctcacatagctagtgcatagacagatgcaggttacatggagtctgaatcccgtacacatttggaggctccctttgggactgctgggatgcatgaaacatgggatttcactcacagttgtgctcactatgtgtgatattcctatagattcatgtctctacacacagggatttttgatcattctgaattgttgattcccataaaaaatgaatacatggtgatcactgtatatgctgcattactgaatacatatttacgagagtctccaacacatctttacacgtctgaggagtaaaagaatttcccacagattagcttctggttcccatttcaaacctcatttctgttccacctctggcattgggtgtagtatggctccttagtgctccaggccaaaataagtggcacaggggtaaagtcatttctggtggggggtgggggatttggagaaaaaaagaaaggattgcaggggagtacactgggagggttaggagaaattctggagatacggtccactcaatggaggcacatacaaccaagctgagaaacgacatagtacccaacagagttgggagatgtgaaacccaaacatcaatctccacctgggcatagaggaaatactcgatttccaagcaggttctaggttcagaggagagagcccttggttggaagcgccggtcttgcaggatggggtgggggcgttaatgcaaacttctggtccagcagaggtagaaacagaccagatctaagtagcagctcagaggcagcggacttgagggatgaagacgtgaggcccagagggtggtgcctggcagagaaaacagctgccagacaccaaggccacctcgggttaaagggaacaagttatatccaaaaaaaacccaacacggtgaaaataggaagaataaggatatcacctggagtgttctcctgagacactccccaagaacctggattctttaacaatccctccagagcagggacactcagcacatacatctcccacaaagtaaagtgtctgaaggcctgggcaaacccttctccctccccttctctctcctccacgggccggcccggaggaggctcagggatgagaactactgtcactgctgttccccacctcaccccaacgagagaggaatctttagaggtctgtatccctccttcaccaccccgcctgagcgcctgctggaaaacacaatcaccgtctcaaatctcaccctgcaactgcatccaagcgctttctccaagcgttcggggagccgccggaactcttcttccagacaggcgttccgagactccgcacaataggcacctacccttggggttttgagccgcagtgtctgcctctgttcaagtatccaggctcaggtacagacctttcagtgcaggcggcgggaggcgcgaacacggaggaccccctcaggcatactgccgcccgggcggcgcctgacagattgcctccttgggatcggcggacatgccctgggcgctccagctccgcgcgcctcagacacaggctatgattggcctggctgaacgtcaatcagggctcggcgccgtggaggcgggaggaacgctgtaggcagaggccgcttaactccctacggggttattctccgcctcttctagggtaggcaggtgttcccgagtcccttagggggggtccccgcggcggcctgagatgctcggcgccaggttgtcgcgcccttgagctggctgaagtagacattgactctggagagtctgcgtttttcctggtcccagagccgtggtcccgatactgcgcttcccgctcctccagtcccagctcccaggctccgtcttctcccgcttggcgctggagaaacaccggaagagagagtcgcagagtgactgctgtggccctgcgacctgactgccaccttccaggactctagccctggctccttctaaccttcccgcccctcagtgccccagagaggctggtttgcggacaattattcatcagccggaagaaaaggaggtgccagtgttaggcgcagaagagggttggaccagaaaagctggagaggggcaagaggggaaagagggggaagggggaaggcggaaggcggaagaagtcgggaggggtaacagctcgagcttttcctctagcgtagtttctcttctctcggtgccgccccatctgcttcttgcctcagttccccactcgcacccgtgcacctctgcggcaggcgtgtgaaaggaatgggagggggggcttttggtcgggatatctggtcctccagaccccacagccttggctgagaacttacttaagcccactccaactgacttgataaatgagaatcttgaccagcccactggtaggtagaaatgagggacgtcatctatccctgaatggaataacgcgaaaccgcaggtcacgtggatgtgggaatccacagcactggctgcgctcctaaggctcctaagtccacttccgaacctcatctaagaccctgaaagccagactagggacacattggattattattattattttttttatttgagacagggtctcgctctgtcgcccaggctggagtgcagtggtgtgatcttgtctcactgcaacctccgcctcccgcgttcaagcgattttcgtgcctcagcctcccgaggagctggatctacaggtgcgcaccaccacgcctggataatttctgtatttttagtagagacggggtttcaccatgtttgccaggcttgtctcgaactgttgacctcaagttatcctcccgcctccacctcttaaagtgctgggattacaggcctgagcctctgcgccagtcctacacgttggatcttttcccagacctcctcctcagacgtggagcgtacaaatgatgctccatcggttactctgatcctgactttgggactgccagataaaactgggagaaaccctacatttactcttactgtaacgtattggcttgaaactgcaggtcagaacccatttatgttgagaccaaaagactttttttccaagtagaatgaaatagaataaaatacaattgaaaatacttgcctgcatcacaggtaatgagagtaactatagtttcatgaaaccgttgtttcagttaaatatgtttttgcgtgtgtgcatgtgtatcgggaggagatatgtatttcatatatatatgtagagaggtggaaatcaacaacaaaactccataatttttcttgttttctaacagttcttgattttgagtaaaaataattctttaagaacaaaattttgagccagctaacgaaagatcagagtcaagcagcctctcattggggcctgaatagaggttcatcttatttggctttttcgtttttttcctatcttgtggactccttttaaggcccagcaaggaattaccctccccaagtttccactctctgcttggttcagccattcagctgtctctcgggctctttgattaataaaaagtccagtagagctattttatcctatgcatgtgtgggaagagggcaatgccagtgattctttcctgatttgacagaaaattcacaaatcacgttaccttctgaagatagagattttaagctcaaacattatcaccagagaactgaattattaagaaagatgagtggtcaaaagtacagatgttttacagattaagggtcattttgtcaggtcctgtccaaaatatttgaagtctaggggtttgaaaaattgttagaaataaccatttatgacaacagttttcatttattgttctctccagcttcaggagcaggggagaacatttttttccttcttaccttgctgagaattttttcaccagggtttcaaggctaagaactgaaattccagcattgacattgaattaaaaagaagcaagcccttttaggaagtcaaattttattatatgagatggaatgtaatattgagattacttattacttaggcatgggataggggggcttttaacaacagaccaaaaaaaaagttggaaggataggaatgaaataaagcaaactttcattattcatagatgatacaattgtctacagagaaaaataatctaaaacataagaattaagagtttggcacagtggttggctaaatatataaacaaatctattgcattttctataaaaacaaaaaagtagaaatgtgattaactggtttatataacaaacttacagtacagttgacctttgaacaacatgggcttgaactgtgcaggtctacttatatatgattttcttctgcctttgccacccttgagacagcgagaccaacctctcctccccttcctccttcttagcatattcaccatgaagacatgaggatgaagacctttatgatgctccacttccacttaatgaatagtaaatatattttctcttctttatgattttttaaataacattttctttgcttttctgagacaaggtcttgctctgttgcccaggctagagtgcagtgttatcatggctcactgtagcttcaacctcctgggctcaagcgattctccacctcagcctcccaagtagctgggactacaggtgcacgccaccctacctggctaaatttttaattttttgtagagatggggtctcgctatgttgctgaggctggtctccaactccttgtctcaagcacttctgcctcagcctcccaaactgctggaattacagccatgggccaccgcacctggccaacattttcttttctctagcttactttactgtaagagtacagtatataacacataaaaatataaaatatatgttaaataactttatgttattggtaagacttctgatcaacagtaggctattagtaaagttttggaggagtcaaaaattatgtgcagatttttgactgcacaggtggtcagcgctactaaccctcgcattgttgaagggtccactgtaatcaggaataaattctcaaaaaggaaaggcatgcaagatcttagtggggaaaattaaaatcattaaaagaagttgaagaagtactgcacagatggagagacacattcatggttaggaagcatcaatatcattaaaatgccagttttccccaatgtgatctatagtttcatgctatttctagaaaaatttcaacaaaatgttttatagaattggacacaatgatattaaaatgaaacgaaggaacacaagttcaagaagagccaaaataccattgaaaataaagaggaagttggggaatttcctgactacatgagaagatattatatacaccactggatttaagaccatgtgctattattggtgagagagggagtagacaactgggccaatagaatagaatggaaagagtgtcaggaccccttgtatgtgaagaatggtcattaaagaccagtgggtaaaggatgtataattcaataagtttgaatttatgacactggattagtggatatatatacatcataataaattccagatgaactaagtaccgacgtattgaaggcaaaactgtaaaacttttaaatgaaaatgtgaaagaaatatttgtatgacttcaaggtagaaaaatatttattaaaaagacacacatacacattttaaaaacaaaaatgttaagagaagatgaataaatttgaccacattaaaattagaaactttaatcaaaacacactctaaaggaaaaaaagccacaatctaaacttatttatatcacacataatttacataggatcaatatccagaacatctaagaatagccccataggaaaatgatcaaaagatgtgaaagggcagttcacaaaaagggatatataaaagaccaataaacgtacaaaagttaagctcacaatagttatcagagaattgtgaattagaacagtccttgaaataacattttaaaatcactaaatagacaaacattgaaaagtctaacattatcaaaaatcaatgaggatgtagggtgaggggaactcatactctgatggtggacttcaaactgaaataatctacttggaaaaaaattggcattttgtagagttgaagctgagaatatcctaaagcatagcagctctacccttaaatatatatgcaccttagggaaattattgaataaggcaccaagagcaatgtgcaggaaaagtcatgagagcattctttgtaattgcaaaaagctggaaacaacccagtgtccatttgcaggtaaactgatacacaaattttggcataatcataatgtggaattctctgcaacatcaagatcagtggaatacagataaaataataaacttgcataattcttaaaatcatattgttgaatgaagaaaacaacagaaaactacattttgatattaattatgatgttaatttgttgtcagacaaagacaatatttactatgatgaaaagcaagataatgatcaactccaaatttggaataatagttgcattttgcagagaggaagggagattctaagggaagacaaatacaggaaactttaatgttaagggtaacgttccattccttcatgtgactggtgggaaaaaatggatgtttaaaattcttgtagatatgcatcacatgcattacttatttgtagaaaaatatttcaaaaactggatcataagaaaaaaggaaaaagatgtataagaaatcatttgcatagagacagaagtaacaaaggcaatttgatgaaatttattgagacagaagactaaaaaatgaaaaaacatggtaaatataaaaatatgatggcagaagtaatccagatatatatgcatttgtaatgtccatttatatcattgcattaaatctaaatttttctgctcagtaaagatggtctgtgtgtgtgtgtgtgtatttgctattcaaaaagtgctggtggcaatggcttatacctgtaatcccagcactttgggaggccaaggagggaggatcacttgagcccaggagtttgagatcagcctgggtaacatagcgagaccctatctctacaaaaataaaaaaattagccaggcgtggttgtgcatgcctgtagtcccagctactgaggaaactgaggtgcaaggatcgcttgagcctggaaggttgaggttgcagtgagccgtagtcgcacccctgcactccagcctgagcggcagactgagaccctgtctcaaaataaaaacaaaaacaaacaaaaagcacctaaaacaaaatgacaccgagtgattaaaccaatggacaatgataaactcaggcaaatgctaacaaaaattaattatggatagaaatactgtcttactccattttgtgctgctataatagaatatccaagactggataatttttaaagaacagagattgacttattacagtcctagaggctaggaaatccaaggttgagaggcctgcatcttgcaaaaatcttctggctgcctcatactgtggtggaaggcaaaagggataaaaagagagctgagagagagaaagagaaagagagagcgcccaagtgcaacaggttgaattcacaggcttttagcctttttgtaattggcattaattcatttatgaggatggagtcgtcatgacctaaacacctctcatcattaagcctcacctactaacactgttgcattgaatattacatttccaacatatgctttttggggacacattcaaaccattacaaatactaatattgaacaaagtagaataaatgatgaagaaatttttcagtgtcaaagaaggatactttattatgctaaaatgtacaattcaccaactacccataagttataagccttcatatcctaaacaagtctttgaaagttagggaaaaaaatgtgctttgttaggaaggataaattgacacatttaagagcttttagcatacttttaaactaaactgtcatatccaattgtaaaataatgtgaatgtaagatattttgctaaagcaaataatgatcttaagttatcaaatatttataaaattgtgtactcaacaaatagtgaatgcatattttcccaaacataatgcattaaaccacaaagtaaaattaaatagaaattagaaactacacgggctatattctctcaccggtataaaacacatacatagaaaaacaaaacaaaactaaaataaaacaaaacaaaacctcaccaaaacagtactaacaagaaagcctccacttggaaacttaaaaacatctcactaatttttgggttgaaaaggaaatcaaaattgcaattcaaaggagttatgtttttgctaggaatatggagggaattcagttcagaattcatttctctatatagtacagcaaagagaatgaaaaagaaaaccacacaagaacctcatttttagtgaaactaggaaacaaaaagtatggttacatcccaaattgcatgtcatttgtgcttaaagcaacggagagcagaactgggcataagaagccaaaatgttgctgtggcaacagatgaaagcgtggagggaactagtggtgcgggatctcggaaagggcccgaaaatattctctctctaagagtagaagccagcctaggttggagctgttggcagttggcctgagctacagtgaggcccagatgctggggaaggcagaagaaggcccacatattgggggagcagactttgttttggaggttccaaggtggcagataacaaaggttccctctggaatgcagggggtcctaacaccgtggtagaatccttcctgaaatagattaaattccccaagttggaaaaaacatggatgcagcgtattttaagataaagtttacgtgttagtaataaaggattggtccttcggttgtaaaacctgggaggttactattgcccatgtcttctctcaccaacccatcatcccacccccatccaataggagtcttccactaatatctggtccaggaatgctcaatttattcagaataagtaggaaaagaaatggcacagttccacataaatatgccatgagaaaaaaatgtttacagaaagcagcaagatttccctccagaagtaatgaagcaacctcagccatgaagatcatggagccaaaaggatgaccttcagcagaagcagttacgagccaaagaggtccaagggcactgagggaggagccaagtggtaagggccacctctggctgggatccagggtgcccaagtgggaaaatgagcaagccagagagtgcttggtctagggattaagaaaagcacacagtaataggttggacactaaatttgaaaatgaacagtgagaaaaatgctgtggggaccaggattgaaatgaagtaacagaacaattaaaattacatgatccagggacagagacttgaactcataaacaggcctgtgttgcccattagtcacaaggggagcagtgagccattgttaaaatgccaaggattcccaatgcagtttacttggaactttgcccagcgatgaaggagtctgacttgtcttttctgtaatagttagaatcaaagaaaaataaagcacagctggtgggagggtgagaagcaagcatcatgaaccacggtctaattcaaggatcaaactgctgtccagttctggcagattttggattgcaaggggaataaagctgagaggccatattggcacctaggcacagtgaggtgagtctggccacgcatttaagaagcccctgcaaaatgatacaggtggttactaaaaaccacctctggcctctggaaaaaaagaaatagcatctcccggataagaatatctgggtctcacacctattgaccaggtcgagatagggttcagttggggatgggatataataaaaggcatgggtaaagaaactgggcagaggcatagtgcctgcatgttggagattaaggagggaattcggaactcatttttctatatatattacaacaaaggttaagtttggaggttaagtaaggatgctgcagctcactcatggttgcttttccttcagagtactcatgcctcggcttacccagggggactcaaggagaggaatgtgtgtgcgcatatctatctatctatctatctatctatctatctatctatctatctatccatccaccttctaatctacctaaatcaatcactgtgtgtatctattccaaccacaatggactcctatcattcaatttcatttagtggtacatctcagcccagtttacagaaaagctgtaaagggctgtaaaaggctgtatgagaacataatctgaaaagcgttgctcaaaagagcatattatatattattgggcatttatgaagaaattagatctcacactgagctagttaataaagatttataattacaaatgggctgcagcatgtgattctgaacttgactatttccttttgcccttcagtttcagactatgatatggattatgattctctaccaccccctagtggaaattcattcatttctttttaagtcctgtttcttctaatcatttagtctaaatgattagactaaatgagaaaattacatagtaaatatctggattcactcttgttataaaaggttcaaaccggccgggtgcggtggctcacacctgtaatcccagcactttgggaggccaaggcgggcggatcacaaggtcaggagattgagaccatcctggttaacacagtgaaacccccgtctctactaaaaacacaaaaaattagccttgcgtggtggcgggcgcctgtagtcccagctactcgggaggctgaggcaggagaatggcgtgaacccaggaggcggagcttgcagtcagccaagattgtgccactgcactccagcctgggctacagagcaagactccgtctataaaaaaaaaacaacaagttcaaaccatacagaagggtacggagtaaaaggtctcctttgtttctccctcctccccattccattctaggtcccaaaggtaactgtgtgtagtttgtgttatactaggatatttcctgtgcttttacacattccaggtatatggcaggaaaaatcctgagacatcaactgaggattattttcctcaggcatctttctacaacagaggcagataacgcatttcccctcatgccatgggagacagaccacagcaaaacagcaatgaccaaaagattaagatttttcatttaaaattttacatttgaaaaccatggtaggccaggtgtgatggtcacatgcctttaaccatttaggaggctaaggcaggaagattgcttgagcccaggagttcaagaccagcccggacaacatgacgagactcagtttctacaaaaaaaaaaaaaaaaaaaaaaaaagaaaagtaaagaaaaaaaaattagctgggcatggtggcgctcacttgtggtttcagctactcaggaggctgaagcaggaggattgcttgggcacaggaggttagggatacagcaagccatgttcaggtcactgtactccagcctgggtgacagagtgagaccttgtctcaataaataaataaataaataaataaaatagaaaacccagtagaggccaaatgaaagaaaggtctttggagatgaaaaaccttagattactagatatctgaagtcagcacttgttccataaataatagatttgggaagtactccggataatcttagagccaattttcttctgtggaagtgataagaatccacaggctgaagacagaaagagtgtcaggaactggttttggggtcttgcactctgtaatccagttaaactgtgtgacagagggtcagtgcctcctccaactcagatattttgggcatacaaggatgggatcaaagagtgtgctgtttctggtctacggaatattacaaatttgaatgaaataaaaatatttctgacagtttctaaactctcttttcttagtactcaatagaatggactgtcatccatgctgggtaaggaaagatcttgacaaggaaaggaaggaatcagggtttcatgagagacagggttctagggatccaagcaccatgatgaggtaatggctaagttttctcttgggtaatgcaaagaaaagttgacctttactgctgtgaagcaaattagaagctaacccggggtgcattcgtttggtttcttccagaagcatccctgacacagggacatgaatgaaagtaatttattttggaggtgcatgaaacttcagtagcagctgagtaaaagattgggaagggaaaacagccaacgaagggtgaatgactggaacttaatcccctggggaaattctgggaaagcacttgcctcagagttaacccagccacggaaggagggagttgggcaattgtacatcaattcccattggttgaaggctgctgcctgacacgtgaactcttcggcccttctagtctgctgtgagtcgggcagagtggcccttcttggctttgaggaagccttcaggaatgatgcaaatgtccagccagtgtgcactacagtggtaaggcccaaggaacatggcaggtattagtagcatcagccataccaggtctatttctagttggagaacccttagatgactggagcctgtgatctcttacatctgtaatatctgtgatcagaatggaagaattttctattgtcttttccttttcaattttgcccaagccttcataaagttttgttaaaactttgacaacagtcttatttttacattcctttaatcaagaaggacaggcctatgtccaaatataggaggatgtattagtttgctagggctaccataagaaataccacagactgaatggcttaaacaacataaacttattgccgcctggctctggagtctagaaatgtgagatcaaggtgtcagcagggttggtttcttccgaggtctctgtccttggctggcagatggttgtcttttccctgcatcttcctatggactgccccctgtgtatgtatgtcctaatctctttttatatggatactagctatattaggacctactttcataacctcattttcacttaattatctttttaaagactctaactccaaaaaaaattcacgttctgaggtactgggtttattcaacattatgaacttatagggggacacagttcagcccaaaaagaggaaaatggggcaaagggaaaatccttcttctccatcttctttcctgttctctctcaaaggccaaggtgagtgagagcaacattggatcatgggatcttggttgccctgcaactcaagagatatttggcttcaacgttagcagtgagcaacagcagagctgagaacagtggtatagaactgagtcacactgagtcaggctacatttcccaggctaatttgcaaaccagaattccagatataatttttattcactcaaactttccactcatgaacttcttaaatgtattttgaaaaactatgcacatcctcatacatgttttttaaatttaactttttattttgaggtaattagagagtgacatgcagttgtaagaaataatacagacagaaccttttaccctttaatccagtttccctgatggtaacatcttataacacttcagtacagtattgcaatcaggatattgacatttgtgtcaatgtcaatattacagtcaagacagtatttttgtcactccaagtatcccttatcttgcccttttatggtcggttcacctccttcccacccccatcacttccttaaccactggcaactatgaattttttctctatttctgtacttttgtcatttcaagcttcttaatacaaaatgttatacaaatggattgtgctttttttttcttttcaataaagtttattttatttatttatttattttttttgagatagagtctcactctgtcacccaggctggagtgcagtggcaccatctcagctcactgcaacctccacctccaaggttcgagtgatgttcatgagtcagcctcccgagtagctgggattacaagcatgtgccgtcttgcttagctaatttttgtatttttagtagagacgggtttcaccatgttggccagctggtctcgaactcctgacctcaatgatctgcctgcctcggcctcccaaagtgctgggattacaggcgtgagccaccacgcccagcctggattatgcttttgatgtcaagcctacgaattctttgcctggccctacatctcaaagattttctcctatttttctaaaattttaatagttttacacttcacatttactctgtaatccatcttttttgtttctttatctatttttagagatggggtcttgctctgttgctcaggctggagtgaagtgacgtgatcacagctcactgcagtatgtaaccttttgggactggcatttttcactcagtataactctctggagattcatccaggttgttgtgtgtatcagtcattcttttttattgctgagtattatttcatggtataagtgtacaatagttggtttaaccatttacctgttaaaggatatctgggttatctttggctacaatgagtaggcagttagacaaacatttgcatacaaggttttgtgtgaaggcattgtctgtgcttgtgtatttgtgtatgcaagttttcatttcttggggctaaatacccaggagtacagttgctgggcaggatggtagtagtatgcttagttgttggatttttgttgttgttgttggttttgttttgtttttaagaaactgccaaatcatcttccagagtggctgtaccattttatattcccatcagaaattatgagagatccagtatctcttcttccttgccagcatttagcattgtcgccttttttttttttttttgagaaagagtttcactcttgttgcccaggctaggtacaatggtgcgatctctgctcaccgcaacctctgtctcccgggttcaagtgattctcctgcctcagtctcccgagtagctgggactacaagcatgtgccaccacacctggctacttttgtattttcagtagagacagggtttcttcatgttggccaggctggtctcaaactcccgacctcaggtcatctgcccaccttggcctcacaaagtgctgggattacaggtgtgagccaccgcacccagcccattgtcactatttttattttagccatcctgataggtgtggagcgattatctcattgtggttttaatttgcatttccctaatggctaatgatgttgaacaacttttcatgtgctaatttgccatttttatatcctccttagtgaaatattaccttaagtcttttgcctgttttctaattggatttttaatgtgttttctttgttgagttttgagagttctttatatactctagatactagtcctttgttcaatgcatagtttgcaaatattttctcctactgtgtagctcattttttcatccacttaccagatcttcacaaagcaacagttttacattttgatgaaatccaatttatcagtttttcctttcatagatcatgctctcaatgtcaagcctaagaattcttcgcctagacctatatctcaaatattttctatttttctaaaatttaagagttttatgctttacatttactccataatccattttgtttatttattttaattaattgtatctggtaaaggttaaggtattgcatttctctgacatttttttttttttttgaaacagagtcttgctcagtcacccaggctagagtacagtggtgtgtcacagcttatgacagcctcgaactcctgggctcaagcaatccttctgcctcagcatcccaagtagctgggactacaggcaggagccaccacaccaacattatttttcatttttgtgtatagacagggtcttgctatcttacccaggctggtcttgaactcctggactcaagcaatccaatccagttggaattaaattttgcataaggcgtgagacttaggtcaagtttcatttttattttattatcttgcctatggatgcccaattgttccatttcaccattgttcaattcactatttgtgaaaaaggctatttttcttccactgacttccttttgcacctctttcaaaaatcatttgggcagattgtgtgggtctttttctacgttctctattttgttccactgatttgtgtgtccattcctctgctagtaacacacagtcttgattactgtagctataaaacaatacttgaaatagggcagactgattttcaactcactttattcttctttttcaagaatgttttaggcgtcggcgtcgctcccgccctggagctctaggcccgcttttccccgcttgagtctggcgtcggggtcattgtgtcttgacaaccgctccggtacccctttccgaggcagcaggtgcggccgctttagccttgagcgggctccgcgtctgcctgctggtctctgctagtgccgacccttctgttcgcggaccccacgccaagcagcgaccctgagccgacaggcggagcacccggcaatggcggcctccacggcctcgcaacggcccctcaaggggatcctgaaggacaacacctctacgacttcctctatggtggcgtcggccgaacatccccgtgggagtgtccacgagcagctgagcaaaaaatcccagaagtgggatgaaatgaacatcctggcgacatatcgtccagcagacaaagactatggtttaatgaaaatagatgaaccaagcactccttaccatagtacgatgggtgatgatgaagatgcatgtagtgatacagaaaccactgaagctatggcaacagatagcttgctaagaacttagctgctgctgaaggcttggagccaaagtatcaggttcaggaacaagaaagcagtggagaggaggatagtgacctctcacctgaagaacgagaaaaaaagcgacaatttgaaatgagaaggacgcttcactacaatgaaggactcaatatcaaactagctagacaattaatttcaaaagacctacacgatgatgacaaagttgaagaaatgttagagactgcacatggagaaagcatgaatacggaagaatcaaatcaaggatctactgcaagtgaccaacagcaaaataaatcacgaagttcatagaagggatttgttcaacactcttattgtttgttagatatgaaccccgttgctataatacattgcttctcgttctccacaagtcatgacttaagtaccaaagtgcataccagttattatatattgccaagaattaaatgaaaaccttaaagactgattagactgaaaatgcctaattgatatatatattcttgtgcctagtactttaccacaaatacggtgtaatatcatcagtccaaaactgtattacttttgtaaaaatactggttaatttgtatattatatagcttttcatgctttagaggttaaacaatatctttggggggggggaactaatttattttcatcactctaaatgtggtgatagctcttataaagtttgttgacttttttttttaaccaaaagccaattgaacaacaggatatatatgctgataaatattcaggctgaatagtattttaacacttgtcttcaacttgatttgtctgtttaattgaaaaggattgtgacctggcacggtggctcacgcctgtaatcccagcactttgggaggccgaggcaggtggatcacgaggtcaggagatcgagaccatcctgactaccacggtgaaaccccgtctctactaaaaaaaatacaaaaaactagccaggcatggtggcgggcgcctgtagttccagctactcgggaggctgaggagggagaatggcgtgaacccgggaggcggagcttgcagtgagccgagattgtgccactgcactccagcctgggcgacagagcgagactccgtctcaaaaaaaaaaaaaaaaaaaaaaaaaaaaaaaaaaaaaaagaaaaggattgtaagagttactgttacattttctggcctactacctttaaaattcctgttgcatttctttgtatttacaaggaaaagactgaactttttctcatcaaaactagcttttttctcacaggttaaacttgcaccaatgtctgctctttttttttaatgtttttggtactctgggcagacttcagttttttaaaaaataaagattctaatgcagctatcttggcattccctttaaatacctgtcttaacctcctacttttatttcctactcctttccacacacatgcatacaatcctttaccttttaaagaatcattaagactgtcacacattaggaactctttcgctcactcttctgtcatttgctgcaatattgaaattcttattttgaccatcaatgcctattaattcttctaatacatgaagaaaatgattgagtagcagcagtactataggtgggaaatacagtttaactgctgaatttttatacctctctgatttatagcttgctaattaaattgctattaatagtttgtttggcttaattagacttaagaaaacaacaggttttttttttttgaggtttttttttttttttttgcatgaggagagaattgtatgtaaccagtgatatgattattcctgaatgtacagacagaagtaagcctggacattgtttaatttaaaaactttagtccctgctttaagggaatatgataatgtatactatgacaaatgtactttattcttctaacacagtaagaattacttggaactttttcctgaaactaagtgcaggaaagccctgtgtgtcttggtttagtgatggtttcatttctagccatacaactgatggattgtatacaatttttgttagtgccaaaataatctgttatatgaacagacttctaaaataatttctgtatattatatatgtaagaaggcttttattgaacagcttattttccacttgcaagtttatggaaatatcaatatgtcaaaataaaaagtgggacaattctttgctgttagaagaatgtgcttattattttgatttcttaaatggtacataatcaaagtactgctgaactataggtgcagtattctactaaacatttcagctagtaataccactgatttagaaacaaaactgtttatttttgctttctgaatttagaatgctgggattacctgtttaaatatgttttagggaatatagagattaaatctgtacatacctgtgcacatatattcatgcaccctctgattttggttttctcgtttttgagttcttagaaagtatccacatactcttcttttagtagaagtagctgttttagagagaagaaaaggatgagactttaaatagttgattctttttgtgttttctacaaacttttttgaattttaaatcacaagcaaactaattttctggtttttagaaagtagatgatgatttcagaggagtaagacatgccaaacagcgtgctcggtaggattttaggtagtcaaatgcagctgagaaaaagtattttcaagtcataagttgctaattgatatgctatgaactagtcaaaataggaaccatatgattcatgttagattttcctctagagatggatctgaatgttcagttccagccaaggtagattttactttcaactttttaatcaatatcactttctgtgcttaatctctttggtgttaccttgtccattttcatttgtctaaaattctgcagggatgactacaatttggcataatggtataaatgaattgttaagggtaactttaagttgaagattaaagcaagatgccattttccccatgtctttcattttgtttacattttttccctttaagttagtatacactacacatactacaataaaatataataatatgaaaaaagaatattttagatattctagtccctttgcctttccatgtaaattttagagtaatcctacctataattaacaaatcttgcaaagattttgattggaattgtgttaaacttgtatattggtttggggagaattgacatatttactatattgaatcttccaatccatgaacagtatttctctccacatagatagagactgaatagatcttctttgatatcgttcaccagcattacatagtttttagcttgcaagtcttgcatgttttgttagatttacacataagtgtttcatgtatttgagtaattgtaaataatatatttatatttttgggccaggcgcggtggctcacgcctgtaatcccagcactttgggaggccaaggtgggcggatcacaaggtcaggagatcgagaccatcctggctaacacggtgaaaccccgtctctactaaaaatacaaaaaattagccgggcatggtggtaggcgtctgtagtcccagctactccggaggcaggagaatggcgtgaaccccggaggcggagcttgtggtgagccgagatcgtgccactgcactccagcctgggcgacagagtgagactccgtctcaaaaaaaaaaaaaaaaaaagaaaaaaaaaaaatatatatatatgtatcatttgttcattgtgagtatgtagaaatacaattgatactggtttatcctgtattctgttaatttgctgaaatcacatatctagaagtttttctgtagcttccttgtgattttctacatagacaatcatgtcacttacaaatgggagctgtttatttcttacttcacaatctgtatgcctttaatctcctttttcatgcctattgcactgtctagaacttccaacactgtgaataagagtggtgagagtggacattcttgccttgttcctgattttaggtagaaactattcagtctttcagaatcaagtatgttcaccataggatttttgtagacgatctttatcaagtaaagaaagatctcctctactcctatatttctgagattaaaaaaaaataatgaatgggtgttaaagtgggttaaatactttttcttcatcaattgatatgaacaagtaaattttcctcttcagcctataatatgatggattacattaattaattgtgaatatccaaccagctttgcatccctgggataactctcacgtggtcattgtatataattctttttatatgttggtaaattccacttgctaatattttgttaaagattgctgcatcatgaggaatattagtctacagttttcttttcttcccattgtcattgtttggttttggtattgaggtaattctagctttataaaataaactgggaaatgcttcctctgcttctattttctggaagagattaattggtgttaattcttctttaaatctttggtagaattcttcattgaaactatttgttcctaaatatttccttttgtgagtttttaaattatgaattcaatttcctcaataggtgtagacatttttgaattattttatatttagtgagttgtggcactttatattttttgagaaaatgatccatttaatttaagtgtcaaatttatgtgtgtagaattgttcatagtattcttttgttatccttttgatgtctgtagaatctttgatgatatcccatttcatttctgatgttggtagcttctatcttctgtcgtctttttttctgagtcttgctagtggtttgccaattttattaatctttcaaagagccagctctttgcttcattgatttttttttgcttttgtttttctgttttcagtttcattgttctgcttgctttttattttgttattcttttactagattcttgaggtgagagtttagattattggtttgagacttttcctcttttccaatgtatgcagttagtgctttaaatttacttctcaaatgcaaatcaaaaccacaatgaaatgccatctcacgccagtcagaatggtgattattaaaactcaagaaacaacagatgctgacaaggttgtggagaaatagaaatgcttttacattgttgatggaatgtaaattagttcaaccattgtggaagacagtgtggcaattcctcaaagatctagaaccagaaataccatttgacccagcaatcccattactgagtatatacccaaaggaatacaaatcattctattataaagatacatgcacttgtatgttcattgcagtactattcacaatagcaaagacatggaatcaacccaactgcccatcaatgacagactggataaggaaaatgtacatatgcaccatggaatactatacagccataaaaaggaatgagatcctgttatttgcagagacatggatgaagctggaagccattatcctcatcaaactaatgcaggaacagaaaaccaaacaccacatgttctcacttataagtgggagctgaacaatgagaacacaaggacacagggaggggaaaaacacacactggggtctgtctggggcgaggttggagggagggagagcatcaggaaaaatagctaatgcatgcttgtcttaatacctaggtgatgggttgatatgtgcagcaaaccaccatggcacatgtttacctatgtaacaaacctgcacatcctgtacatgtatcctggaacttaaatttacctcttataactactataactgtatcccacaaattctgatatggcatattttcatttttgtttagttgtgtttattgtgtgtatttttaaaaaatttccttgagacttcctccttgacccatgtatttctaagtgtgttgttttgtctccaaatgtttagatattttcctgttgttgatttctggtttggttccattgtggtaggagaacactttctttatgattttatttaaaaaatttgttggtcttttattgtcttagatatggtctatcttggcatatattctgtgggcacttaaaaaaatgttattctggctgggtgcagtggctcatgcctgcaatcccagcactttgggaggctgaggtgggtggatcacctgaggtcaggagtttgagaccagcctgatcaacatggtgaaacctcatctatacaaaaaataaataaataaataaataaataaataaataaataaaaaattagccaggcatggtggtgtgtgcctgtaatctcagctactcaggaggctgaggcaggagaattgcttgaacctgggaggcagaggttgcaatgagccgagattgtgccattgtactccagtgtgggcaataagagtgaaactccatctcaaaaaaaaaaaaaaaaaaagtgtattctgccatggaatactatgcagccataaaaataatgagatcacgtcttttgcagggacatggatggagctggaggccattatccttagcaaactattgcaggtacagaaaaccaaatactgcatgttctcataagtgggggctaaatgatggacacatggacacaaagaggaaaaacacatactggggcctattggagggtggaggttgggaggaggcagagggtcaggaaaaataactaatgggtactagacttaattcctggatgatgaaataatctgtacaacaaacctccatgacactgtttacctatgtaacagacctgcacatgtacccctgaacttaaaataaaaggaaaaaaaagaaaaaagaaaaaggaaaatctcgtggaatctactaaaagcaacgaaaaagaaaataatgtatcttctgttgttgggtggtgtgttctataaatgttgattagatcttatggtttgatgttgtttattcttctatgttttttctcaatttttgtctatttgtttaatcaattgttgagagaaaactattgaagtcttcaactatcattgttgacttgcctattttcttttcagttctatcagtttttgctttacataatttgcagccctgttgtttggtgcatacatatttaagattgctatgtctttttggtagatttacccttttattattacatagtgttcctatccatttctagtaattttctttgttctaagtttatttgatattaatatagcctccctttattattttttgtctgatatatgtttttctatcctttaacttataaaccgcctatatcattatatttgaagtgagtttatcataaacagcaaataattgagtctttttttttttttttttgagacggagtctcgctctgttgcccaggctggagtgcagcggtgtgaagtggtgtgatctcagctcactgcaacctccacctcccgggttcaagagattctcctgcttcagcctcccgagtagctggggctacaggcttgtgccaccacagctggctaatttttgtacctttagtaaagatggagtttcaccatgttagccaggatggtcatctcctgaccttgtgatccacctgccttggcctcccaaagtgttgggattacaggcgtgagccaccgcacctgacagagtcatatttttaaatctattctgccaagctctgtctcttaaaattgatgtatttaggcgatttatatttcctataatattgttatgtccaggcttaagtctgacattttattttctgttttctgtttgttctctctgtttttcatttctttgttttctttttcattgcttcctaaataattttaaaattccattttaatttatctatagctgtgtgtgtgtatgtgtgtgtacctctttggatagctcttttagtggttgttctaggtattacattatatttatgtaacttatttattgtcattaattaccagtctgagtgatgtgtagaaatttcttctctctttgtttaccctccctcatttataattgcctgtaatattttctctatatacatttataaccatatgatacagtattatacgtttttcttcaatcctataatttaaataactcaagagaagaagtaaagtccattttttaacccatattttttcttgccatgttctttcttccttcctgatgttccaactgtcctcaatttaactttttgtttttttagggtagacctgttagtgacaaattctgttagttttccctcatctctgtatgtcttaatttccctggatatttttgctgatatagtgttctaagttgatatttttttttcctttcagcactggaaaaaggtggtgacctccttcgggcttacacagtttctgatgaaaattttgctctgtcatttttttcacctgttagatgtcatttatctcactgctttcaagattctttttatctttaatttttagttaattactatgattttggtgtggctttctttgggtttgtcctatttggggttcactcaccttcttaaatcactaggtttatgtcttctgccaaatttgggaagttttcaaccatatttatttgataatttttttcagcttcactctctttttcctctcattttgggactctgagtacatgaacattaaatcttttgttatagccccatgggtccctgaggctttgtccattttttccagtgtattttctttctttcttttgttcagattaagtgattgctattgctgtgtcttcaaggtagctaattctttcctctgttctctccttctgctgctgagcttatttactgggctttttattttggctattgcacttttcagttctaaaatttccacgttttcttccgtatatatcctatttttatgctgaaacatcctatttttttcttttctgctcttttcttcttctttctttttttaaaccactgaactggacatcctatttttttcattcttttaagtgttaattgctcatcaaagcattttaataatggtggctttaaaatcttcatcaggcttttctttccgttttggcatctattttattgtcttttaaaaattcaatttgagatattcctggttcctgatatgacaaataatttccaattgaaacttggacatttcaggcattatgttataaggctattggtcttatttaaactgttttagctggcttcttttaacacctctccagcaggtaggcaggtgagcttcatgacgccaggtaggggtaggagtccaggcttctcactctgccttcattgacacctcagataggtccccattattactgagtggggacagaaattctggctccctattaggtgcccactaatacctccctggttggttgggagaggagtgccacttactatccctcacatgacctttattgacaccaagatgggacagtggagtggaggagtgagtggtaggtatcagggagtggttgctggattaactctgggtggtgatgaaaatcctgactctccattaggcattgtctgacatcaccctagaggagaggggaagagatgcttcattactgttgggtgaggaatggaagtctaggtttccattgacatttcaggggcttggggaaaggagtacattttcaccaagagggcatgaccatcctgactccctattcactttctctgacaccatcctggtgtgtgtgcatgtgtgtgttgaagtgttgggttccttatgacagcctggtgagggtgaaagtctaggctcctcatttgaccttagctggtgggggtggagtcgcagttttttctgtggtgtttggctggccccattacccaagatggagtgtagtggtgcgatcatagctcactgtaacctcgaactcctgggctcaagtgatcctcctgcctcagccttcagagtatctaggactatgacacatcgaactatgcctgactaattttattattattattcatagagacagggtctcattatgttgcccagggctggtcttgaactcctggcctcaagcgatcctcctgcctggcctccttcccaaaattactttaaatgatataatagctgacagcttgaataggtcctctttattttgttggaggcagagtgttagaagtgacctaacaaaaaggatttgtttcttgtcactagactcattcactgtgtcaatgagtgtgtcagtggtttgtgggaagcaaacttaaatgaaaatgtatatttttaattaaatgttatgagatgctttttttaaactattggctcttgtgaatttcagaaaaatattgcaagtcatttgacttagctacttagcttgcactctatgtaaaaattttagaattttacctctttgaaaaactcctaatatcaatagtgatattgttgttttgcagcctcaaatgattttgttactttggactaattttcactgagctagttaataagtgactttttattgtctaaaaaattcttaagtgtatcatagagagaaagattattgggtcactaagtggctttctatatatatacctttgtccatatttaatttttgcaaaactcaaattaaggtggtaaacttagtgtggatatacattcatgtattgtattgataagattaactacgttttaaaactaaagtggaaagttttaaacaaaattgtcattcaactatatatgtatttctgtaaaacacacacgtaatgatgaattcgaattaataagcaaaaaaggagaggatttgtaatttaaaattgatcttggaatatacactctacacttaagacagagaaaaaactttttctttccctttagcataatctgcccagctagcggtggtttcttatcagaatgctctcacttaataccttgataacttttagtgctttgtgctgatagcatcaagtttttaaattattttaaaaacaaacaacaacaaaaaaccatttgcttctgaaacacctaaagtttcttataattgttaccttctttatgtttattttcaaatgttttattgtcactctggttattgagatatcaaagttataacaattgctcactctcaggtacctatgcacttaagtgaccagtttctctgaaaattcttttttgttgttgccttcttccaacctcataccctgaattcagaatactaacactgtcaagctatttttcacgcccccaaatctttgttttttctcactagacagccactacccatttggccactaggtggcgcaaaaggcttaatttttcaccttcctccgcctactgtgaaggaagctaaaagtaattagatgtgtttggcatgatttttatattttaaattaacgctgtactatcaaaagaactacctgtgtctcaaacccacaatgtggtaaaagctgacaaataaaaaacagtagctcaattttctagattaattttgtccaggttaaaaatattattgatatatgttttagtgaccacataggtttcagtaagggtaaaaggatgctcttgttcgtactccaagtctggcatggtgactgtcaatacattcattttgaagaagattttgcttctgggtttagccctaaaacaggccaaatagagacgataaaatgagtggaactgaattagagcatttctgaaaagttttatttggttaattctgccccttaaggtcagaaattgtgtaggaaaagtgtttcaaaattataaataaggcaaaattgtacgtgcttgattattttatatcacacttgaacctttgctcataattctgcctgatcaaaaccagagtgtttcagggattgtaatttgcctaagacgaacccggccagccctgtgcgattagaggttaatcagcagagagctgataagggatgctggctttctctttttctccggtaaagaagataacaccaaggttatgattttattgccctctagcacgttagccattttgaatctctagcctagaaattatttcctcacagagagatacagctctgtttttcaaatactctttggatcaaggctcttgtattcttgctggttccctctttgagtttgataaaactttgaaaagtctaccaaagaaatttctctcagaactagactttagagaggaaatgctggaactacggatgagaggcacatgtatgtacagggtcagaccacgcagagagcaggtctgatgagccacaccactgctgctgccccatggcttctagacgctgctgttggttctgttgttaggacctggaggttgctgcagccaccactgaagacacctcctaaaccacttctgtttcaggaacttcacttaaaaaaaaaaaaaaaaaaggaaaaaacccaccgcttccccaaaagacagttgcttcttctgtcacctttgccagagaaataaatacagtaaaaggtgctctgcaacccccacaccctggttcctcctgtggcccctttgtaactgaagtcttaggtggatgaatttaattggtggaacttaggtgctctagcttcaaagaaggctaggggaagtgagctttctggtttccactttagggaggcaggactcaaaaggtaggggaaatttcacagtactctaaaggtgttcaaatcccatgggcagccagtaaacatcacaggtgtgaggtgctgggtggagtggctgccgtgaatatgtgttttggttcatggactacatcagtggctcttaaagtccagtaattcacagattcatgagagataataaaatgattatttttgttttaagccattaagtttggagttggtgtgctgcccagcaatagataatggaaacatacagtatgtatttctgcaagtctggcttcttcacttaatattgtttctatgagattcgtccatgttgttacattttcagtagttgatgaagtttcattgtttacatagtactgtgttgcacgaatagactacgttttgtttatccatttactgttgaagaaccattttgttaaacaatttgagagtaatctgtggaaattatgccacttgacccctaaatattttgtcatgtataatttaagaataaggacatttctcctgcaaaaccctaatactgtcatcacccccaagatacttaaaattgataccatattatcaaacacacaatccatattaaaaaatcccctattgtcccagtaacaccttatagtaaatgtctgttattttaagcgggtgtcattcattacatggcaataggtaactaatacggtgagtctgcttcttccagcaaggaccctcagggggtgcggtgattcatagttctcactcagacttctctgtgtctgctcatatgtccctatttcatatctcagggtccggtctatcccaaccaggggtcttgccttatcacaacagctgctgttggatgatgcaacaaacatttctacaacttcataacctttatcataagcccccgggcttgaccctcagccatatctgtgctgggttgcaggagaaaagatagcctttaaaactgctatagaggcatttacagtttttcattcatgtcttgagtttggattaaaggcttttaatttgtctttttttcctttgtatgctcttgagggcagtctgacgcagccagtctctgaaggttggcacaaaagcctccatcgagtcacccagcttttgcctggtacctatcctaacctaaaaccttgccacatgttaccttggcgaaaggccagtgccacacttcagtgatgattcggctgtcctacttggttagaaccgagttcacttccttcctcaacactcctgccacattgatctggaagtttcaccttgagccaagtgatagttaattttatgtgttaacttggctaggctatggtttctagacatttgaataccagtctagatattgcagtgaaggtattttttagatgagatttacatttaaatcaatagattttgggtaaagcagattaccctccataatgtaagtggcccttccaatcagttgaaggtcttaggggcaaagactgaggtcctccaaggaagagggaattctgcctctggaccaccttcagactcaagccgcaacatcagctcttcctgggtctccagcctacctgcagatttcgaccgtgccagctcccacagtagtatgagccaattacttaaaataaatctctctctgccaacatcctattggttctgcttctctggagaatcccgactcatacaagccactttctatagaaggctgtttcttcgagaaatccaccctcttctatgtcaacagagtttagaatctccatactttatctcttcatttttgagaacataaattctgtattacacatacttatactatactatatatgaaactttcataaacattgctgggcaaagttgaatattgctgaaccaatttccgatgcttctgaataagttcaatggagttaaaacatttttcttcttacatggtatgtccagtgccccagagccagcagagttaagaacttggtaaggaagaccaaagataatccatatattctagtttgttatataatataaaacatgtttattagattctaaaagacataaaaagaaaataatacatatgtatcagtgagagaggtgcaaattaggaagagaactaaggattattcttaattcctgccttcctttctaaatcccaatcctcaattgaactctttaattatatttcctgtttattttattgaatggaaaaaatggaaaattatctaacatttgtcatggaaatataggagaaattactctcagagatatgatgttatttaagtcattgacatattgttaacctcagatgcaaatggtggaattaataatattcctcagttcatggtacatagtcactgttggtctagtgctagtttgtagttgtatttgtattttttattttttagaaatacggtcttcctttgtcacccaggctggagtgcagtggtgtgatcacagctcacagtaagctcaaactcctgggctcaagcaatcttcctgccttggcctcccaagtaggtaggactacaggtgcatgccaccatgccagctaattaaaatgttttaaatttatttttggtaaatggggtcttgttatgttgcccatagtttttagtgctatgataagctagtaattatagtgaacattcttgtcttggatacccaaggtttttccgttatgtatactagtggttacagattttttggattataacctttgccaaaataggaaagttttgattcctgcttccttaactgtttttcaaaaatcacaaatggatatactttaccaaatgtcttttattaatagactgagcaaaggaaatgacttttctatgaatatggtaaattatagcaacaatatgttttattatattgaaccaccctagtattccaaggattccctatttgatcttgatgtatcattattagcataatcattattattattgttattattatacatatttttagagacagggccttgctctgttgcacaggccgaaatgcagtggtgcaatcatagcttactgcagcctcaaactcctgggctcaaatgatcttcctgcctcagcctccctagtagctgagactacaggtgctcaccatcacacctggctaattttttaattttttgtagagacaggatctcacaggatctcagtatgttgacaatgctggtcttgaactcctggcctcaggcgatcctcccacctcggcctcccagtattattatttgtaatattgttgaattcggttcataaataattatttttttctcccatctgtgttcaaggtgaaatgggtctattatttttttttccttgagttttccacaactcaatttggagtcaagattacactcggctgataaaattagctaatcaggtttagtttttttctgttttctggaaaaagtatataatatagaagtttcatgttccttgaatgtttgatagaactcatctgtgaaaccatctgggcattttcaaaaatatatttttttattagatgccattgataactttaaaaattgctttaatactcattggtatagtcaagttttgtatttctttttgtgctaattttgatagattaaatgtttctaggaatttgcttatctcacctaggttttcaaatttattagcatatacttgttcataacactctatgctttatatctgtgtcatatctgtagctgttccccctttttcattatgtatttgtttattcattttttctccctttatccataatcggccttgttgtaactctgaatatcttacaaatatttttaagtaagcagcttttggaatcaaaagtatgttaattttcactacctagttttttgttctctatttctgtttcattgctttctattcttatctttataactccttttcttcgtatttctttaggtttgctcaacttctctttttccaaatttttgagtagaatttctaggtcctttattttaacttttcttgttctaataaatgtatttgaaattataatattattttatatgtatattttatgtgtaacatttttaacacctggttctaaaagagttaattttctttataactgctgtttatttatttgacacagggtcccactctattgctgaggctggagtgcagtgacgcaatcatgcctcactgcagcctccatcttctggactccagcgatgctcccatccacgactgccttttaaatccatgttactgataaatatatttgttcacttacaattttaagtatattttagttatcaagttctaattttattacagtatggttgcagaatatagtttctttctttctttttctttttttttttttttttttaagacagtgtcttactctgttgcccaggctggagggcagtggcacaatctcagctcactgcaacctctgcctcctgggttcaagcgatcctcccgtctagccttctgactagttgggattacaggtgcaccccatccagctaaattttttgtagagacggggttttgccatgttgcccaggctggtctcaaactcctgggctctagggatctgcccaccttgacctcccaaaatgttgggattacaggcatgagccactgctcctggcctagaatatagatagtttctaagataccgatactctggaatttattggcgttacctttatggaatgatgcatgtcctatttgagtaaatgttctgtgtggcttgaactattatatataatttttggttttctggcaacttttaaaaaatgaattttatgaatcttgtacctcattttatttccttctttgctttcactatcctatggcctggagccaattattttttatccatttatagttggctgataaatatgtgtcctgttaaaccggctctctgaagaaaaacaatgcttctgacttgtagcattgctgatttctatagtataaatacttccatagtggtcaatatcaagttaccaatagttaacaactgtcttcaaaaatcctgaatactttgcagtctgctcttgctagccagtataagacagcgcaccacttttttttttttttaagatattcacgttgtccattagtttccattagtttcactccttggcttcacttacttttcttaaccatattttctctctgacccagtgttgttttcttcttttaaaaattgttttaaattatctctgtaagctgctacaaaccttttattggaatgaagggcattagaacagttatttggccaatacagaaaaatgaagtcttctaattttttttttttttttttttttgagatggaatttctctcttgtcgtccaggtggagtgcaatggcgcaatcttggctcactgccacctttgcctcccgggttcaagcgattctccctgcctcagcctcccgagtagctgggattacaggcaccatgcccagctaatttttgtattttaagtagagatgaggtttcaccatgttggccagactggtcacgaactcctgacctcaggtgaaccacccgccttggcctcccaaagtgctggaattacaggcacgagccaccgcgcctggccgaagtcttccaattttaaaagatctaatcttcattcagttctcaaagtctttgctgtgcccttaaggcatgtcacacgcatgtgcagctcaggggtaacctggtactcctgagggttcagactcagaattagggaatttccgcctgtactctcagtttggagattcccctacacattcctgcccgcaggggccctttttcttcattcctctggccagaaagccggtatttctcttgttaactcagggcttgtgctaccacgcagtgcagctctgcacctgaggcctgacgtcagggcagagctgggaggaaaaaaggggaaaacattgaaaacccactccccaggaggggcccctctcccagttttgaccctcttcacaatccacctgcttttgtttactttttggagtccttgagtacttgctttttgtatactgcccagaatttctacttgtgatcagtgggaaaaatgggctatttaaaatctcaaataagttaaatatcatggctagaaacaactccaggcatttgtaattttagatttttttctttacactccagggggatgtgattgttttagagttttgaattcgtatgtttagcctgagatcctactagtatttctgttgaatatgcctgttgactgcccacttgttagcaaaatggcattgaatgttggaactgtaaactaccttagaaatcattcagcaccatcttttgacagaaaaggatatgagagttcactcctgtcactcaggaagtgcaaggcaaagatagaagcagaattaaatttgttttaatacagttactcagccatctggtaacagtttcctaagtgccaacgaatgtatggggctatttattgcagattttaagatgatatatggggattgagggaatgagaagttttagggagtggtagaggaagggcatataataagactgaatcccagatcccagcctcagaacttattttgtgaccttggtcaagtgatttaatctttccaaacctctatgtgtcctatagaagtaataataatacctatatagggttgggtgttttttttgtttgttttttctttttcttttcttttttttttcttaagatagggtctttctctgtcacccacgctagagtgcagtggcgcaatcacagctcactgtagcctcaaactcccaggcctaagcgatcctcccactcagcctcccaggcagctgggactacaggcatgcaccaccgcacccgactaatttttaaatttttttgtagagatggggttctcactatgttgcccaggctggtcactaactcctgggctcaagcaatcctcccgccttgacctcccaaagtgctgggattacaggtgtgaatacagggggttttttggtttgaattttaagagataaaatttataaaacatttagccaatgccacaaatgtagcttcttttggttattgtcattattctttgaaattcacaagtgccccaaaatatttaagcatttttcatgtattgccctttaatatgaatgaatgcattatgaaaggaattcttttacatgcgagtttgctgatagtcttagctaattctcatgtgtgtaggtgtcttgcctatctgtcagtcttagccttaaaggaaagagtcccatcacctcacttgcggcctcatcatcatggaccgcatgatgatgcggaatgagaatttttattgtttgtactacttcaaaatcattcagtacgtgatcacctgtcatgtatagggctctttatatttctagtttagtcccttttgttttctctaggaaagatgttttagacctgggacaaaagaagaaagagtgtatgctgacatctaggagggaagcacccacctcccctaagctccatctccctgagcactcatttcccaatgaccataccaggttttggccctagagagtttattacaaaataagaaagagaagtctggggaaggttcactcatcatagaattttggcagttcattgcccaagatgactcgatggtccacaccggcagctgtaatagtgaccaggtagatgacacccccgcttgagccatcccggctcatggccagagcaatagctgcagagggtttcaagttggagagagggagagagaggatggcttagcttcaaaaatctttttactccccctccatccatatgcctactaccactttcacctcaaaactcatcttccaggaaggcatatttagtggtgtgctggtaaatcagtttttttacaaaaaggcttccatatgtggcatctgctgatgtccgtggtgtaaatgctcccgctatgatgaattgcaagttacaaatagctaagcagttcacaaatccttgactatttaacagtccgctctcatgagtggtcccaagccagcctcagcacacctcagcacaccactggttctttttttttttttttttctccagacagggtctctctctgtcacctaggctgcagcgcagtggtgcaatcaccgctcactacagccttgatctccccggctcagatgatctttccacctcagcctcctgagtagctgggactacaggtgtgcaccactatgcccagttcatttttttttttacttttttttattgttttttgtggagacagggtttcaccatcttgcctaggctggcctcaaactcctgggctcaagtaatcctcctgcctcagcctcccaaattgttggcattacaggtgtgagccactgtgcttagcacaccactggttctcacagtgactgtgtatcctcatttgatttactcagaacagccctggtttatccgtattgcccaagaaccccattgagctttgcatttgtcctgccccttttcactcttaaaagtgtaccaggcccggcattaacttaaatggccacccctgtatttctcttcctgttcctcataatctacttccttcccatgtttcaaagccctccccaggtacccttccacttggctggttaccgtctgtggtgaagcgcctgcactcctcgggagacatgcctggcttatatgctgcatccacataaccatagataaaggtgctgccggagccaccaatggcaaaaggctgtcgagtcagcattcctcccagggttccatatacctgggaaagggatcctcaggttaaagaatcatcaagcccttccttcccactgagacattaagtggtctctgcaccctgcaatgaagccctggtatctcatatccccaaagtactatgctttcagaggtagtgtccttggaactcattgctagaatgacataggacttccatcttcctctgcaggagagtggggaagcccagaggagagagtgctttgggagaaactcacctgacctccttcacgttggtcccagccagctaccatgagatgtgcagacaagtcctctcgatatttatagctgatatttctcaccacatttgcagcagccaaaacaagtggaggttcctccagttctatcctgagggaaatattaggaataaaggttgatagaattttaagtctcattctcctatactgttaccatcatccctgctaaacgacccctgaaaactgtaactgcaatagctcaaactgcagcctccctcccacatgtacaggggaaccagagtcccacaccaccaactggtaagaagctttcaattgctcactcttttgctcagccccacccacataactttcttttggctgcaaggaccctgctcttatggggaaaagcagataaggttacttccgtcccaacgaccttgatttctcgtatggtaactgcctgatattatggtgggtcacaatatcaccttcttcctgattatttatatcaggatagtgatttacagcttttaaactgtgttcacatatagaatgtggttctcaaaataaccgtctcatgaggtactatattatctccactttacagatgcagaaactgacagattcaagtgccagcaagagccgaaacaagacttttccatttcccagtgtccagctcctggaacagcacactgtacagggattcatgcaggttgggggagctctagtgggtggggagtcagaactccagagcttcatacccatggagctccagctggtaggcggccatgtcggccacggcttgggcatcagcagctgaaccagagagtgcacagtagatgcgctcgtgcagcggggacagcttgtcaaacactcggttcaccaccgcctcgctgtcaggagggagtcaacagtcaccaagttaaaactcaggttttttttttttttttttttttttgagacagtctcactctgtcacccaggctggagtgcagtggatcaatcttgggctcactgcaaacttcgcctccctggttcaagtgattctcctgcctcagcctcccgaatagctgggattacaggcacccaccaccaagcccagctaatgtttgtattttcagtagagacaaggtcccaacatgttggccaggctggtctcaaactcctgacctcaaatatctgcccacctcggcatcccaaagtgctgagattatagatgtgagccactgcacccaaccagaactcaggaatttttgagggtgatcattcaatgtctctcaaatttctttgacaagagaatagcatgaagtttaatgcttggattaaagcaggaggcaaataatcatctcagatattattaatcactgcagatgttaatcaaaattaggcttatttttcaggcttagattttataacaaagcaaaaaatgctaaggtaagaaaaatatgcctcatcaattttctttgctattaacaatcttgagagagttatgttctatggaacataatgtcagtaatattgacctaaccccatatactcattttgcatgtgaggaaattggttaggagtgggagaagagacaaaatagttcaatatatggtaaatgagaaaccaggtatctgcttgacagaatcatctttttgatccctaagcacagatggaaagaagaccctcaaaaatctatctcctgtccccctctcagaccctattcctttactcatccctgtacactactgggacaggtcacatacacattcagaccccagatcctcctccacaaattcagagacccaagcacccaccaaatagcttatcatagtggcttttggggaaggtcaactccattcctccaaggctccagtttgccagtcttttcatgaatgggtaaggaaagtgtgtatttgaggccattagcttctttccaaatgcatacatcttcacttttactcaccctgcagacactcgggaatcagaacccatcacaacgcccccgtcaaactccactgccatgatggtggtctgcagagacacagaatatggaatgtcagggcaagaacagccttgatgccctcatgttagagaagaagaaacattcccagagaggcgaagtgactggctcaaagattacacagtaacaggccagagctgactgtcagtacaggctttttttcccttcatctttccactttctctattgcttcatccggctgcaggggaatgccacagcccagctgtgatacaacacagaaagaactgtgtccctaagttccaacttgcctagtggaatcctctccactgtagagaggtggagatgaggctcctacaggtagaagtgaagcagctccgcaagtgaaaattatctccaacggaagggctcatagtatgtgcagatgtggtgtagacccaacacagagtaattgactatgatcttgggaaacaaggtcagtctatttttttttttttggtccacaatcctccactctcaccccccatttcatcagaagtgagctcttccaatttactgaacattggaaaaaatcgaggagggcagtggttagcatggccaggggcaaggcaggagagaagcagcaaggaacacatacagatggttgaaaataaaagtttcagttatggaatttccgatcaagaggtaaatacatatctcagcagccagggaggtaaatttgtaccaagagataatttgactgagaagtttaagctgacttttccaggtcaagaaaagaatcaagaagaagtgagggaagataaagctacatttattctactattgagttggaaggagccttaaagatcctcggttcaaatgaggaaaccaagtcacagaaaatgcaaacgacttatgcaaagtcacacagagttaatagtagacctgggactaaaattcaggtctaactcttatcccttgtttccacttctacttcctacttgccactgctcatttggcagtgaggggagatttcccaaattataagtggtttcactgtgtctttcttaccaggccgtaagttactctggccccaaaggacgctcctctgagtatgctttccgacggaccgacttatcatgaatagagggtcaaagaacagggttaacttcaagttagaggctattcctctctaacaaagccgcccccaagccacgagtggtggcagtagtccagagcagaagccagccagccagtcttggggctgccatctgccccaggcgcccatcctaagcaaagtccccccagtgggcacatgggagtgggcagggaagacacagggaagggagtaaggcagcatctgggccaaggagaggccttcctgggtcaagctagggaagggcatcactagttaacacagaacgcccattatcagtgcttgggctaagagttgcccagtggcaagtttatcaaaagtctgtgtgatgagttggtccttctcaataagtgcctatatttccttctcccaagtgctgttctacttcacccagggcaccatttcctcatctctttgcaccatccccaaccccctttcttgatttaaccagcccccactgtccgggaccagagtgaaagcgaaagcgctttagagtagcttcccgttgacgcttccagctaagagtcaaagcacccgctttttccaccagcctcgcgtgcctgttcccttcacggacactctagacgacccccctcagaaaagaaatactctatgctcattgcgggttgcaagcgctggctgctacaggcgacctccctgcgctcccgttggtctctgcattcacttctccgcgcgcgcttccagggtcccctggccgctgcatctcctccacccctctgccaaccctcaagcccagacccattaccccggtgtggacttctcccgcccggggtaagtccccggttggtgctcccgcccgcagcatccctgcaaggcaccgctctcctcgccgcctggggcactggtttccaacctgggacagcgcacaacgcgcagccgacagccccgccccttcgcggcgccgccaggaggcgcctgggtgctgcggggctgctttgcgcgcggcgctaacgtgtgtagggcagatctgccccgagacaagtgacgaggcagccccgccctgaggctggggtgggaaaactggtgcaagtggaaaggcaggaggcagggagaggcgagaagggtgtgcgtgatggagaaaattgggcaccagggctgctcccgagattctcagatctgatttccacgcttgctaccaaaatagtctgggcaggccacttttggaagtaggcgttatctagtgagcaggcggccgctttcgatttcgctttcccctaaatggctgagcttctcgccagcgcaggatcagcctgttcctgggactttccgagagccccgccctcgttccctcccccagccgccagtaggggaggactcggcggtacccggagcttcaggccccaccggggcgcggagagtcccaggcccggccgggaccgggacggcgtccgagtgccaatggctagctctaggtgtcccgctccccgcgggtgccgctgcctccccggagcttctctcgcatggctggggacagtactgctacttctcgccgactgggtgctgctccggaccgcgctgccccgcatattctccctgctggtgcccaccgcgctgccactgctccgggtctgggcggtgggcctgagccgctgggccgtgctctggctgggggcctgcggggtcctcagggcaacggttggctccaagagcgaaaacgcaggtgcccagggctggctggctgctttgaagccattagctgcggcactgggcttggccctgccgggacttgccttgttccgagagctgatctcatggggagcccccgggtccgcggatagcaccaggctactgcactggggaagtcaccctaccgccttcgttgtcagttatgcagcggcactgcccgcagcagccctgtggcacaaactcgggagcctctgggtgcccggcggtcagggcggctctggaaaccctgtgcgtcggcttctaggctgcctgggctcggagacgcgccgcctctcgctgttcctggtcctggtggtcctctcctctcttggtaaggggaacgcagggcaagaggggaggacacaaggggactgggacaggaatcaaaggtaattgtcagtaaggtagagtagcgtgggttctgggaaatgtggagcgggagaaggactcctagcgtgggtcttggaacaccacttcggtgtagaagaaacggcactggactggcgggggccagaggttctgggctccattgctgaccgggtcttgattctttgggccacgccggaagcggggaaatcctttgctctggggccgaagggcggggcatcctcatctctaacaggaggcttttctacttcatgatctccagccttcctaataaaatcctgaaagttctggtagagcaaccacagggtagtgagttccagggcagcctatttaggttcgggattgagacgtcagtgtttcctttctgctgatgccctccaggataatggtgagggggaggaggcgtggtggggccagtctgactggaactgacctacttagacttaatatttgtgcgtgacctctcttctctttctccaggggagatggccattccattctttacgggccgcctcactgactggattctacaagatggctcagccgataccttcactcgaaacttaactctcatgtccattctcaccatagccaggtctgggggctgaaaatggggcaccctgcaaatgagggagttggaagttggggctgctgtccgaaatgcacttatatggggatacctgggaccttcagtctgttccctgaacacaccctgatcccctttttttccgggttctttatagtgcagtgctggagttcgtgggtgacgggatctataacaacaccatgggccacgtgcacagccacttgcagggagaggtgtttggggctgtcctgcgccaggagacggagtttttccaacagaaccagacaggtttctcctgaaactctttcattatacgccatgtactgttcatatcctcatacatctgctttgatctcccccctccccgctctctctctctcacacacacatacacacattgttccttctcattcttgatataccctctccctgtctctctctctctgtctctgtctctctctctctctctctcacacacacacacacacaattgtttttctcattcttgatatacctcaggagcaaaatattgtcctccttaccttaagaaaaacctagagttttcatctagcattttcttataaatctattcctatgtatccttagatagaaaccatagaatttcaaacctggaaattttgagctcatagagaccaactgcctcatctgacagagaaggaaactgaggccaagaccctaaatgctgaaactgcacagttacatatggctagagacacacttggggttagaaccctggtctcttgagtgctccacagacttcggcatgctttctagcagcactagaagctgtacagttacatatggctagagatagacctggggttagaaccctagtcccagtgagtgctccacagactttggcatgcttcctagcagcaccctcctcctccatctctgttatgtgaccagtttaagctcttcctgcctgtgtgtatagcatgggacatacaggttctctagggaacagaaagctttcaggaaaatggaaattcacatgtgcattaatgactttataattaaaatgaaggtcaggcctttcctctttaacactcatcttccctgcactgagatttgcagacctctggagaaccctaaccttgtttcctgcagcctccttagaaccccatgttgacacccctgaccctggcatcctggctcattgttagttcgtctcatcacttggaacctgtctgattcacctcactctcttctccccaaccctgcaggtaacatcatgtctcgggtaacagaggacacgtccaccctgagtgattctctgagtgagaatctgagcttatttctgtggtacctggtgcgaggcctatgtctcttggggatcatgctctggggatcagtgtccctcaccatggtcaccctgatcaccctgcctctgcttttccttctgcccaagaaggtgggaaaatggtaccaggtatgttcatggagttggcccgctctacacagaccctcatctcccagacttggcagactcagttcctctcacattgctttcagtccagctttcctggcacccttactgattctccatcttcatggaacaccctgtccctgtggtccatgttcccaggttgctcaacattaacctccatactctctgggtcttcttttctagcttctccccacaatctgtctttaagaatttgatccccaacccgttctgagtcattttcctcttcctcgtatttctttagcatccaaggggcatagctgtgtctctttctcttttctccttttcctctgtctcttctcacctttaatttccaaataggtaactcaggtattagtgtccctgatggtttgccaacccgtgtgacatctcttgtccatgtatccacagttgctggaagtgcaggtgcgggaatctctggcaaagtccagccaggtggccattgaggctctgtcggccatgcctacagttcgaagctttgccaacgaggagggcgaagcccagaagtttagggaaaagctgcaagaaataaagacactcaaccagaaggaggctgtggcctatgcagtcaactcctggaccactagtgtgagcacctgaagatgaatacccattcccttgtccttaagatgccgtgactccattcccattcctatgaccctgctcccactccttctttactgggaaatggttggttcagtattttcgtcctagcaacctgaggctcaatgactctactcagtgtccctagccccctccctctctttaaagatgctaggtggcttcctttcagtatggtacataaaatccacccaaccatgtggattggagagatgcgtgtcttccagtcctagggccttcctttgcctctcaggggaagtgcagggcgccataaattcttgcacctgggactgcttcatgctggtaccttgtagatttgttagtgagagtgatgggaatagtggaagccagggatgagggacatctgtgatgcactggaaagagagctacgccagtgatccgaagatcctggcttgatgatgcaatttacttgtcttgtgatcatgacaacaaatttaccttctctgagactgtttcctctttatttatttatttgtttgtttgtttgtttatttttacttattattattatttttgagctggagtctcgctttgtcgcccaggctggagtgcagtggcgcgatctgggctcactgcaagctccgcctcccgggttcacgccgttctcccgcctcagcctcctgagtagctgggactacaggcacccgccaccacgcccggctaattttttttttttttttgtatttttagtagagacgaggtttctccgtgttagccaggatggtctcaatctcctgaccttgtgatccgcccacttcggcctcccaaagtgctggaattgcaggcatgagccactgcgcccgactggttgtttcctcatttttcaaaaatggagtgatataaccttctttataaggctcttcatgtattagctgacatcacatgaatgaaagccttttgtgaagagtaaaatgctccccagacaaggtgatagtggtgatggtggtgaagataactgtgacttgcatgatgtgcattgagtcagactccatggggtctctggttcattctcctgtctgcctattgagcctgccgatgtcacttaggagacagggacttgatatttccttcaggttaatgactgtggttctttgtgtcccctccagatttctctacctcagtccctttttttgtggtctctttatagatttcaggtatgctgctgaaagtgggaatcctctacattggtgggcagctggtgaccagtggggctgtaagcagtgggaaccttgtcacatttgttctctaccagatgcagttcacccaggctgtggaggtgaggtccctccaccttcactccccagtgtgattccttcctctggcccagcaccatctgtgtgatgtccttccattctttacccttcttgcttcacataatgctggcaagcagactacctcactttcactattcttacctccctctaggtactgctctccatctaccccagagtacagaaggctgtgggctcctcagagaaaatatttgagtacctggaccgcacccctcgctgcccacccagtggtctgttgactcccttacacttggagggccttgtccagttccaagatgtctcctttgcctacccaaaccgcccagatgtcttagtgctacaggtacaacctaccactccctgtattccactggccccaactgcaattctgccatcctaaattttcttcctgccttcagcctgcttactgccaagcatatatcctccctaaccctttaaaggcaatggtaggcatcatctgttccataaatcttccccaaactcaagaacccagtttgggcttccaaagagaatgagagaagaggtttcgaagagagtgctctcacgttccaaggaattgctgcagcaaaatctgtgtcttcggtcttccatctttccttttcctttgtaatttggaatgtgatttttccctttcctggtggtatctgacatcaagtgtgtggcatagtggtgctgggtctctgcccttgtctttgccgcttcttctatctctactccttggggaggcatcacccagaaatctgtgcatgtgggagggtaggagtttctatatttccctgtttttcttctggggtaagacatcatgctatgtaacaaggcaatgacactctcaaggttagaggccttggtagcctcttatcgtgtgcttctctggcctctaggggctgacattcaccctacgccctggcgaggtgacggcgctggtgggacccaatgggtctgggaagagcacagtggctgccctgctgcagaatctgtaccagcccaccgggggacagctgctgttggatgggaagccccttccccaatatgagcaccgctacctgcacaggcaggtatggaagcaggtggcttgaaggagggcagggagcatcaaatacgaagagcattcttactgagcactctgaaagaggggttagggaatgataagagaccttgggtggagatggtggtgtagtcaggagggaggtagtatgattttgtgacatgttctcaataaagattttgagtcttcgatctctagataaccatactcccatgtgccttgttctatgactcttcatcatatttcatctcaggtggctgcagtgggacaagagccacaggtatttggaagaagtcttcaagaaaatattgcctatggcctgacccagaagccaactatggaggaaatcacagctgctgcagtaaagtctggggcccatagtttcatctctggactccctcagggctatgacacaggtactctctccactcatctcaccacccagccatctttacctttgctgaaaccccagtagtcttgcctttatccttcagttcctccttactcatggacatcaatttgaagttgtaagatcatgctcctatggcttcttcatcctgacatcctcaggattctgttcatcttcccagaatctcccctatccagctacaaccgtcagatcttggtgtgtgtgagtgcgtgaatgcatgagtgtgtctgtgtgcatgtacatgcgtgcacacatgtggctataccgttctcatcttggccctttgctctgcagaggtagacgaggctgggagccagctgtcagggggtcagcgacaggcagtggcgttggcccgagcattgatccggaaaccgtgtgtacttatcctggatgatgccaccagtgccctggatgcaaacagccagttacaggtgaggcagtcatcttcttaatggctatatcccacccaatcttgcttcttttatacatcttctgttagttttactaacatcataattatacaaaccagtccttgcagttctcagttcccaaatccagttccattggatgcctccccaaggagtagagatagaagacgaggcaaagacacctagaatcagttaaaagagactatctacaaactacagactgaatttctttctttctttccttttttttttttaagacagtgtctcactcagttgcccaggctggagcgcagtggcacaatcttggctcactgcagcttcaacctgctgggctcaagcgattctcccctcagcctcccgagtagctgggactacaggtgtacaccactatgcctggttgacttttatatttttagtagagatgggtttcaccatgttgcccaggctggccttgaattcctgagctcaggtaatctgcccccctcagcctcccaaagggctggggttataggtgtgagccactgcgcccagtcctatagactgaatttctaaagcgaaacataaggaaaagaccatcctcataatatcgtttatttaaaaaaattattttttgtacagacagcgtcccgctatgttgcccaggctggccttgaactcctgggcccaagtgatcctccctccttgacctcccaaagtgctaggattataggcatgagccaccgggcccagcccatcctaatcatattaatattaattaagctagtctgtttacatgcactgtcactcatttattcattaggaatccttctgagctaggcatttatcatcattctacagatgacaaaatggaggttaaaagaggttgaataagctgctcatatagaggtcatatagcttttgagtggcgcagccttgacccaaattcaggtctgcctgacttgaatgctcatctctttactactaagttatatttccttaaaatcgaatataaaaatgccaagtccatgggtagagaagaggactattcaatagtctttattcttctgtcacgtgtttcaccctagggttctcatttttatcctacttttgcacccttcatgtaaaacagtccttaatgaaacaaagggtttgcggagaagtactcagaatgggaaacgttggtgtccttggggttgttagcagagccagcagtgatcctgtgaggtcagtcccagccctggaaacacaggtgtctccctgggctgagggtagtccccggctctgacggtccgatgtctttcctcaggtggagcagctcctgtacgaaagccctgagcggtactcccgctcagtgcttctcatcacccagcacctcagcctggtggagcaggctgaccacatcctctttctggaaggaggcgctatccgggaggggggaacccaccagcagctcatggagaaaaaggggtgctactgggccatggtgcaggctcctgcagatgctccagaatgaaagccttctcagacctgcgcactccatctccctcccttttcttctctctgtggtggagaaccacagctgcagagtaggcagctgcctccaggatgagttacttgaaatttgccttgagtgtgttacctcctttccaagctcctcgtgataatgcagacttcctggagtacaaacacaggatttgtaattccttactgtaacggagtttagagccagggctgatgctttggtgtggccagcactctgaaactgagaaatgttcagaatgtacggaaagatgatcagctattttcaacataactgaaggcatatgctggcccataaacaccctgtaggttcttgatatttataataaaattggtgttttgtactgtggtttcttatgtttccggcacaccaaacggcccactgccttttgcagcgcacttttcagctgcggatgtctcctcttttatcatcctcaatgttttaccccctaactgcatcaccttttcccttaagctttttaattcctatgaggccccttccacttcccctatccccttaggcccacccccaagaatgtgcaagaccccagccacagggcccatcagggcactagcggccgcagctcagagccgtggcctctccgaagtggcagatggggcgggcgcggccagagcaagtgccaggcgggaacagagggactgggcgcgcctcacaactcaccacctcgcccgctggtccttcctggctcgcctggctctgaagctgcacctggaggggaaacctcagaacagtaggcgggattgcctagtaaatatctcccattcagggaggcccaggtcgtgtgacgtcgacagttgctgggtagatgaggccaacacaggttgcaagaagaggcggggtttagaggcgtgaaactccgcagtgctcagccaagcagggagcaacgctaggaagggcgggcagaaagggcacgctcttgtgggtgactacaggttaggagaccgttgaacctggaggggccctaggatggaccccgtggaaagattcagagactgcgccctctccctggcgccgccttcccctacacgcggcgggtatattctgttgcagttggcccaggacctgtttccaagactctgccccctcgcacttccgtccctcctggttttgtaaagtgatgctcataggaacccccaccccgcgtgacactactcccagctcctggctgacttctagtcttctggttgaagctgcgcctttagatgacacgaccctacccacccctgtttccagcggatgcccgggcctggaggtacctcttactgtaacccatcgccaagtgggcttttgaaggcgcctgttcctttctcgctttcttcggaagacccttgacccatcattcccccgacccccataacgggagagcagagaagccggtccccagtgtgatggtcctggtccaggcactaactgtccttttctcggaaaaggcagggggatgtggaaaagagtcttgttccctccccttcgatctgtggctttcgctttcacttcctcctccgagagcggacagatctctgggtgctgggcggtcatggcgctactagatgtatgcggagccccccgagggcagcggccggaatcggctctcccggttgcgggaagcgggcgtcgctcggacccaggacactacagtttctctatgcgatctccagagctcgctttaccccggggaatgcaggtcggggcagtagggaagcccctagggatgcagggaggcgggcgctgaggagtggagggtcgcctgagaggaggaggcgagagcgggagcgcggggtacagggtcgggggtagccttcagtcccggagagcgccagacccaaagaagaggccacatggggatggggcctgagaggaggaagtgcaagttaggacaaagagttacaggtgaggtgggggctcccaaaggaagacaagagaactttcctgcccttgtccacacacaaatggtggagcctttttcatggggttatcacatgatataggaggtgtgtggtgtcttgggaaacctatgaaatttgcctgctggcctcctctcagcaactcactgttgcgcgacttagaacaagtcacttagtctaggtcccaagcccctcttctgtaaagtgaggatactgttactaaacgtgttttgtgagggttgaatgctttatgcatggaagaaaccctttaagtcactctcaaaattttttagtaatggtaacatgtgcttgctttcatttctgttgtgctggaaaatggaaaaggttgatactggcatgcctcttcttttccttctcccaagccatttccttctagagattggttattaactgtttcatttattgatggttagatcatttctgcatatctcctcaccctcatactccctaaaaccttttcctggagcctcttactacagaatttttcattgcctttctcaacctcttttctcttatcagcccacagaattcttccagtccctgggtggggacggagaaaggaacgttcagattgagatggcccatggcaccaccacgctcgccttcaagttccagcatggagtgattgcagcagtggattctcgggcctcagctgggtcctacattagtgagtgtatacgctccagcaggcagaatctggggagctgggctctcctttccacaggaggccaactctgcaacaaagtggaagtggatattgatttaggacacactgggggatctatggggtcatcccttctctcccaaagctccatcttcttccaggtgccttacgggtgaacaaggtgattgagattaacccttacctgcttggcaccatgtctggctgtgcagcagactgtcagtactgggagcgcctgctggccaaggaatgcaggtaagcgaggcctctcatcttcctttcttagcctagtggttaatccctggatctctcagatcattgctccttactcttgtcctatgtggtccatcttagtgctaatagtatatttcacaaaacagctttttggtgataagacccttctcccaaatctcagcctgtgctccactcataagccagatagtacgtcaggtatttagcactgacacatccaccctggcgggacagtatcatttactaggctgcctttgtatgtttcagatactttaaattccaaatctttctctgatctttagatcctacaaaataattcctttccaatgcttatctctttaatcatttcctgccccatcaagttggaaagagctaacctctctttcctcactccaccttgtcctcacccaggctgtactatctgcgaaatggagaacgtatttcagtgtcggcagcctccaagctgctgtccaacatgatgtgccagtaccggggcatgggcctctctatgggcagtatgatctgtggctgggataagaaggtgggtgctctccattcttcatgttcccccaccatgttccctatggatgacagatctgtttcccatcatatactcctactccctccctgacaagatgcatggcatatagagtgcttggttatagaactgtttcagtatatccatggactatttattggcccagatatgaatcattgcatgtgttttgtaagcttgtcccttttgttaaacagttgatttcaagtttgtttttcctttttcatttctaaagttcgatgactttaccaaagtggtttcctaattccaatgttcttgtggtaatattaattcttttgttcactttttatgtctcatatttgaacccccatgttaccaacatcttcctctccaatttcagcctgaaatctttcatcttatagggtcctggactctactacgtggatgaacatgggactcggctctcaggaaatatgttctccacgggtagtgggaacacttatgcctacggggtcatggacagtggctatcggcctaatcttagccctgaagaggcctatgaccttggccgcagggctattgcttatgccactcacagagacagctattctggaggcgttgtcaatagtaagagaccaatgctcccaccaccatgcctgggaggagtcggcgggtggtggggggggtgatttaagattgagaaaccagcctggccaacatggcgaaaccccgtctctactaaaactacaaaaattagccggacgtggtgacgggtgcctgtagtcccagctacttgggaggctgaggcaggagaatcacttgaacctgggaggtggagcttgcagtgagccaagatggcgccactgcattccagtctgggccacagagtgagactccttctcaaaagaaaaaaaagaaaatgattgagagactcaaaggagggagagtagtagggaggaaattttcagagtcagaagaagggcattaaaggcccagtcatatggttttaagcttgcgcatgtgtcttgttgctgccttcaacataacatcagtgacaggaacttgctgaggtgaaaggtgactccatgttcttttctcatttgtccacagtgtaccacatgaaggaagatggttgggtgaaagtagaaagtacagatgtcagtgacctgctgcaccagtaccgggaagccaatcaataatggtggtggtggcagctgggcaggtctcctctgggaggtcttggccgactcagggacctaagccacgttaagtccaaggagaagaagaggcctagcctgagccaaagagagagtacgggctcagcagccagaggaggccggtgaagtgcatcttctgcgtgttctctatttgaacaagcatttcccccagggaagtttctgggtgccccactaagtagaataaagaaaaacggttataaatacctctgtcttgtggctgaatggggttgggcctgtggttgttgggtggggcagaaagtaaagagacgctttttctggagaaggggctcagacccctatctaagaaatgtggcctcaccacatagttcttcctggggtttccttccacactcatctctccaagacctcaggaaggctgctcattgctgtccatggacacttgtttgcaatttcacataggttagggtcctttccatagagaggcacctggggactcctgtgtgttccattgttaatggtttgaggaacagggagtagggcacctaggataactgtttttgactttatagagtaggatgaaaaagcttccacttcactttaatatggtaatcatataaacaccataccatttatcccaaataacactttggagatattggatattgaatataaagacagacattaagggtctaatttcatgatgtgtcatgctgaattgcaagatggcaggactataattttagaggaagaagagatcaggaggactcccctaagtgaggagtgtggggaaaatgtaaaagatccaggttagaagaaagagacacacatcatgagattttcggaatcatgctggaactatggaccatgtcactttccagaaaataaaggaaacaaatgcttgaaagtaggagcatgagcttgagcatggagcttttttcattagagagagattcttaaaatgccagaatgaatagagttgtaaaactttagcgagcccctacttaaaatccctcctccccaccaccactattttaaactttaagtgactccttggtagtcacacaggtaacatttcaaaatggtgatctggaatccaagcgacccttcctttggggaatttgtttgtttgtttgtttttagtttgggaggtggtttcaatctgaagagtcctttctggaataaacgaatctttctgttgcataggaaggctctgggtcaggaaggatatttaaaaacctaattactgttctaaacagtgttaaaatagaacaagaaccaaagctcagtacggggcatttccctcataggctgaaggtgcgcccaacataatttggagtacagactcagaggcacctgaacacgcgccagctcaaggtgctccggctgagaaggacggatgaagatgaacgctcagggcctactaaattcaaagtctgtacgtgaaaatcccctttggcctggtgagattggttggaaccttctatttaggagagcccggctcgctcgcctaaaactggagcttgcatggaagagggcacttttttttttttagacgaagtctcactcttgtcgcccaggctggagtgcaatgacccgatctcggctcactgaaacctctgcctcctgagttcaagcgattcccctgcctcagcctcccgagtagctgggattacaggcgtccgccaccacgccctggctaatttttgtatttttagtagagacagggtttcaccatgttggccaggctggtctcgaacccctgacctcaggcgatccgcccgcctcggcctcccaaagtgctgtgattacaggcgtgagccaccgcgccggaccagaaagaaggcacttcttaatagtaggctcagagcttgaagtagtaactttgagaaaattcagtgattctccaattacaaagcattctccaattacaaagcaaggacaacagataaagttgcccttgagacaactgtattttacttaatgataaagaaacatttttgcagttttatatcccagagtaaccgccactaaaggcgagtgagactcattgcaggcctgtacagtgcgaaccagagttcgggctccagttccgctgtctgcgggtctcgcgcgccccctcccggcggcccagcccagaatgaaggccttggctggggaagcgaaagcgaaagctgcccgagccctgacgcccgccctggccgagcgtagctggcggaccagagccggtagcgaggttgggagagacggagcggacctcagcgctgaagcagaagtccccggagctgcggtctccccgccgcggctggtgagttggtgcggaggggaacctggagcgccaacagggacgcagcccaagtgactacccactccacgctcctgcttcccagtccctctgcacccggcgataggagggagcggagcccggaccacttagctcgccgcggcaggcgggggtgggggtgggggtccggggattttttttttttttttttttaagcacgaggctcctgatggtcatgcttccagctccccagaaggccgaaagctgtctgtcgtaggaggggtgtacggatgagcaccggttactcaggagagctctcagggttgaataggataaaatgagaagccgatggacgggttaggcggagccgggcgggtaggagggcagggacaaggattgggactccacccccatgatttctcatctcgtatccgttgacagagccatgcggctccctgacctgagaccctggacctccctgctgctggtggacgcggctttactgtggctgcttcagggccctctggggactttgcttcctcaagggctgccaggactatggctggaggggaccctgcggctgggagggctgtgggggctgctaaagctaagagggctgctgggatttgtggggacactgctgctcccgctctgtctggccacccccctgactgtctccctgagagccctggtcgcgggggcctcacgtgctcccccagccagagtcgcttcagccccttggagctggctgctggtggggtacggggctgcggggctcagctggtcactgtgggctgttctgagccctcctggagcccaggagaaggagcaggaccaggtgaacaacaaagtcttgatgtggaggctgctgaagctctccaggccggacctgcctctcctcgttgccgccttcttcttccttgtccttgctgttttgggtgagtcaggagaggacgttgtgagttggaggtggtaaaagggcctgggcaccagcacattcttgtgttatttttcatgcctctttcaggtgagacattaatccctcactattctggtcgtgtgattgacatcctgggaggtgattttgacccccatgcctttgccagtgccatcttcttcatgtgcctcttctcctttggcaggtaggtggtgggcagctgggtccatttgctagccccaaatctttataggggtcttcacttccctaactccatttctaggccctttcaggcgcaaaacacaaaaatacttaaactaaaatatggtgaatgtagtcaccattctgtttcatctatccattcatttcttccttcgttcatattcatccaatatcttcaaagtttatctgatcttattataggaacaagttatgagtgaaggtagtacaaaaggaatttaagtctcagatggaatgtctctcagttgtctctcaacattcctaggtccatgaaattccatttctttctgcctcctacctcctacccctaagtctgtctccaaagtatctctccagggtcactctctcaggatgggtatgcttctccctctcactcttctttcccagctcatcttgctaatccctgaagatcttactctgaggcttatcacctttctttccagaatcattactcttttcccttcacttgctttcctttctctttctagacatactcaaacaaacaaactgtttgataaggctgggactgggatgaggtgagcgaggcacctggggtgcaaagtttaaggaggtgtgcactcaccttacccaaatcccagccggcctgattgtctctatttttatggtcatacttaatttagagtaccctcgaaaaccatttcattgtgccttcattccatcctggctgctttctgctgaaactacagtcgtgcactgcataacgatgtttaggtcaatgatgggccacatataagatggtggacccacaagattataataccatatttttactgtaccttttctatgtttagatacacaaatacttacttctgtgttacagtcgcccacagtgttaggtgcagtcatatgttgtacagatttgtagcctaggagcaataggctaaactacatggcctaggtgtgcagtaggctatgacatctaggtttgtgtaagtacactctatgatgttcatacaacgatgaaaccatctaacgacacatttctcagaacacatccctgtcattaaagtacaaaccctcattatatcatgtctgactattccaaacgcctcttcaatatggtaactaaatttgtattagaaacatatattttgtaaaatacatgcttttatgctttatattttttcctctaagtgttactgtagcatgtagttggtctaagagggattttccaactcgaaggatgacagatgggaatcacatgactctggggctccagagaattgtgggggcagggaatttattattgcagttcccatgatgaagtatctatgatgacagagaagggctttgggtatggggcaggaaggagaccaaggcggaggagacgcacagagggacaagcctgagggacgctgggacagaagcaagcactgggatacttgttttcacaatatcttttcccttctattgtagttttctattgtgtctagtacagagtgcactccataaatacttgtaaatttgtacatgttatgattttgttctcacatctagctcaccatgtctcctctttcttcttcctctgtgtattccttacctcttctctctctgtgtgtctgtctctcatttctttctcttttgcccctcctggcatgctttcccctgactttgcgcttctctgcactcctggcttgctcctctgtttcacccgctggcttgctccttctctgcatctccctcccctcttattctcctaccccacagctcactgtctgcaggctgccgaggaggctgcttcacctacaccatgtctcgaatcaacttgcggatccgggagcagcttttctcctccctgctgcgccaggacctcggtttcttccaggagactaagacaggtggggcctggagtccaggtctgagattcccatggacatcccttgcccctcagtgaccttccacccacagcctctcctcctgccttcacccgtatgccaggacctggggatgcttttctcttgtttgggacagggtggagaagcagcctccactgtccctctgcaagtgaaggaggatgttcagaggagggggctgtgtcagagggaacggtcaggagggagtttctgggggccctgcagtacacatggtttcctttttcctcacctgctctgtccttcttaggggagctgaactcacggctgagctcggataccaccctgatgagtaactggcttcctttaaatgccaatgtgctcttgcgaagcctggtgaaagtggtggggctgtatggcttcatgctcagcatatcgcctcgactcaccctcctttctctgctgcacatgcccttcacaatagcagcggagaaggtgtacaacacccgccatcaggtgagcgtgcatgtaagggaaccccaaagggagaataaaactgacaggtgaggaggcttccacatttgtggctagaggatcccctagagagagatgttctcttctcagccattaggggagaaggtatattgtagtatatactacattttgtttgtccagccatccaacaatggatatttgacttcagaagattcatgattctccagaactgtaaacaaaaatgtaaagtgtatgtgaaggtatgggggagggaataggaaggggagatgataggcgatgataacttttcattagcttctcaaaggagtctgtacatcccccgcccccactgcgaagattaaaaatggtttcttagaggcttttaggcagggagattttccctttaaaatcagcagaagaagtctggatgcagcatagggaaaggaggcgtcatcaggaagtcctaagtctgaatgtcagctccaccttctctttttctcttatattgtggtaaaacatacataacataaaatttaccatttcaaccatttgaagtgtacagttcagtgacatttaggaaacccacattgttattgggtagccatcatcaccatccatctccagaacttttttcatcttcctaaaatgaaactctgtacccactaaatagtaactgcctactacccccaacccctggccgctggcaacctccattgtaccttctgtctccatgaattgtgatgactcccggtgcggtacgtaagtggaaccatacagtatttgtctttttgtgactggcatattttacttagcgtaatgtcttcaggcctcatccatattgtagcatgtgttagaatttcctcccttttaaggctgaataatattctgttgtgtgcatatatcacattttgattatccattcatctgtcaatggacatttgcgttgtttccaccttttggctgttgtgaattatgctgctgtggacatgagtgtacacctgtttgaaaccctgcttttggttcttttgggtatatacttagaagtggagctgctggatcatatggcaattctatttaacaatttttgaggaaccatgtattagtccatttttacgctgctgataaagacatacccaagattgggcaatttacaaaagaaagaggtttattggacttacagttccatgtggctgggaagacctcaaatcatggcggaaggtgaaagacacatttcacatggcagcagacaagagaaaagacagcttgtgcaggggaattcccctttttaaaaccattatatctcgtgagacttattcaatatcacaagaacagcatgggaaagacttgccctcatgattcaattacctcctacccagtccctcccacaacacatgggaattcaagatcagatatgggtagggacacagccagatcgtatcaaaccaccatacagttttccatagcggcagcaccattttaaattcccaccagcagtgcataaggtttccaatttctccacatcctcatcaacaccactttctgttgtctttttttttaatagccattctaatggtgattaggtgattaggattatctcattgtggttttgatttgcatttccctaatgattagtaaatattgagcatcttttcgtgtgattttggccacttatgtttctttcttgaaagaatgtctgcaagttctttgcccattttctgatttttttttaagttgtgggagttcactatatgttttgcctattaatttcctatcagatatatgattcacaaatattttcttgtatttcatggttgctttttcactctgttgctagagttctttgatgcacaaacgttttaaattctgatgaagtctgatttatctattttttgttgcctgtgcgtttggtgttatatccaagaaatcactgccaaatctagtggcatgaggcttttcttctacattttcctaggagttttatagtgttagctcttatgtttaggcctctgatccatttggaattacatctccacctttcttaactatctgtggctccttgggaaaactacccttctttcctgattcagacactggggatgggaaaattacctcaaatgaaggttaaaaaaattgcatgtatctcctatactacctaacactgagagctcaataatattttgttcccttgctccttcactcttattccttctggaaagaagagtaaggaagagggagagaaacagtttggtatttttaggtagactagggagcatctcactggctggagtaagatgtgggggcctgctgtctttgcacatcagccctggtgtttgctggccctcttttccaggaagtgcttcgggagatccaggatgcagtggccagggcggggcaggtggtgcgggaagccgttggagggctgcagaccgttcgcagttttggggccgaggagcatgaagtctgtcgctataaagaggcccttgaacaatgtcggcagctgtattggcggagagacctggaacgcgccttgtacctgctcgtaaggagggtaagataccagagtggttgtgaaaggagcccaggaaagggggagggcaagggaagaggaaactacagctggttctagaggcctttgcagctcagtctcatagaggcagagagggggaaagaatgggaagattcccagcctcatctctttcttctcctcttccaggtgctgcacttgggggtgcagatgctgatgctgagctgtgggctgcagcagatgcaggatggggagctcacccagggcagcctgctttcctttatgatctaccaggagagcgtggggagctatgtgcaggtgagcgagaagccaagcctgctctccttttttccctctctttttctttgtggactcctgggccttgggctttatttgttctttttaacaatacaatacaaaaccaaaacccgcaagtaattttgctatggagaattttaaacatatgccaaaaatgagacaaaataatattacaaactcacatgtatacatcctgtgctttaacaatgatcaactcatgcccaatcttgttggatctgtatccccagccacttccccccacccatattattctgaagcaaatccaagatattgtatactttcatctgtaaatatttcagtatgtttcttaaaaatacaaacatctttaaaagtgtataacaacaaagccattatcacaccaaaaaattaacagtagttcttaaaatttatcaaatagtcaattgtcaaatttccacttgtggtatccatgtagtatatgtgtatgagtgtgtttattatactttgcttaaatcaggatccagaaatggtccacatattgtgactggttgatacatcttttaagtctgtctgtctatctatctatccatccatctatccatccatccacccatcaatccatgtatctgtctaaaagtttcccttgcacagtttatttgttgaagaaataggttgtttgtcctgtggagtttcttagggtctggattttgttgactgaatccctgtggtattatatgctcttctgcctctgtacttcctgtctattgatagataaacctagaagcttgtgagattgaggggttttttttggtctttttccagcaacagtactttttaggtggtgatgcattcttcctccaagaggcacacaatgtctggttctctatttgtggcaacatcagccactgatgagcagtacctacatccatgacagaattagggctgcaaaagggagatactctatcattcttcatgtattagctgaagtagtctatgaagggagacttcccctcatctaccatttcattacccggtggtacagtttgatgaggaaaggcagagtgagcatttagatctcttcctacatttaccagttctcaaaaacagctacttcatccagggctttatttaaacattttcctagacacttgataaacatcttttttgtgtagagaactgcgctgggcactctgacggctacaaaggtgagttgggcacagtgcctgcatttaaggagctccccgtctaatcaagcaagacagaactgggcacaagtaataggaagcagtaactgaaaagatctggggctagaggcaatgctgtatggtaggagaagggactgtatatcctttatattgcaaattggaacactggggtattggtgccacttttaaattccgtccaaattgtacatttaaaagtggagaatctcttttgagtatggaggaggagcagtgcagttgtgagtggagtgtgtgaggagttgggagggtggtttctggtagaagtgtgtttaattagccggctctcccattcctgttttccagaccctggtatacatatatggggatatgctcagcaacgtgggagctgcagagaaggttttctcctacatggaccgacagccaaatctgccttcacctggcacgcttgcccccaccactctgcagggggttgtgaaattccaagacgtctcctttgcatatcccaatcgccctgacaggcctgtgctcaaggtgcctgaaagagggaggaaacctggacccttgctctctgctgctaatgcataattggacatcacagcctatagttcatttgcctctgagaacctggtcttgcctctgctaagaagagaaatggagggattttgagggagaaggggcaggcccttaactctttttctggttttctaggggctgacgtttaccctacgtcctggtgaggtgacggcgctggtgggacccaatgggtctgggaagagcacagtggctgccctgctgcagaatctgtaccagcccacagggggacaggtgctgctggatgaaaagcccatctcacagtatgaacactgctacctgcacagccaggtgggtgaggagggagaagacaggggacaggagaggggagcatgtacagagagaggatgggagatccacgggaaggcgcaccaggtgttcattctgagggaggtaggtggggaggacaaaagggcccctgccttgggggtttacacatagtcctctgcccctgtccctgctgcacaggtggtttcagttgggcaggagcctgtgctgttctccggttctgtgaggaacaacattgcttatgggctgcagagctgcgaagatgataaggtgatggcggctgcccaggctgcccacgcagatgacttcatccaggaaatggagcatggaatatacacaggtatcttctacaaattgtaagcttgctccttcagtaaaaaagagaaaatcagacttactcttagtggtgaaggtcgtgtccctgtagcttgatgtttgctgttcctctgccctttcctccattcctacgtctccttccccacacactgaattcttcagcctccctcttgatcaagagtctttgtttgcagagagcaatgcagcagtggtgctccctccatgggcagccccgtcaggtccccaccccatggccctcctcccactgggccctccccgcactgggccctcccacctcccgaggtcctactggaagtacctgctgtgcacttgtccctccttgtgtgttgtctgtgtcacttgtatctgaggaagggaatttctctgatttcctcagatgtaggggagaagggaagccagctggctgcgggacagaaacaacgtctggccattgcccgggcccttgtacgagacccgcgggtcctcatcctggatgaggctactagtgccctagatgtgcagtgcgagcaggccgtgagtaccgtgagagggcaggggacagtggggcctgggaggggcatgctgggaggatcagactgtgcagaattgggcagagggaggacgaaggacctactagtggaaacagtctgtgccttcttggggttggggaatggaatccggtggtgtgagggcagccccagttccctcctgggcttccattcctccagctgtggcagtacagccgggagagaagggcagtccaggcctttatctactgccctttcctaccttcttttatttcacaccttctttaccctaaatcataagagatggtgcccaggtggatgtggtgtccatctcattcctgtctttctgaggcactgtgatcaccccttcagctgcaggactggaattcccgtggggatcgcacagtgctggtgattgctcacaggctgcagacagttcagcgcgcccaccagatcctggtgctccaggagggcaagctgcagaagcttgcccagctctaggagggacaggacctctattcccgcctggtgcagcagcggctgatggactgaggccccagggatactgggccctcttctcaggggcgtctccaggacccagagctgttcctgctttgagtttccctagagctgtgcggccagatagctgttcctgagttgcaggcacgatggagatttggacactgtgtgcttttggtggggtagagaggtggggtggggtggggtgggggctgtctgtgtccaggaaacttaattccctggtgactagagctttgcctggtgatgaggagtattttgtggcataatacatatattttaaaatattttccttcttacatgaactgtatacattcatatagaaaatttagacaatataaaaaagtacaaagaagaaaagtaaaagtacccattgtttcacttcctggagataaccatagttgctattttgctgcctgtcccatcagtcgtttatctgttgtttgagatagaaattaaccaaaaatgacataaatattcatgagattgccttcctatatccttccttgttcctaccagtgtctgctattttgaagaagctagggtctggagggacagagaacagttccctgattaacagtattaatagcgacattggtaacagctaccatttatagagttttaatgggagtaggagctatgctaagtgtttttcatgtattatcgtttttaatcattatccccaaccctatgaggttggttattatccccattttacagatgaggaaactgaagctcaaagaggctcaatgactttcccaaggtggtcgtagtggtggagttggagtttgaacacaggcctgaccctagagtccacaccctgacccaatcaattatattgcatcttgggtccataaaccctaatccataatcccatcaagaaaagctctgctgctcttagctctaaataattcagaatctattctcttctctccagtcccgttgttatagtcttcactcatagacttaagatgatcccatcaccagagaggtttctctaccattagcttccctcttccggccattcttcacaaagtcatttttctaaattctgtgtcacatacgatgatggcatttctggaaattccttcaggtgctctcaagccctgctgcagagatccttttcagagcacacactgttccagcccatctgtctcaccctctcctgttgtatccagctccacgacaaactttctgccttccccaacacctttgtgcctttgcatatggtgttttcttgcccattttctgctcgactcgcccctgattttcaagttcaagacttaactcagggttcaggtcttccaggaggccttacttatgtcgtcagtctggggaactctccatgtgcttctatcactgtgcggttacctctttcacagcccttttaaagttctatcttccctttcccaccttttttgaccttccactagaccatgagcacctgggcggaaagccatatatcttattaagctttatatctgctacctggccgagggctaattcatagtggagaataaatagtcaattgaataaatgaataaatatctccaccatcgtactaatcttaatcctccctgcccactcccaccactgaaaatgcaacattgtacacatcactggttgttgggagggacttaccttggaaagttgctattctaggaaagagaaaccttcatattcctggaaacagcaggtagtttccagtgctggcaatgaattccccagaactgctgttttggattttttcttgcctggcagctgttgggagcagggtgcagtgaggatggagtgagagtgggcagtttcttgtgcagatttgcctttctttcatcctggggctgacttgcagctccacacccatccatctctcaaatttcacagagggtaaaataggcatttggagagaaagaactctggcctgattcctttctctcccacaaatgtcctttattcataaaacaggaataataattcctgtatctcccaactacatggaagctgcagccctcacagaagaagatgatctgagaaattctttgatttcctcagtacagttatacccatgcatcataatactttaagcctggaaggcatcttaaaaataatgcaacagtcaaacctaattttacagagaaactgacatgaaatcacgcagctaatcatgataaagctgggtggaaaacttatcttgatgggcagtacaggaagatgcagtagaccttaagatgtcctgaaagtttcttatctcaggggaaactcccaggtaggctttatgtcagggacacagaaaaatgctccctgaaagtcaaaatattcgggctagacagacaaattcctgtaagtgtggtttgtctgggaaccacagatgtcactaatcctggtttgctccagagttctttttgttcactcctaccccccatcaccatttgattgatctccttaccctgtaatttccccttcttgtcgcttacctgcagtatctttcccacccaggcatgccttattctttctaaaggaaagtatgaatggagaggggaaagcttgggaaactgatagatttccttggatgccaaaacacctccatagcctgtctgcccggccctatgtggaaacagcattgagtttcaagtcctttatgcctccacccagggatagccacttggaatccacatggcaattgtgaaacaagcaggaaatgcgtaattgtcagaattttgtggggaaaggactagggaataaggaaaacaaagatcttccttgtgttttagagctgtcagctagaggagcacctgcttgagtctgatgccatctaatggtcccagaagaaactgggttttgaacctagagttccatggactcttaggaattagactcctactactactaagcattcactggtgcttactatgtgctattgctgtgccaagtatctgaaacctgtcttcttaccttatttttcaagataattctatgtggcaggtattactatctcaattctaagagtgagaaaatggagttttagaaacatttactaacttgcctgggtcacatagctaaggaagaggtggacttgcccagctttgcataaaactcctcaaaagagttgcctatactccctgactccacttatcttcctactatcctctttttaaaatatattatttatttatttaaataagcaatatatgaatgtggtttgaaattcaaaagacacaaagaagtatacagaggaaagcctcactctcaatccttctcaaggtttgctaattcctcttgcataggcaatccgttcttccagctttgtgtttatctttccagagaagtttactgtgtattaagcaaatatgtatatctttattcttgctcagtattttcgcaaacagcagctgtctaagttcactgttctgaactttattttttaaattaaaaatatatggctatgtagtattctattttatggaagttccatatttcatttatcctgtttccttctactgatggctagttaggttattggaagtcttttgctgttgctagttagtcttgtatagacattgtaatgcacatgtgcaaaaatacaagtatgatacaatcttaaaggggagttgctgagtccaatatatacattacaaatattgatagatattgcaaaattgccttcatagaggctgtattaatttatagttccagcagcaacatatgagtttatctgtttctccatatatatatatatgtatataaccaacagacagtgttaatttttaaaattttgacaatcttctgggtgaaagtagcattgtattgtagttatcatttgctttttaatattatcatgtaagtaacagagatactaaacccagaaggataagggagcaaagatgagaaaaataaacacacacacaaacaacaataacaaatctgtctaaaatattggaaaatcagaatgagaaatgaaatatgactgtaacgataaaaatcagtaataaaaatgactattaaatttaaaaataaggcagagcaaccacaagtgacatgagaatgaggcagacaaagttaaagcacctaaagtctttgtcttgtttgaaaggagggtagagatattgattaccttcagatgctgccacatttggtaaacatgttaaaaatataagactgacttttaactaatataattagaatttaaaattcctaaatcagtaaggggaaattaaataatactttaaataaaaatgtaattgatttaatataagtgatgcaaggaaaacaaaagaagcaaagtaagacatagcaaatacagagcaccatatattgtaacagaaacgaatgtaaatagcacagtgatcacaagtataaatagcttaaatatgggagttaaaggaaagttctcagattagattaacaatatcgcaaaatccagttatatgcccttcataagatcacaagaaacctaaaaacatgaaaatgttaaatcaaaaccagatataagatacacaaagcaaacactaacagaagacagaaagacagcttatgtaattacagaaatatctaaacatatagtctaaaaccaaaggcattagtaaaaacaaagacagccattacatagtgataatgaagtcaccagaacattatactaaaactgaatcagtttgcacctagcaataaaactacaaaatatgtaagaaatataggagaattataggaagaaattaattgagaaattgaaacacatttctcaatgattatagaataagtggaaaaatgaataaggatatcaaataagcctgttgatgttcttgtctgtaacatctaggaatcaaaatatattctttaaaactaataaatcaagtgctcgtatttacacatttaagactacaaaggtagacacacacacagaaagaggaagggagaggatatgagctagttttgtgattgttcattatttaaaactaataggaattatctaaaggaagagggaactaagtgtattatatacaaataaacttatcaaagcaaccttgaaatatacaccttccttaatatctgaaaaggtaaaatttttaaaatgcacaataaagacatagtgaaagatttttaaaaatactcatgtaaacattatacttaacagaagttaatatctctgaattagactgaatctatttgctgtatgaataattataaatgggcttcttaactgaactaaataaatgaaaatatttttaaattagattaagataaaaactctattatttgcaatatgcaaaagacacctaacataaagccactcagaaagatgtattcattattttcaacaaataagatgatgggcaaagacataacaagagaaggcaaacaaaagggaagcagaggtcacattcgtcttaccaaacaagatgaaattcagacactcctcaccaaaaaaaaaaaaaaaaaaaaaaaattgagtgtgacagaggcacttataatgtaaagtataaaattcatatgaatatatgagacatgtgtttaagttctaaataccaaataggtagctcttataaagcagaaattaaggtagatacaaggaaaatattcagaaatgtactaccaatagaacactttaattccctttccctggactagaccagttaagtggacaaaaaaataggctgggcctggtgattcatgcctgtaatctcagcactttggtaggccaaggcgggtggatcacctgaggtcaggatttcgagggcagcctggccaacatggtgaaaccctgtctctaccaaaaatacaaaaattagctgggtgtggtggtgggcgcctgtaatcccagctacttgggaggccgaggcaggagaattgcttgaatctgggaggcaaaggttgtagcgagccaagatcgcaccactgcactccagcctgggcggcacagtgagactctgcctcaaaaaaaaaaaaaaaaaaaagtatgaacacagaagatagaagatattactatcaataaaaaaatagatatgctacatctatatcaaacttttaaaattgaaaatagaggccgggtgcagtggctcacacctataatcccagcactttgggaggcctaagcagtcggattgcttgaactcaggagctcaagaccagtgtgggcaacagcgaaaacccgtctctacaaaaaatacaaaaattagccagatgtggtggctcgtgcctgtggtttcaactacttggctgaggtgggaggatcgcttgggcccagttcaaggctgcagtgagctatgattgtgccactgcactccagcctgggcaacagagtgaggccttgtctctaaaacaaacaaacaaacaaacaaaaattaaatggctcaatggcatagaagaaaatttttttatgaagcaagtataatattgatgttaaactatgacaatgcacaaatataaaaattgtagatgaatttacttattatactgacacaaaaatcctaaataaaacattgcaaacagattctagcacagattaaaaaacacccattaagatcaaggggttttttttgttttttttttctagaaaaccctttggaagttcatgatattttgaatttcagtggatatttcctgggaataatgagttcaaatgaacgaatatgtggaacaaagcatcaccaacatttattttttcaggatgaggtgatggacaaaaccatcacagggaaattgaggcaaatagtacatgtaaaacaatacttcgggtgagtccacctatcccaaagtcgtatcaaagaagtggctgcagattggagcccaaagcctttggttcctcagtttccaaatggattctcactaggtgggatcatgagtttgctttggacaccccaaattctaactatttcttttgtttcttacatcctttccctcttccccagccccttcccctcatgttacacctcttgctggtttgagacgtcaatcaccactgagaaagaattaaaccagtattttgagctggcaaaattcttagcctagtacaattccttcaattaaactgtagctcaacaatgtgttctctaaaagtatgatttaatattctacctagaaactcagaatatttttcataactcctccagggcagtgtggattatgttgatgtgttaggaggaagtagaaggaagaaaatgaattgagatgtacgttttacttccatgtcaaagtcaccaaaatagcagttgaagggatatttgtgtcaggcaatagggagaataataattttatgccaccctcaaaaaacaaccacacatacacccaaattctctcactcctcagagaaaggggaaggaaagaaaagagagaagcaaaatatgagcttgagtgaaaaatcacagaggagcctgtagctatttagggagggctgctggctgaagtcaggcaggaaaaaaagatcaaaacaccctgccctatttttcaggctcgttcaagtagaagacaaaaacataaatacaggagaaaggaagaaaaccacatctttttcctcttgtctccccagaactgaacagtgtctctgataagcccaggcccttctatcgtagacactgacactatgcacagaaaatgactcaaaaacgcttctaatgggggtgaatctgatgcttcagtttatttaagatgtaccagaggccatctaaggagatccatagcttgctaactgaagcttattgctttctcttcttagttcccatgccaggctctatgccattccttgcttgtcatgtgagatcactgatttcctttggttaggtaggatatgatttccttacagagatctgtcctgacaccaaacagctatgatgaaattccttggttattttccctttttgtgtaccttatcattaccggaatgctaaagctgtaggaataaagtttccctggcttcccaagaaatacagtgtgacagaaaaagtatagcctagggacttactagttatgtgaactttggttcattccatccttacctcatctgtaaaagggagatcatgatagtatctactgcaaagggttttgtgtgatgattctctctctttctctctctctcatacacacacacgcacacatttatataatgcttagaaaatgaactcataataagcaattgacaaacattagctattattatgtaggcaagtcagattttagagtttgtgagccttagacacatttacagagaagaaagagcagccctcctaactttctggtccagcgccatatcctccacttcctccccatccccacatcccttgccatttatcaaccccctctctcctctaaatctaaatacaggcccccgtttgatccatattgtctaggcccttcctctcctctccacatggcccttccttcagctctgagggaagctgcagaagccagccatggtgctgtctacaaagaaggggacacacgcctcttccacccgctcatgctgttactgcatctgatcatctccgtgccgtgtccttgttcacttagcctgtgttgagtgtttgtctccatttccaaatgcaataaaacatctgggaaagactaaggtaggtgtgggcaggaagaagggaggaagttagacccagtggcttgagtgccctctgatgcctccttatcctcggctccacacaagccctcgccagtgtgagctccacagccatccacctggaggaggagtactcaaaaccagggtcaaatgccttgtactcgggggtctaccagtaagcctgtggccagccttccacttcatgaatcgtcacatttacatgagagatgtggagggagaggggtcagcctcctagctcctgtcctgtagcagttaagtcaagtcaggccaggctgtggtaaccaagccagtaccttctttaaagaacagttgtttctcattcatacagagtgtgttgtaggtgtgagtgattccctggggcagctgctcttcatggtgactcagctaattagactgcttttctactgggattgtgccatctcaacacaaggctgtcttggttgacttggtaggggaggaggagaagagtcatgcacgaggagttaaattctttgaccaggaaccttttgttcactttccattggtgagaacgagtcacacagctccaggagagtaggaagtctagtttctcgttttccatgggcctaggaattagaggatgaacactagcgatgtcttccacgtcttgctctctttttctttacctgttataatctcccatggagaagaaattatttttctgattggtctgatccaggcctctaaccaagggcatttactaagggtcatagaacagtaaaaggttgcacaattgcatctcacctctcttttctgaatcctgcttaattaaaactttaaaaactcacttacagaccacttcttgctcttcttagttatcaaatatattttcttccaactcctttttgacagatcttgccttgttctcagctgactcccttgcaaccatctaaatggaacttcctcattcccctttatcccctgctaatcgtcctgtctttattcttttatctgaagaagtgtacccttcttcccccaagccttatgctctctgtcttagtccatttgtgttagtgtaacaagatacacgagatagggtaatttatgaagaacagaaatttatttctcacagttctggaagctagaagttcaaggtcatggccctggaagatttgatgccttggccatcgacttgaaaaaagtcactgaagtgaacttgtggttaccatgataccctgggttcattcttaacatgcacagtataggcaaatcaggggcacatttcatgctgaaagatgatgtgaaatgatgagtaaacattgccctttaaataataataacatagatggtgaattacaatttgcacttttggttttatttgcttaaagatagtgttttactgtctaggttttactgaaagaatacttaactaaacacttgagtcaaatcattccagtgtaacagtcctcacaaggaggaaggcagaagggcaaaagtgccaagctattgcctccagcccttctatttttattgattgactgattgattgattgagacagggcctcgttctgttacccatgctggagtacagtggtgcattcatggttcactgcaactttgaacttctgggctcaagtagtcttcccacctcagcctccaaagtaactaagaccacaggtgcatgccaccatgtttatttctttaattttttaaattttatttggacatgggggtctcactatgttttccaggcaggtctctaactcctagcctcaagcaatcttcctcctcagcctcccaaagtgctgggattacaggcatgagccatcatccctgctctctctagccctttttaaagtctctaatcccattcaggaggcctctgcattcatgacttaatcacctcctaaagggcccaccttttgatactatcacattggtgattaaattgcaacacttgaattttgagtgacattcagaccacagcattttggagaaaatgtcccctttcttctcttttttctcttcagtttctcctttctacagataccttgcacttcacttgcaaccttgttgaagtctctcctgtcttaaaagtttcttttcccaaaacaccagaactcattccttctgtctaactgtaactttgtacttgttaccaacctctacccatttctacccctgactccccagcctctggtaactcctaacgtactctttacttcgatgaggtcaacttttttagattccacatatgagtgaaatcacgtaatatagtccttctgttcttggcttatttcacttaacatagagccctccaggttcacccatgttgttgaaaatgacaggatttcatgcttttttatggcggaatagtattccatcatgtatatatatcacatactaattaccctgatttgatcaatacacaatgtataggtgtgttggaacatcatgctgtaccccataaatatgtacaattattacgtgtcaatttaaaaaacccaagaaaagtattttttcttagtgttgtttttttctaaagtgtatcccattttttcctttgttttcactttcaaaattcttgaaagactattttaatctgcggcctttgttttcttgtttccaattcattcttttgaaatatggcttctacctttaacactctgctgtcctcttgaaggttattggtgccctactaaccataaaacacaataatgctctcttagattgtatcctggtgagcctttttgcaaaattttattctttgagaattctctttccatgttttcttttcttttctttttttgtggtcattttggcttataggaaatcgtactctccaaatgttctctatgtcttctatttcttctctgataatccctttactaaatcttcttgaggcatatgcttcagaatgcttaatttacatactcttaattccttcttaatttacacactgcctgtcggcaatgtcaacacccaataagaagggagacctattggtcagaacaggccagggaatagaagaatacataataaacagtctgcctagttcttctagggccccataatatgtcaaacatatatttttacttcttctcccagcccatttttagtatacctaaattactgtcagtgattctgcaggcaaacaatggttgagttgtatgacacaactttgtgaaagtatcctacccagtacctgatgatgcaaaactcttctatcttgattggttgtcaatctgaggagtttccaatcctggggaagccagaaaaacagcgatttatactcttaatgggtactttctgactgaattttatgagctcattctgaagaggctgacgattttactatctcatttttttcctttctccagaatgggttctgggtgggtcccctgggtggtggctctgctagtgaatctgacccgactggattcctccatgactcaaggcacagactctccaggtaagaacagagcaattgtttttttccagtgtgtatgcaagaattggcatgggggagtgatgcctttctttgtaagtccaggccacagaccagactggaagtggcttttggtttcaaagaacagtgttcttccctttggcagaaaggtacgccttgcctctttacatgggatggacttcatataccagagccacctattcaaggggtagggaggcaggaagagggaaacattgtgtcttgtttaggatccttattgtgtgtatcaacctcagtcagtgcctgggcgtgttgaaggccttggcttgggttcgagcctgctgggagaaacaacctgcagtaggctgggtcacagaggcaatctgtgattttttggtcaggacacggaaacaaatctcagttggggtatatgtggacaaatgaaactggaaacaaaggttgctccttctgtcatttattaagccactattatattgtcagaattgtactaaacagttttgagaagtaagagaagttgaatagaatacattgtccttgtcctccgcccaccaggtacaagttacttgtcactgttatttttctagcacaggtgacagaatatgcagccatgaagcaatgtgagatgaaagcacatattaatgagcagaaacaggatgtaatgtgctaagaacagaatcccctttgcatgttagtttcattaaatacaaaagaggaacaaacctggccaggagagatcattattctcagagaatagaaaccgccctgagtttataatgtccattaaacaatacaactgaaaaaaaaatcagcacagatgttaaatgatgatgaaaaattcagatttcccccctagtttagactactagaggaaatagagaagagtatacatgctgagaaattacaggctggaacttcatctgaaattagctactgagtgagggataagtggggttcacctaggaaggtcattcttatggctcagttcagagttggaggaggctaaaggaaaggtaaattacaacccaacattaatagcaattatctttcaagtcttgacttagatgcaatgtcttcaggacgtccttcctgacttacctacattattaactccatttgaatttcctttttattgtagttgttgttcttaagtgcataggattggtttaattttacccaatgagttcacagcacattgtaattattggcagtagtgcaagactctctcgtctcttctcttgcctccgttctcattctctcccctccctagagaatccattctaaacgtgtctggtaagtctctaagtatgagagtggcttttagaaatatgtagcattattgctctttatgtgtttttaaaatttaataaatgtcattctctgttgaatcccattctgtttcttttctcacttgacactgtgctttttgagcatactgaggtcaaaggcctcctcttagatccatgtggtctgacgtaatttaccaggcatgggttttcccagaggagggggctggttcatggttttggttttggttttccagaagattttgtgattcaggcaaaggctgactgttacttcaccaacgggacagaaaaggtgcagtttgtggtcagattcatctttaacttggaggagtatgtacgtttcgacagtgatgtggggatgtttgtggcattgaccaagctggggcagccagatgctgagcagtggaacagccggctggatctcttggagaggagcagacaggccgtggatggggtctgtagacacaactacaggctgggcgcacccttcactgtggggagaaaaggtgagctggaagctgaggtctggcggggctcaggaatgtcccccatgtgaacctggccatggctcttctttcttacaagcaattttctgctttaggataaatggttgtctgtgtagatgttctggccccagctgtgatatattatcctcacaagtcagccactgtgatcttggtctcagacccccaaggttctcagggacttcgagggctattgtgccctcaaagagaagcagtaattgtgggagtacctcagaaagtctaaatcctcctgacaggcattgacataccctgttactgatcttgggggctgagacttgcctatactttgtgttcacttgggtgatctgggaaagagattagacatagtgatagtccctaaagaatctcctgtcccagcttggtggttttctttcacggtgtctcatttttcctcccttcctagtgcaaccagaggtgacagtgtacccagagaggaccccactcctgcaccagcataatctgctgcactgctctgtgacaggcttctatccaggggatatcaagatcaagtggttcctgaatgggcaggaggagagagctggggtcatgtccactggccctatcaggaatggagactggacctttcagactgtggtgatgctagaaatgactcctgaacttggacatgtctacacctgccttgtcgatcactccagcctgctgagccctgtttctgtggagtggagtgagaattagtttctagtactctctgggcctgactcaggactatactgactcaatacagagcctgtgtcacttctgcgtttatcttggtcacaacatgaattattctttcccttgatctgggacagtcacagaaaccagagtccttgggttagggtgggagaaaacatggcagatatctatcctcatatcttccaagaaatgaggagatctaatcacctcattatgtgcttccaaccctatgaactggtgtcctctaattctttggtcttagtatttaggaggcattcttatgggctgtgagaatctgtaaccgatggggggtaactccatgggtgccaactttggtttcgaagaaccttttctaaatttatttatttttctctagctagcattggatttggtgtctagtacagattctgggattccaagaaagtgctttaaatattgggatatttttactaatttaaagacctgtttcccataggagctcagtctgaatattcttggagaaagatgctgagtggcattgcagccttcctacttgggctaatcttccttctggtgggaatcatcatccagctaagggctcagaaaggtaatgagcctgtgaggagtgccctgccacctgtcccagaccttccccactcccaccttccctaacgtcaatgatctgaggcaaggaaagctgattgtgcctctcagggatcaccgggataatttttttctgaagctagaaatgggataagcagagagagtgctgaccttgccagccatttgttcttccctcgggataatcatattgggtcctaattggggcaatccattcttttctcgatttctttccaggatatgtgaggacgcagatgtctggtaatgaggtaatgtctctttttccttgtctttgagtggcagatcattctcccggttctttggccagagggagatgacatgggggtagggaggagtaaggttgctgctgtctggatgggactgtcccctgagtctctggaacggctgtggggggtggtgaggctgcctcctgagaccttcatcactgtgcctccaggtctcaagagctgttctgctccctcagtcatgctaaggtcctcactgaagcttctctctctggagcctgaagtagtgatgagtagtctgggccctgggtgaggtaaaggacattcatgaggtcaatgttctgggaataactctcttccctgatccttggaggagcccgaactgattctggagctctgtgttctgagatcatgcatctcccacccatctgcccttctcccttctacgtgtacatcattaatccccattgccaagggcattgtccagaaactcccctgagaccttactccttccagccccaaatcatttacttttctgtggtccagccctactcctataagtcatgatctccaaagctttctgtcttccaactgcagtctccacagtcttcagaagacaaatgctcaggtagtcactgtttccttttcactgtttttaaaaaccttttattgtcaaataaaatggagatacaaaaaatgtacattttagtgaattatttaagaaaaacccctgtaatcaagtcaaggaacaggactttgccagctccagcggaagtctctgtacgtcaggccaatcaaagcctctccttcccctcgaaagtgaccatatcctgattttattgtaacctctttcatgtctttgtagtctagtcccccaggtatgtgttcctggacgccacagcttagttgtcttttacgtctctcatacttcactggtttctcccccttcagcctttttttcccccttatgattaatctgttgaaaagctcaatccatttgacctgtagagtttcccacactctggattttgctggctgcgtacacatggtgcagtgtaacacatcctctgccttctgtgcctcccgcaaattggcatctggatgcagaggctggatcagactctggttcaatcttttcctttggaaaatctatacgtggtgttgtggcctttcaccatgagagacataatttccagctgtttctttttgtgatgttagcaaccattgatactaattgcttaggtctgttaatttattggggattgctaaatggtggtattctgtcattttttcttcatttatatgctttattaatgctacaaagagacagttcccttcatttactagtgaagagacacttccctccacttactagtgggctacttagtggtacagtggaaaggcaggatcagtgtttgactctccttttatttaccagttttcaagttagcaaattggtttcctactattaataaaacctacagatggccaatcaggttttacttttcattctttaaataattataaacagaaggatttaaatgtttgataggttttactctattgcaatttttatgcttgttaaagcttatatcctacatttttggtgagtgaaaacttcttcaagtggctaaaaatgaaactgagttcttttgacgcaaatttcttttgataatttctttgttatctgggatgacaacatgtttctggttcatcttgttcatttcttggccagacctggaggtagccatttttccagaaatccctggtttagtttagtgggaaatgacatttaagactataatccagcgttagggtgttttgtcccactgaacccgctgctggagtcacctcaaaagtggcgtcaagggagttaccacaaggaagttcctgaaaccattctgagatggtgtgggttaggattcaaagaaagaagcactaaatgccagggtgatcagtccaaaacatttgtttagggaatttacctacagagggcttcaggagtccttgcagacagcaagagaaaagggatgttctgcctaggtatgtctgcagcgagggggtcagggtatggagcttatatgaaggtttaaggaacctggctcagggctgggacaaagtttcagtgtttagagaaacaacctagatacgtttatcagtgcctgggagtgttcaaggccttggcttgggttcgagcctgctgggaaaaacctgcagctggctgggtcacagaggcattctgtgatttttcggtcaggacatggaaagaaagcagggagaggggcagtgggggagcctaaatagataggaatggtcattgtgtccagcctgttcaatggcaataaaacatttatacatgtatacatttaaaaaaatcagtcatccaggcacggtggctcacgcctgtaatcccagcactttgagaggccgaggcgggcgaatcacgaggtcaagagattgagaccatcctgggcaacacggtgaaaccccgtctctactaaaaatacaaaaattagctgggtgtggtggcacgcgcctgtagtcccagctactcgggaggctgaggcaagagaagcgcttgaacctgggaggtggaggttacagtgagccaagattgtaccactgcactgcggcctggtgacagagcaatactccatcttaaaaaaaaatcagtcttctctatattacttctgcatctcctttcttttataccaagaactctggttttcaaggacacagggacagacacaattagaatgtccatacttatttgcttttcctgagttaacatagacagcagtctaaggataataacactcatacacaaccaccaaaatggctactgaaaacggttgaaattctttttacctacattctccctattacctgtgttctccctttttacctatgttctcccccgctttctagttgaactatgtctatattagttgatcctgtaccattgcatagactacttgctcccttgttagtcttagttctgtgagtagagatatgtttaatgctcaccatcattccttatgttgatatccctgtcatgtggtggttttcaaggtgtggtccatggattcctgggggtccctgggacccttcaaggggcctatgaagtcaagctatttttgtactaatactaagatgttatttgcctttttcactgtattatttacatattggtacagaaatctatggtggtcacgtgaaactgttagtgcctgagcacaaatcaaggtggtgacacaagctgtacaggtaggtcatgttcttcactcgccataagcttacagtaaaaaaaaaaaaaaaaaaaagcaaaagccagtgaccttgatgaagcaataaaatcattagtttactaaattttaaacctcaagcacacatctgtttaatagtcagtgtaagaacataggcagcatttctggtgcatactgatggaaaggcagttgtcctgtggaaaagccattatgtaattgcatgagttgtgagtgaagttaaacattttttttttagtgggtcatcattttccttgaaagaatgactgaaaggcacactgtgattattcagacttgggtatttggtagaaattttctcaaaaataaacaaaatgagcctatcccatcaaagaaaataatattgacagtggaaattggaatttcaagagaaaattaaaattttggaaaacttacgtgtgccacagcttctcactacttaaagatgtttctgatgagattggtggtgatattaacaaatatggcttaaaaaatattgtttaataaaatatgtcaacattttaaaaatctgcgtaaacccatgaatcaataatttacaaataatcaatgcatgatattgcaaagtcatgcataaagatccatttaaagatagactagtgaattttaacacaacagaatatgaaaagttaatatataaggtttcagattccacactgcaactaacctttaagaatctgccatttcttgagttttggtgtcttatcaaggaagaacagttacgatagctgaaatggttatggaaactttccttcttttcccaactgtgtataagagtgaggccagattttcctcttgtgctttagccaaaacaacatattgttacagcttgaatgtagaagaatatataaccaagctagctttattaagccagacattaaagagatttttacaaatgtaaaataattccttttttttcactatttttttgtgctggagaagacagctattttccataaaagtgtgttgtttatgttaacatgtaatgggtttgttattgttatttaataacaaataaattaatataaatgtcactttacataacccatgtaaactaaagcttcttggtgttctcaacaattttatgaataaaaagggatcctgatatcaaaagaattataagctactgatgtagtcatcatgattgtttgaaactatttctcctaggtgcctcaggaagacttaggaaagtgtcttagtttgtatgagctgctataaccaactaccagagactggatggcttaaaaacagcagaaatgtatttttcacagttctggaggctggaggtctgagatcagtgtgtcagcctggtagggttctggtgaaggcctgctggcagcatcttctcactaagacctcatgtggcagaaggaaagggagctatctggaatctcccttataagggccctaatgccattcataagggctgcaccctcatgacctaatcaccttccaaaggcgtcacctcctggtactgtcaccttgggcgttacgatttcatcatatgaattttgggacggcatatacagtccacaccaggaagttcttgcacttcatagtcgaaagtcagttttgtggctataaaaatcttggttccattttccgctcttgagtatcttaaaaagttactacattttcacataactgctatcaaaaagtctgatgataatctaattattaataagtcattgctacttttgctgagtatccagatggtattttctttttctttagtatccacaagttttattggaatgtatcttggttggggggagggcaagatcgctgactagatgcagccaggtgaaacagttctcaatgaggaacccagatgactggcgtgctcctaacagatgttcagacagaaggcacctagagtggacagagggaagacacagaagctggactgaagtgggagaaagctgggagccctacatggggctacagcacatccagactcattcctgtcctccaatggctccaggaaaatgggtgagttgaactggcaaggaacaacccactgtcactatgacctctgcaaccatggcaggaggagacccattgaccaccatggacacttgagttggcaggaagagctgcttagagaagccgtaggggtggcaagccagcgggtgtggagcctagaggattcagtgcaggagcatctgcagtggagcatggccagggatggccatttccctaggctcaacttactcccataggagacattagccctagggaaactgttggtcctgaaatctgtagggtggtcttgcccatcagatgagtctggttctacctgagcaaccgttggtcttctggcctctcctggggccctggcctggccacatctgcttgcaaagcagcctcaggtgctctgtgggcctgcaccatagcttctacactggcagaccatgactgaccagtaagtggagagctccaacgaggaggcccctatgaccaggcaccagcctgcatgctccctccccacactgcagcttcctctgggcccacagcaactccccacatcattttgctggtacatgtctgctgggtgggttttgttttccttgcctcaccagcatataggagtgtaattcaccccccaccaattccctcctgacagccattgcagacagagccttggtgggcacagagccagccagccccactccctccatcatcccaccctgtgctaacactgtgcagagaacagctgatcctcccccaccctgagtgaccactcctgcacagaaaaggcacgcagacctgcacctgccaatgccttgcccctaagccaacaccacttcctgtgtgaccacacacacagttgccagcaggggacccccttcctttcctgcagttgcattgcctctgccactgtggtggatgcctgcagggaggtgggcaccccggcacctgctagtactctgctgcagcttcaactaccactgctgctggtacactcaaacaaggacagatcctcctgtcactgtactatgaaacactttggctgacaccactcattggagtgtagtgaccagtggtctgggagcacttcggactgcaccactcctgccacctcccccaccccccgcccatcacagcggattcctaattctgaggaaacagagaacaaagtcagggccccgtacaagtcccaaagaattacagcatgcagtccaggagttgggagtggaatactggccaaataaaattgtccagaaatgaagtcagttggctgaatccaccttataccacaatcaaaccctcaaagtcatcaaataggataaataggataaataaaaaaggttggatgatctttgctgtccaaaggtcagcagtctcaaagattaaaggaaaataagcccacaaagatgagaaagaatcaggcaagaaccttgacaactcaaaaagccagagtgtcttctgttctccaaacgaccacatcacctctcgagcaaggattctgaactgggctgagatggctgaaatgacagatatgtaattcagaataaggatagaaatgaagatcattgagctacagaagtacattgaaacccaatccaaggtagctaaaaattatgataaaacaatgcaggagctgatagataaaatagccagtatagataaggacataaccaatttgatagagctgaaaaacacactataagaatttcataatgcaatcacaactattaatagcagaactgacccagtggaaaaaagaatctccacacttcaagactggctttctgaaataagatagtcagacaagaatagagaaaaaagaatgaaaaggaaggaacaaaacttctgaaaaatatgagattatgtaaacagaccaaatctatgactcattggtgttcctgagagagatggggagaatgaaaccaacttggaaaacatatttcagggtatcatccatgagaatctccccaacctagctggagaggccaacattaaaatacaggaaatgcagagaaccccagtaagatacttcacaagaagatcattccaaaggcacataattatcagattctccaaggttgaaatgaaagaaaaacagttggcagctagagagaaaggccaggtcacctacaatgaaaagtccatcagactaacagtggacctgtcagaagaatctctacaagccagaagagactggggccaacatttattattcttaaagaaaataatttcaacccagaatttcatatctggccaaactaatcttcaaaagtgaaggagaaataagaaccttttcagagaaggaaatgctgagggaatttcattaccactagacttgtcttacaagagctcctgaaggaagcactaaatatggaaaggaaagacttactagccactacaaaaacacactgaagtacacagaccagtgacactataaagcaaccacataaacaagtctgcaaaataaccagataacatcatgatgacaggatgaaatccacacatatcaatactaatcttaaatgtaaatgggctagtgccccaattaaaaggcacagagtggtaatctggataaagaaccaaggcctattagtatgctgtcttcaaaagactcatgtgtgtcatgcagtgacacacataggatcaaaataaacagatggagaaaaatctaccaagcaaatggaaaacagaaaaaagcaggggttgcaatactagtttcagacaaaacagactttaaaccaacaaagatcaaaaaagatgaagaagggcattacataatggtaaatggttcaattcgacaaaagatctaagtattctaaaaatatatacctccaaaagaggagcacccagattcataaagcaagttcttaacgaccttcaaagagacttagactcccacacaatgatagtgggagactttgacaccacattgacaatgttagacagatcatcaagacagaaaattaacaaagatacccaggacctgaactcagctctggatcaaatgaacctgatagacatcttatagaactttccaccccaaaaagacagaatatacatttttctcattgtcacatggcacatactctaaaatcgatcacataattagaagtaaaacactcctcagcaaatgcaaaagaactgatcataagaaaaaatctcttggaccacagcacaatcaaattagaaaccaagacaaaaaagttcactcaaaaccgtacaattacatggaaattaaataacctgctcctgaatgacttttgggaaaataatgaaattcaggcagaaatcaagaaactctttgacatgagtgagaacaaagatacaacacattagaagctctgggacacaactaaagcagtgttaagaaggaaatttatagcactaaatgccaacatcaaaaacttagaaagatctcaatttaacaacctaacataataactaaaagaactagagtatcacagccaaccaatctcaaggctagcagaagacaagaaataaccaaaatccagaactgaatggaaggagattgagacacaaaaatgattcaaaagatcaatgaatccaggagctggttttatgaaataattaataaaatagatggacttctagctagactaataaagaagaaaagagagaaggattcaaataaacacaattaggaatgacaaaggaggtattaccactgaccccacagaaatacagacaaccatcagagaatattatgaatacttctatgacataaagtagaaaatctagaagaaatggataaattcctgggcacatacaccccctaagactgaactaggaagaaattgaatctatgaacagactaataatgagctctgaaattgagtcagtagtaaatagcctaccaaaacaaaacaaaacaaaacaaaacaaaacccaggaccaaatggattcacagctgaattctatcaggtgtacaaagaagaaatggtaccattcctgctgaaactatttcaaaaaattgaggagaagagactcctacctaactcattctatgaagctagcatcatctaaataccaaaacctggcagagacacaacaaaagaagaaagcttcaggccaatatccttgataaacattgatgcaaaaaatcctcaacaaaataccagcaaaccgaatccagcagcacatccaaaagccaatctaccatgatcaagtaggctttatccctgggatatgaggtttgttcaacatataaaaatcagtaaatgtgattcatcacataaacagaactaaagacaaaacccacatgattatctcaatagatgcagaaaagtcttctgataaaattcaacactccttcatgttaaaaactcttgataaactagttattgaaggaacatacgtcaaaatagtaagagccatctatgacaaacccgcagccaacatcatactgaatgggcaaaacctggaagcattccccttgaaaactggcagaagacaagaatgccccctctcattactcctattcaacatagtactggaagtccttgccagggcaatcaggcaagagaaaagaataaagagcagccaaataggaaaagaggaagtcaaagtattcctgtttgcagatgacatgatcatatatctagaaaaccctatcgtctcagcccaaaaacttcttaagttgataaacaacttcagcaaggtctcaggatacaaaatcaatgtgcaaaaattactaatatttctatacaccaacaacagtcaagcctagagcaaaatcaggaatgcagtcctattcacaattgccacaaacagaataaaatacctaggaatacagctaaccagggaggtgaaagatctccacaagaagaactaaaaagcactgctcaatgaaatcagaaatgacacaaacaaatggaaaaacattgcatgctcatggataggaagaaacaatatcatcaaaatggccatactgcccaaagcaatttataattcaatgttattcctattaaactacaattgagatgcttcacagaactagtaaaaactattttaaaatgcatatggaaccaaaaaggatacatagatacaaaataaggacatgaaaacatgtgcaatgtcattagccattagagaattacaaattaaaaccacaataagatattactatatacctatcatgatggctaaaaataaaaagtaggcacaataccaaatcctggtgaggatgcagagaaaatagatcactcacatttggctgctgggaatgtaatatagtacagccacactggaaaatagtttggcattttctttaaaagcaaaacatgcaaccaccatacaacccagcaattgcactcctgagcatttatcccagagaaatgaagacttatgttcagagaaaaatctgcacatgtatgctcatagcagctttattcagacaaaaactggaaacaaactgtggtatatccatactaggaaatactacttagcaataaaaacgaacaaactggatacaggcaccacgacctggatgaatcaccagggaattatgctgagtgaaaaaaaaaattgcaaaatgttgtctactaaatgattccacttacataacactcctggaatgccaaaactatagagatggaaattaataattgctgtgttaatgaagaagtggaaatgggagggaagtggctgtggctacaaaagggcaaaatgagggatattatagtgatgaaagtgttctttattttaattatatcaatgtcaatatccagactgtgataatttactgtagtttacaagatgttatccttgggggaaactgggtaaaatgtacatgagatatctctgtaacatttcttacaagtgtctgtgaatcaacaattatatcaaaataaaaagtataatttaatacagcatcttaacattttcaacaaaactaagtgtcaaagtatccccataaacctcaaatacaaattggtgaggacaaaccactagtagttgcacgttattaatttttcctgttatggattatgcctttggtgtcaagtctaaaagctttttgcttaatcctagatcctgaagattttctcctgagagttttgtgactttatgttttacatattagactttgatccatttttatttcttcctttgaaatctgcacgccttttttttttctcgcccattacattatctagaacttccaacgccatgttgaataagcatggcgagagtggacatcattgctttgttcccgatctttgggggaaaaatttcagtctttcaccgctgtgttagctgtaagattttttgcagatgctctttatcaaattgaggcagttcctctctatttgcattttctgagcattttatcatgaatggccattgaattacgtattctaatacctcatatatgtacatcattaacttggattacacttctttaaatagctgcctgttctactggttgtcaaatgagctgtatcctttctatttaatgcctacatgaagtttttaaatatggactctatgtcatatatttagtccctttcaggtttccaacataaagtgatactatttcagctacttaagcacttatttaggatttatgcctcatgtagtttagatttattatgagtttgcacttacatttgattcctttttatactcctaatgtctttttttcttaaacaagtggcctatatatttggactcacaatatttatacatcctctgtcaccaggggtacatgtccttataccttaaagcacgtgcttctggagtcctgtcgtgttacatgtttcctctaaaacaaaccctccatgttatttgagagccaaccccacttttcaagttatttaggctgctgtaacctccattaataaaggattcaaaagtcataattgtgtgattctttaggaattatccaaaaaggcaatctgatttattttccaaatatcctggatctgaaataatctatcagagtttatttctatgcttggaaagcttccttggatgtcagcatttgcgattttcttacttagcttatgtagctaagtaagaaatgaattgcttttgttggtttcttagtacattctgtccatcaagtacattgagttgtttagaattgttttgagtcaacagtgtaacaagcatccaaaatcttgtatagtcaattttgtttgactattgtgctagaagatcaatttctatttcctctgttgacaatatcctgagcattttgaagttacacaattgcagtggtaatttagcggaagagtgttaacattttaacctaaataattgattttgtattaaacaaattctgatgtaggaatgtatttagtattaactatatggaattctctataaatctcataaacagagtagttgcttttttgaaggggattaaaaattaaatatcaacattttcattttagaaaataaaaaatgtggctcacgcctataatcccagcactttgggaggctgaggtgagcagatcacgaggtcaggagatcgagaccatcctggctaacacagtgaaaccctgtctctactaaaaaatatgaaaaattagctgggcatggtggtaggtgcctgtagtcccagctacacgggaggctgaggcaggagaatggtgtgaacccaggaggtggagcctgcagtgagccaagatcatgtcactgcactccagcctgggtgacagagcaagactctgcctaaaaaaaaaaaaaaagaaaagaaaaagaaaaggaaaaaatgtcttttttctttttaaaattttcctattttaatatttaaaattattttatcttttttttaaaaaagttatacatgacatggtttaaaacatcaaatacagatggttcctgacttatgatggttccacttaagattgttcagctgtgatggcgtgaaagcagtacacattctggaagaaatgtacttcaaatttgaaatgtcagtctttctctgggctagtgatatgtggtataacactctcacctgacgctgagcagcagtagtgagccacagctcccagtcagccacgctaatgtaagtgttctgagcatgttgagggtaggctgggctaaactatgatgtttgataggttaggggtattgaatgcattttcaacttgcagtttatcaggacacaaacccacctgaagtcaaggagcatctgtatttctacagggcttgttatgcaaaacagctgaccacactgcctccccattcctctttccagacagaaattctagtagatagtcccattttacaaatgagaaagtggaggcttagggaggttaattaagacacgcaagttcatatgggtaggaagcgatggagctatgataagaactcaaatccatatggtccccaagcctgaggtttgagctatattgcttcgtgattacaggatatattagtttcctattggtgctgtaacaaattaccacaatttagtgttttaaaacaacaaaaatttattgttggacagttctggaaattataagcctaaaatgggtcctgttaaattaaattaaatttggcttaaagcggcctctgtactttgaattcctacgtagtatactgaaatctaacttaatgtgtaagaaaattgtaccctaacttaagagcatattcttgtaataaatagctgagtctcaggcaaacacagcagccaagcttcaggcaatcacaggttgccaactgatcagaccatgatcaaataaggcaaatactgagctgtaaacaagctgcttctgtataccacttcctttttctctctataaatattgcctgcccctattgctcagtggagctctctgtacctcttctggtcctggatgctgcccaattcatgaattgtgctttgctcaaataaatcaaaataaatttcatttgttcaaagtttttcttttaacacttgtacagggctaatcaaggtgttagcttgtctgtgttccccttctgaaggctttagcggataatctgtttttgcctcttccagcttgcagcgaccagctgcattcctcggctgatgcccccttccagcaatcactttcctctgatttttgcttctaatatcacatctccttcttctattctcttgcctctttctttcacttagaaggacccatgtaattatatcaggaccacttggctaatccagaataatctccccatctcaagatccttaatctaatcactaatgcaaagtcccttttgccatgtaaggtaacagattcacaggtttcatagattcagatctttcaggggtggcagttgggggcattattccatctaccacacagagtaaagtttcatctggatgacccacaggccctacaaatacaaaatgtctaatatggaatgttctcttaaactgtcctttcttgatgactggaattactaaccacttggtctcccaagcatcttctgctctcgccttctcctctctcccatatacaatggatgacgacacatcatgttgcatctgctccctcacatgtctctgaccctctctctagatccctgatcctactttaattcgagccccatcatgtctggtctgtgttactctaacagttacccacgctgctttctctgctttcaattttatgctcctctaacccactcttcccatcagagtagtctttctaaaacgtgaagctgcccatgacccttcccttactatcagtctgcatactggtcctactgactgcagatcaaagacccaagtccttagcctggtgtgtgaggcatccatccctagccctctgcttcatctgtcacccacccattttaccaattccgaaagactttcacttccctcgaagcctgtccaagtgtccaagccgctcatgctttgttagacttggaagccattctccatataccctcgatcagcttgaatgtcatttccactagaaaattttcctaattgtttgtgacttcaatgtcctaattttacacacatttctgctgtgcccctttgtttgctaatatgtctcctgggtggtaagcaggactccgtgtcttattaatattttccgtctccagaattcagccactgtctgccacacaagtgcataatgagttactatactaatattatgcagccatgtcccctgtacagcagttccctggatctcatggcttcttttttgatttgccttgtttgttaccaacttccatcagtaagacaatctatccaatccttgtcccctttgccacatcacatcctcagggcaataacaaagttgttaagtttatgcaccttctccacttggagcaaggcctcaccatgtcaggcctccgcctgattctcctccctgcctgggatggcagattttgctctagtgggtctccaggccgtgaggtctcctgtcttttatgttctgatccgggtggtgagctgcagctcactacaagtccttacttgtctctgctggcctttagagactttgtactcaatttggaggaactactcttgatggattgtaagtgagaggatttcctggtctccctctggagtccgccagaaaaccacattctctgcttttcagcgttgactgctcatgcttacgtaatttctaagagtaagagcctatggactgtcctggcagcaaagaattcgctcaggattttgcctgaagctgcacttccggggtctcgcttcatcagaagacttcttcattttcatcatcggcccagcgatgcatgggtacctcttagggtttagccccagaatgtactgggggaggggagggtaaagtaggtggggaaggagtcagagtcgtaggtcatctgtggctggagttttgcatccctaataaacgggaaatgaactgaaggaagactgggttttcacgtcaacacgaaggacaccattacgatgctagactaatcatcaaataaaattccagatggaaaaaattcagaaacttaatttggaatttgagccccgctctattatgcaacgttcccagccattgctccgcggatgtaatgtggacttccaccgccagatggcgatcgagaccgtaatttaagttggttttctcaacttcctctggactgagtccccgtgaaaatcccaagtttaacgaggggctttcctcgcgtaaccttcgcttctgcttcctctctcacatcacctcaacctgcgagactctgaaagggataatgagggttggggggaatatggaaattcagggaagggagaggggggtggtgtgaagctttccagaccagccacacagaaatagcgtaccaatagtggtttagagcacagacccccagccagaatgagtaatttaaacagccctacgatgtaatcgttgtgtgcatatgcatctctatgcctctctctctctctgtctttctttcatctgagacagggtctcactccctctgtcccacaggctggagtgcagtggtgcaataatggctcgctgcagtcttgacctcctgggctccagtggtcttcccacctcagcctctgaaaccacagggtcttgaacttctgggctcaagtgatcttcctgcctcggcctcctaaagtgctggggttacaggtgtcggccaccatgcctgtctgctatttaagtgcatagaagaatgcctggcactcagttagtgttaaatatttataaaataaattaaaattttataacactacacacatgttgttgagtatgtcataaatagagacatatttaatgagatgtcaacatatatcacgttaatgaattaagtaagtttgagaatattagagaagaatgataatagattaacggaggaggctggcgcagtggcccacacgtgtattccagcactttgggaagccgaggcaggcagatcacatgaggtcaggagttcgagacccagcctggccaacatggtgaaactccttctctactaaaaatacaaaaaaaaaattagccgggtgtggtggtgtgcgactgtaatccctgctaatggggaggcggaggttgcagtgagaggagatcgcaccactgcactgcagcctgggcgacaaagcaagactccatctcaaaacaaacaaacaaacaaacaaacaaacaaaaaacagacgaaatagggtttgagtatgtagtctgctctcaacatgagatagtaaagtctttgcttcccttatattctgttaattaactcatttgatgcacatcgatgtataaagcctttaacttctatttattcttttccttgaaaagcatgcggaatgccttctcaggactctcccattttttatttgtgaacacccactggcattcccggatacgaagcttgcaagaaggtgtgaaccgccctatactcgtgagcccctggggctctgtactctttccagcccacatttgacctcagtcaatttttaaatgattccagctaaattcttcttaccagtgcccagctgtacctgccttaggtaagcaagcactcaggcaacaactttcctagatttcaagctagttggaagctcaatcccagctctgtgatgggttgaaaaaaattgcgaccttgcaatttgtgtgatttctttcatgttgcaaggaagcatcattgtttccagttctctgcatccccaagcagaaaccagaactctatataaacgtttttaaatggagacattgagaaaaagtacccgagaaaccaatgagatacaggaagaatgcttccagcactaacatgaatggggcttggccatacagatagaagggttggaaactcttacgccttgatttaaactctctatgcatattctgagcacgctggggaatgtactactactaggcttgatttggattcatggctactacctcccacaaaatgataggtcttctgttttagtacgtgagataattcctcaatcgatcttattgctgctatttctgttaagcataaacaatgatttgggtcacaaatttcaatggggtttaaattcctttgtgcatcccaacaggtaatcctcttactctgggctatgaacttgctactgccaagatggatgccatgaaaaaaagagatctcatcaaaatggtcacagagagatggagggcctctgtgtagatggcagggtggtggtggccgtgtaactagctgcccggtgaggagcagcccttggggagagcccaggtaggaccaggagaagcagaaatagagaaaagtgaaagatcgaggtggaaagaacatgagggacaagagctctgcatggccacatcaccagcagtcttgttattacaatgaggatgaagggactgaaaagaggggaagagatggaattcatcaaacaacagtgctcattcatacaaggtaagtatacatgtggccttttctctctctatctgaagatgtggcttactgtaacaggaactatcatgggcattggacggctgtctcatggtgatcccatcctcctctacatcctaaacttttttttgaatgcatttctgtattttgacttcctctctccccaaagttcttgttaacttctgagtatgacttagcttccttattctttgaaatatttgaaacccctaacttcctctcctctgtggtgtaactcacatggcttcttgataccaggaggcactgtctgcatacaacctcatattatgaggatgaaatgcccatgaatcctaccaatctgaggaacaacgcatttgtcttctctgacaaaatacgggtgccacatattctgtaggaaaaggtggtgttgaggtcagaacttctctgtttctctgtctctctctctctggttctggaaatgttgagaatatgagtgaagggaaaaagatgggcaccacgtggaggcaatttcatggtggcatgaaacaattttgggggcatgaatgccatgggcagaacatcagggccccaaaagggaaatacacagtactttctttggacttcagtgctctcttttatagtaatggaaaccacaagcgcagaggaaggggagctgattctataaaaagaagtttatttcctactttaaaagatgattttttgactatcttcccacaatagagccagaggatcacaggggaaagctacgatcctcaattatagaaaatgatgttgggtgcatctagcatcacagaagctttagaggacacagtcatctcaggtacctacagataaggaagaagtaccaatgagagtacctactcgtattcttattcatggaagcgaatcccttcaggaaccaaatcatttagctgctggtagatgtttcttttggctcctctctctcctgagctctcaaacacagacttttttttctgtgtgcctctgcttttggcaactctgttccaagaataagaatatttgtttgtagatgagcttgctaggtcggggatctcttgtatagggagatggtgaatcactgagcaggacacagaggcatgagttgaaacagtgagatgtaccttagtttaaagagaggtcacaagagctcatggaccattattagataaactctaaattagaaaaaagaaccatatttctcttttgatagtcacataaaaattgaagccatactcattctaataaaaagtaacatgcatagctcttcattgcaaagctcatctattattcataacaggcatatagggtctatatcatttttacagaagtggaaatagcatgtaattactaatttagtttattcattagttttccaaaagtgaaataaagaattttccctttgacttcctacctggtaatttgaaagagataaatttgtgactaaaaagagtacttcacatcatacacaaataattaatgcaactgattgacccaagctagtgtgtgtgatattgtgatataataggaagtatatatttggtttctgaccctggttcctgcccttcagctcctaaaactcttggaatctccagagtgataagagtgtcttttgcatgctaatgaggtgactggtggctggggctggtcaccagaaagaccaaggcaggattagagggttgggattttcacccactcacaatctctggggagaagggaggggctgaaggttgagttgactgccaatggccaatggtttaatcaactcaccatgctgacataacaaagcctccattaaaacccaaaagggcagagtttggagagtttccagatagcagaacacggaaagatgcctggaggataggctcttgaagaaggtgtggaagctccgcactctttcccccatactttgtcctatgtgttttgtttttctttatcaatctgttcgtctgtatcctttgtcttatcctatgtaataaaccagtgtatgtaagtaagtgtttccctgagttctttgggctgctctagcaaattaattgaacctgaggaaaggtttgtgggaacctccaatctataattggatggtcagaagtacaggtgatagcaactggcatctgaagtgggaagggggcagttttgcatgactgatccctcaatctgtgggatctgatgctatttttaggtaaatagtatcagaattgaattgatttagaggaacccggtgtctgctggagaattgcttggtgtgggggaaaaatctccacatacctgatgtcagaagtaactgtgtaagacagaaggaaaaatgctttggagttttttgttttttctccccatctctatttatataggttaaaaatgtggctgggtgcatgcccatgatctgagcactttggaaggcccaggcaggaggataactagaggtcaggagttcaagaccagcctaggcaacacagtgagacccccccgcatctctaaaaaacaaacagagacaaatacataaataaatcagtacaagtacaagcctcataatccattatgaaagtgtcagagtgatgaatgccatgggcatagtaacagttaataaagaaaataatgtgttggaggaatatttaagataactgaggctgctacaagcaaaactacagaataatttcatcatatacatttttttttgtttccaaattagatacaagattaagccttgggtctccctggcagtggagggcgattctgatattcacatataactacccacagggcatggattctgagagatgctgataaaagaagttggtgtcttcttggcatttgtccccaaggatcttccaatacccagagaatctgcatttacacagatcatgctcccttgggagcttctcttgactgccccccacaccctcattcgtggcttttcctctttgatctcccacttcagtcctcacacctgtcaacactgtgcttattaccatgtggagtggttagaagatcttcccagagtcaagacatttccagggtcacccttctcttaggcatttcttggcacgactgtcctgaataaaggaaaggagatgaaggtgatgttgagaagcatctagagggctggagtcagggggaaccggctgaggctgttggatcaagttttagccactggtaaaagacctccaagctgcgaatgctattgccatctgtgtaaagtcgcctccgagattagaacatgccaaagactgaagaaagaggtctaggtagcataaagccatcatgtaattgaagtttcttccgtttccaaggacaggaagcgtgcaaatggctctgcgttctcagtaggggtggggctaagaagtgagcctgcaaatggtagtttgggcgaagacttgtgtgatgcatgcagggactcaaatttagtgtcctctgaacacaaacaccctctatgatccgggttaggtatcgctcctgtgaacgttcaaagaacacctttatattctgaggggacaccgttcatcatcagatcactgttgacggaagccaggtgacagctttgtatttcgtgttttcccctttagtaatgtaaaaatagaagttatttctcctttcttccaatgtaggatttttttttttgagagggtctctgtcacccaggctggagtgcagtgacacaaacacagctcactacatccttgacctcttgggttcagatggtcctcccgcctcagcctccttagtagctgggacgacaggcacattccaccggcccggctaatttctttttaaagtttttgtagagatagggctctcactatgttgcccagactggtcttgaactcctgagctcaagcgattctctcaccttggcctcccagagtgttgggattacaagcgcgagccaccacacccagcccagtgtaggaatgtttaattcctccacttgctatcaaagaaaactgctaactttcttatttcctaatttctctttttctatttgcttctccttaggttctgctcttgggtgctatctccttagttttgagaatatgaaggtttgtttagaaaaaaaaaagcagaaaaaattcactggaagatttcacatttgtatatatctttatgaaatgtgacagtgaagtgttagggtagagatatttgatctgattaccattaggataaaatcaaatctccttaccatgtcttacatgtgtacttgtccaatcttgtctcctataattgtccaaccaacccgttctgttccagcctcactggccttcttattctttcacgaagctcacactgtcctccagagccttgcactctcttttgcctggaatgctctcccagatcttaacatgataggaaaacaaaagacaactgtttgtcatgtctactacagtctcagccccatgaggcagagtccatgcccattttccttccatgcaacattcctggcacctagagagtgactgatgcataatggctggtaaaatatttgattaaaaaatattttagtgtatttcctcccccaaaatatacatacacaacagaggcagttattttgtctatatctttagcacattttaggcatttagtaaatttctgttgaatccatatggaattcttcagattgatctgtgaacactttagatttgaaaaaggagaaaatcataaaactaagggtaatggggagagagcaaaaccaaaggcagacatgggaagattctccttatacaaaatactttttccatgtctataatgaacccccaaattatctggatacttacaacagtggtagcaagggaatgtctcgttaatgcaggttctctattctcctcaattaatttcaggtccttaattgtgcatgacatatgaaacataaagggtgtttatttgctaatcaccagcattaattaattcaaagacttacctgagattctgtttgcgcaataaaaattaaaaagattactcagtaatacattgggagaggtgtaactggggcattaaaatacgaatgtgtgtctaattttcaaacatcataagtattttgaaagcacttatacataatcaattaatatatgttgttaactaaattcatatgaataatatgtgatataaattagtgttttgtattaatttcaagacaattagaaagagaatgtcaccatcactcttttgattcaatcaacagtccttagactggttccttgtaatgaatttaatgggttagtaaaagctgtgttatttgaaattatgtaattttgtttttttaatattttgctcaaatacttttcttattagtgtaaatgactgaagtattatgtaaattttaatactgattatctaaggtatatcattaaaacaaattatgagctgtgatcttgggcaaggtactcaaactgaaagatgttttccttatctgaaaatttagataataataattacctcatagtctgttaagaaaagcacatgtgataatatattttaatgtacaatatgtctggcacatattaaggtctaaaaaggataactgttactgttataccaataaatataataattttgataaatataatagtaatttaaatatattttttccaacatttattttaagttcaggggtacatgtgcaggatgtgcaggtttgttacataggtaaatgtgtgccatggtggtttgctgcacagatcatcccatcacctagttattaagcccagcatctgttagctattcttcctgatgctctccctcctcccatcccctacctccgacaggccccagtgtgtgttgttcccctccatgtgtccaagagttctcatcattcatctcccacctataatgagaactataaactcataattcagctcccacctataaatgagaacatatgatatttggttttctgttcctgtgttaatttgctaaggatggcctccagctccatccatgtccctgcaaagaacatgatcttattccttttcatggctacataatgcaccacattttctttatttagtctaccattgatgggcatttgggttgattccatgtctttgctattgtgaatagtgctgcaatgaacatatgcatgcatatgtcttttataatagagtaatttatattcttttggttatatacccagtaatgagattgctgggtcaaacagtatttctgtctctaggtctctgaggaattgccacactgtcttccacaatggttgaactagtttacactcccaccaacacaacctctccagcatctgttgttttttcactttttaatgataaccattcttactggtgtgagatggtatctcattacggttttggtttgcatttctctaatgatcagtgatattgagctttttttcatatgtttcatggccacatgtatgttttcttttgagaagtatgtgttcatgtcctttgcccattttttaatgggttttttcttgtaaatttaagttccttatagatgctgaattgtagatctttgtcagacgcatagattgaaaaattttctcccattctgtgggttgtctttttactgtgttggtagtttcttttgctgtgtagaagctctttactttaattagatcccatttgtcaatttttgcttttgttgcaattgtttttggcctcttcatcatgaaatctttgcccatgcctatgtcctgaatggtattgcctaggttttcttctagggtctttatagttttgggttttacatttaagtgtttaatccaacttgagttgatttttgtatatggtgtaaggaagaggtccagtttcaatcttctgcatatggctagccagttctcccagcaccatttattaaagagggaatcctttccccattgcttgtttttgtcagatttgttgaatatcagatgctagtaggtgtgtggtcttatttctgggttctgtattctgttccattggtctatatgtctgttcttgtaccagtaccatgctgttttagttactgtagccctgtagtatagtttgaagttgggtaatgtgatgccttcagctttgttctttttgcttaggattgccttggctcttcgagctctttttttggttccatgtgaattttaaaatagttttttaaaaattctttgaagaatgtcaatggtagtttaataagaatagcattaaatctataaattgctttgggtagtatggccattttcatgatattgattcttcctatccatgagtatggaatgtttttcactttgtttgtgtcatctctgatttctttgaagagtgatttgcagttttccttgaagaggttcttcacttaccttgttagctatattcctaggtattttattctatttgtggccaattgtgaatgggagatcatttgtgggtaatttaaatttttaaaatcaaatattttatcactcattatgcattattcttctctgggatagatagagatttcccagaactccgataagctttattttaacctatttacctctgattaatctgtttcacctcccggttgttactgtagtaactggggttattaatagcctcagagctaccaagacttctctgtaaaactgattatctttttcaggatagcatcctctaaatggttatgcaagatttatggttaagaatggaagtagctgattaaataattcaatgagctttactcaactatctacttttcacagcctctattttgtcccctgtggaagcacataacagggcttagctttggtgttgtagctctctgtcagaatacgcaattagtaggtctcatatataaaatttcatttcatcttaatattaatcccaccaaatggaagctatctaaactttaaagttaaaatgactgaggctaacagagaatatgtgatttgttgagggtcacaaacttaacgaattctccaactacgggacaaatgcatttttctcaaaatctgttaccttttatattatatcccagtgtctcatagtgccaagacaaggaaaaaatgaacaattcttagacaattatcttcttttccagggaatatctttccattttctttttcccatccctctcctaccctccccagctacagtcaaacctcaaatataagaaccagagaatttaaataaatgtcacaagaagaaacatcctgaatcgtgttcttcttctggttcctgaaacttccaaacatatcttcagcgttatcacaaagttcagtgatacttaggaataacctagtgctggacaccaagtagatgaccaatgaataatttttgtatttttagtagagacggggtttcacgatgttggccagtctggtctcgaactcctgacctcaggtgatccacccgccttggcctcccaaagtgctgggattacaggcatgagccaccgcacccggcccagaaacagatttcttatctgaaatatcagaaggcagaaaacaacaagagggaaaaaaggctgctaacttaacgcatggggaagcagggtgtgggcaggaaatgcagtgtaagagaggagatttgtacagggcgatggaagagacaatggagagaagacaatctgagcagaagctgtgaggagtagatagatgctggggaaagggactgctaattatggtgttattttaaaactagctttgtgtttaaaattctcattgcaacaccctcagagacctccactgcactgcaaaaatcttggatttatattttgtttatcttctggtgtaaaactgagctgaagcacactgattctactagaagaagtcaatgtcctaggaagacattgacagctgtagggatgttaactgggtcatcttcaccagtaggtggggacattgcactttaaaaattcaagggagctgctgctttcccttctctcctggccccttggcaggtctagatttgagggatcagcatttcttgagggtggtaacccagccactcttttttcccttactcttccttccatgtgttcaaaatatgatgcaatctgagatgtggttatgggtgtttgagaagcaaagaagcatgactggagcaggagttaaagtctgcttttgtttgagaactgaagagctcagtcttttacacgctttcacagataagagattggtactataaaattacatgcttaaaacaaacttcgctgctgtcattctaatgcaagccactatcctttttcacattgagcatcctgccaccatctgcagcattcttgatatttcagtaagaattaaattttattttgcaatcagtattttaaatttatcaggatacctgtatatagtttgaggattaaacaataaagatgtattttaatgaaaacaagagcccttcatgccattcctttcctccactagcattatccccaggtcaatgacttttaatggtaatatgtgtatctttgtgtatgtggggtattaatttagacatcagttatctaattatctgaaagcagataatttagaccaccaacaattttatgtctctggcatccttcttgcaattttattatattactatgtttagttcctctgtaggtaatccctgtatttaaaaaaaaaacaaagaaaacctacacctaagtatattgtatttaaactgtaaaaaaagttgaaatacataaatactgcttagaaaagcaaagtgggatgggaaaagtacaagttattacattttagtatatttcttaaaaatgaatataacaggtagatatttgttagtatgcattacaaaatttgggcaacatagttatgaagtatatttggatatttttcaatacatatattacacaaaggaagaaataaagtactgctcaaatcaatggattaaataacctagttgaaatattggaaagtagatgaacagtaattcacagaagaaactcaaatggaaaacagcatatgcaaagatggccaactttctctataatatttgacacagtaatattatgtcatttcagtttaaataaaattatacattgataaaaatgtgaaatcacgtctttgaggggttactaagaaactgtctagaagcattgttctagaagctgatgtggttttggaagatcaagtgtgaatgtccaaaggcacttctgttgaataaaacgccaagtggaggaattgaagatccctgattgtggaagtatccaactgtttagaactcaactgaaatcctgaatgatagttctctacatgtagcaggaggagcaagtgactcatggaaataacgggtttatttaaataaagatagcctttatgtggacatcaaattcatcaatgaatgtatccatttatttgtcaaataattatttagctcctactaagtgctacatgctattccagataacctagtcaaaaaggcaaatgtgtccctacctttatgagctttaattctagcaggaactaaaaaaagtcacataataaacagacataaaatgcagtgttaggttgtgattcttgctatgaagctacaaaagaggaaagctgagtaagggaataaagaaacaaagtgcttatcagtagtgaacttccatgcaggccatgacaggctcatttcaaaagaagcagaaatatttttattattgtttccttgggttattagtgtcacatgtaagaatagtgcactagatttactaccacagatttttgtacttatacgttattttgaacaaaataacaacgtctagatagttcctttcctcctgcaagaactaagtgtatgtaagtcctctcttttgtaatctagtttatttttttcacatgtgaggatcccagatactattaggatgccttcattgctaattggatcttggaaaatatactttcttgctttacaaaatatatttccttttaagcctcagagtaaattttgaaatgatctacccatggattagtcctctgattttaactagtatcattattctagctgtaaaggacatctattcaaactgtgtacaggtaagattatccagggggtatagtttagagcacccatataattttcaatagattatgtgattttacaagaatctatcaagttaatgtttcaagaatattgataattacttttagacgttttgctgaaaaaatacaaatagacagggagtccatagtaatagggtgggtctaaagttatgtagtctgagtgaggacatgggatgttaagtccagagacaggccatatgcagacagccagaacaatgtctcaaaatctacaaatggctgggcctggatcagtaattcttatgtgaaggatgccagaaatgagcaacgtaaaccttaacagagtctgaaaacacatctcaaggtagaggttagaatgaatccacctgccatcccagcctgatacacatgctagaatgggttatagaaatgggctaacaggaaaaaagtcattgaaatcatggaaaagaccgaaatgaaaaatgtgagataatataaaggtccatatatgttatttatttcagtaaaatgcaaatagacttgacttgtgatcaaaagacagagattgacaaattgaatgcaaaaatacaaattcagattatactgtttacaagacatatgtctaaagcataaaagtcatttcagagattgagtgtaaaagacagaaaggatatatcatgcaaatactaattttgaaaaatgatatcaatttattaatgtaaaaaacaaattttaaggaaaaaaggcattgtagatttttcttcatctctttattttgagcctgtgtgtcattgcatgtgagatgagtctcttgaagacagcataccaatacatcttggttctttatccagcttgtcactctgtgtcttttaattggggtatttagcccatttacatttaaggttagtattgatatgtgtggatttactcctgtcatcatgatgttagctggttaatttgcagacttgtttatgtggttgctttatagtgtttttgtagtggctggtaacagtctttccttttcatatttagtgcttccttcagaagctcttgtaaggtaggtttggtggtaatgaatttgctcagcatttgcctgtctgaaaaggatcttatttctccttcaatatgaggcttcatttggccaattatgaaactctgagttggaatttcttttctttatgaatattgaatattggcctccaatctcttctgcttgtagggttttagctgagaggtctgctgttagtctgatggacttccctttgtaggtgacctgatctttctctctagttgtttttattttttattttttaacattttttctttcattttgaccttggggaagctgataattgtgtgtcttggggataaaagtcttgtgaagtatcttattggggttctctacatttcctgaatttgaatgttggcctctctagctagattggggaagttctcatggatgatatcctgaactatgttttccaagttggttccattctctccatctctttcagggacaccaatcagtcatagatgtggtgtctttacataaccccatatttctcagaggttttgttcatcattggggaagacagtgtggagattcttcaaagacctaaagacagaaataccattcaacccagcaatcttattactgggtatatacccaaaggaatataaatctttctgttataaaggcacatgcatgtatatgttcattgcagcatattcacaatagcaaagacatggaatcaacctaaatgcccatcaatgatagactagataaataaaatgtggtacatatacaccatggaatactatgcagccataaagaaacaaaatcatgtcctttgcagagacatggatgaagctgaaagtcattatccctagcaaactaatgggggaacagaaaactgaatactgtatgtcctcacttataaataggagctaaattatgagaacacatgaattcataaaggaaaacaacacacactggggcctatcagagggtggagagtgggaagagggagaggatcaggaaaaataactaataagtactaggcttaataactgtttgacaaaataatctgtacaacaaacctccatgacacaggttacctatgtaacaaaactgcacatgtaccccgaacttaaaataatagttaagaaaagaaaacaggccgggcacggtggctcacgcctgtaatcccagcactttgggaggccgagacgggcggatcacgaggtcaggagatcgagactatcctggctgacacagtgaaaccccgtctctactaaaaatacaaaaaattagccgggcatggtggtgcccgcctgtagtcccagctactcgggaggctgaggcaggagaatggcgtgaacccgggaggcggagcttgcagtgagccgagatcgcgccactgcgctccagcctgggcgacagagcgaaactccgtctcaaaaaaaaaaaaaaaaaaaaaaagaaaacaaacaaacaaaaagcaaattaaaaataaaagctatggttgaatcaatgatgacattgaggaataaaacaagcattaggatcatgacattagcacaaagccattcatgagggatctgcccccatggtctaaacatctcccattaggccctgcctccaacattggggatcaaatttcaacatgagatttggagtggacaaatatccaaactgtggatgggaatgcatgtggaagaaatacttaatacaattgcatttaaaaagtagagagggtaaaatatgctaatggtactagagatacggactgtatccttcactcaaagtggtaaaacatcaataccagtagactgtgataagttatatgtatatattgtaataagtacaaccaccaccaagaaagctatatgaagcaatgtactaaaaaggattaaaaagtatgagtgtagatacaaaagttcttcctgagaacttcaaataagatagatatgcatatggtgagtagggctgaagtcttgacttctatgcctgaaagtaggcattattggctgggaatttaattcctaagtgggaaagaaaccaaaagtgctctatggaggaaagacagccaaattttgactttctgcttctggctaggagctgaggttgggctccccatgattttaaaggaggttgaggagaatgttttcaaacacttgtatgctatagatataaggaagtgagaagacacagaataactttctcaaaaggaactgaagcaaataaaaaacaactgtcctgagaagattgttattgttccagatattacaacaggacaataaatctgaatgatcactgaagaactgggattttgattggaagcctgatgggctgaggtggagtggctaaataaaacctctggacagggacagtggagtacagaaaagaagaggagggaggagagtaaaagagatgggcaatgctatggtttgaatgtttattttctctgaaactcatattgaaacttaatccccatagtaatagtattaagagggctgtaaatccaactatggtatttgagaggtggcacctttgggaagtaattaggattagatgaggtcttgagggtggggcattgagaggagaaacagagaccttgagccatacccctttgccctcttgtcacatgatgctctgcacctcatcagaactcagcagagggcccaccaataagaagactctcaccagatgctggcaccatgctctgggacttctcatcctccagaatcataagagatacattttgtttcttcataaattacccaatttttggcattctgttacaagcaacaagaaacagactaaggcagaaaattggtactaaaaagttgggctgttgctaataacaaatatctgaaaatgtggaagcagctgtggaactgggtaatgggtagaggttaaaagaactcaaaaaggcaggcgagaaaaagcctgtattgccttaaatgtcaattctggtgataaagggtgattttggtgagggcttagaagaagtcaagaagactaggaaaagtctggaactcctttgtgatgatttgagtggtcaggaccagaatgtcaatagaaatatggacagtaagggctgttctgctgaggtctcaggtctgaggaacaaggaattggaaactggagtaaaggccatccttgtaataaatgggtgaaaaacttggctctgaattgtgtctatatctgatggttttattaggctatatggcagaagaaatatctaagcagcaaagcagtcaggcagctgcatggctacttttaactgcttacattaaagctgtgagaggtaaaaaataacttaaaggtggaatttataattaaaagggaagctaagtggaaagattaggaaattttgcagcctggccctgaaagagcattttcaacagaggaaaccaagggtgtgtctgaaggaatgattgttaaggagggactgattgataaggagaattgtatgaatagaataaagccagaagctattcatcaagacaatgggagacaaacactgaatgcactttagagatcttcaagtctacccctgccatcacaggcccagagctctaggaggaaagaatggtttcaggagacaggcctggggtgtcctccatgggcttgctgcccaatgccacctcagggcagtgcttccctcatcctggttgctccagccatagctcaagtggccccagatgtgactcatattgtagctgcagaaggcacaagcagtaagccttggcaatgtccacatgcatgtggtgctatttctgcaggtcttcagaatgcaagactagtgggaaggcatagaaatctccacctagatttcaaaggatgtatcagactgcctgggaacccaaggagaaaactgccacaggggcagggccaccactgtggggaaaagcaagagggatcagattgttactgtgtctgtgtagaaagaagtagacataggagactccattttgttctgcactaagaaaaattcttctgccttgagatgctgttaatctatgaccttacccccaacaccgtgctctctgaaacatgtgctgtgtcgaactcagggttaaatggattaagggttgtgcaagatgtgctttgttaaacagatgcttgaaggcagcatgctccttaagagtcatcaccactccctaatctcaagtacccagggacacaaacactgcggaaggctgcagggacctctgcctaggaaagccaggtattgtccaaggtttctccccatgggatagtctgaaatatggcctcgtgggaagggaaagacctgaccgtcccccagcccgacacccgtaaagggtctgtgctgaggaggattagtataagaggaagacatgcctcttgcagttgagacaagaggaaggcatctgtctcctgcccatccctgggcaatggaatgtctcggtataaaacccgattgtacgttccatctactgagatagggaaaaaccgccttaagactggaggtgagacatgcaggcagcaatactgctttgtaaagcattgagatgtttatgtgtatgcatatctagagcacagcacttgattctttaccttgtctatgatgcaaagacctttgttcacgtgtttgtctgctgaccctctccccactattgtcttgtgaccctgacacatccccctctctgagaaacacccacgaatgatcaataaatatgaagggaactcagaagccggcgggatcctccatatgctgaacgctggtcccctgggtccccttatttctttctctatactttgtctctgtgtctttttcttttccaagtctctcgttccacctaacgagaaacacccacaggtgtggaggggcgacccaccccttcaaccaccaagagcctctgctagggcaatgctgagaggaactgtggggttggaactgctacagggagtcctccccagggaaatatctagtggtgctgtgacagtgggactgccaccaagactccaaaactgtagagctaccagcatgcagtcccagcttcgaaaacccaaggcacctgactccaacccatgagaacagccatatatgggctgcaaccagcaaagccatgagggcagggttgcctgaggtcttgggggcccaacttctgcccctgtgtgctcaggatgaggaacatggagtcaaaagacattatttccagctttaaaatttaatgtctttccctgttgagtttcagacttccttgaggcctgttacttctttcttctggcccatttctcctgtcccagcattgtatcttggaggtagataattggctttagtatctcaggctcacagataaggactttggacttttggacttttgagttggtactagagaaagttaagactttggggctctggagataaaatgaatgtatttgaatgtgagaagaatatgagttttgaggctgcaggggtgaaatgctatggtttgaaagtttgctcctctaaatcttatgtagaaacttaatccctattgtaacagtataaaagggtaagaaaacagaccatgatattttaggggtgggagatgtgagaagtaattagtattagatgaggtcatgaggatggggtgatgggttactaagggtttgataagaggagaaagagatacttgaggtagccctctcagcctgcttgctatgtgatgccttgcaccacaatgggactctgcagagggtccccactagcaaggaggctctcaccagatgctggcaccatgctcttggacttcccagcctccagaaataaattttgattctttataaattacccagtttcaggtattctattgcaatcatcaggaaattaattaacacagcaaaatcgacatctagaatacaaaataatcccagcactttgggaggccgaggcaggcggattacctgagttcaggagtttgagaccagcctggccaacatggggaaaccctgtctctactaaaaatacaaaaattagccgggtgtggtggtacatgcctgtaatcccagctactcaggaggctgaggcaggagaatcgcttcaacccaggagatggaagttgcagagtgagccaagattgtgccactgcactccagcctgggcaatggagtaagactctgtctcaaaaaaaataataataatatacagtaattggagatgaaattaatttaagtgttctggtatatactatgtaagtatatgaagtataaataagtagagtgcagatgacaccaataacaatgacttcattgctattctgtctcagtgaagaaggggtcctgtaggtatgattaattattctcttaggtgtgtcttctcaatgccagcaaagctaggtgtgggtgaaaaaaataccacctagtcttttttgttaagtgactataaatatcatcagatccctgtgcttccctgtctctatccccagggattcaatgacatttatacacttggttcccaggtgagattttaattaataaactaatctcatgactgttagcaattataattagatattctgtcaagttcctaattctcacatcttcaagtcctgtaatttggtatgaaggcactgcgaatttggactttgagctaacaagatttagacaggatattggccttgatctgaggctgtaatggaatgagactttggggggcccttgagaagggattaatgtattttacatttgagagggacatgaattacaggtggccagagggctgaagaggtgagaaggaaagcagaattctaagatggcccccaggaatatctatcaccccctgttgtacataccttataaaattattttcctttaaatgtgggtggaacctaccgagaccagcttcgtcagggagaccctaacccagcagcgctagaggaattaaagacacacacacagaaatgtagaggtgtgaagtgggaaatcagggatctcacagccttcagagctgagagccctgaacagagatttactcacatatttattaatagcaaaccagtcattagcattgtttctatagatattaaattaactaaaagtattcctatgggaaacgaagggatgggctgaattaattgcagcaggaacatgctcttaagacatagattgctcatgcttttgtttgtggcttaagaatgcctttaagtggttttctgccttgggcaggccaggtgttccttgccctcattcccgtaaacccacaaccttccagcttgggcgttaaggccattatggacatgttacagtgctgcagagattttatttatggccagtttatggccataaactgggccataaatttggggccagtttatggccagattttggggggcttgctcccaatagtaaccagtaaatttaatggtatgatcactactgtgattgggttatgttttgactgcaattagccttatgaaaaggaaattattgtaggtgagcatgaactaattaggtgagcccttgaaagggactgaacttttcttgaagagggagattaaacatgagaaagactctgtattactgactttgaagatgtagagggccatgtggcaaggaactgagagtggtcactgggagctgatactgatccctggctgatagccggcttgaaaacatggacctcagtcatacgtggaaataaattctgtcaacaggcagtgagcttggaagaggactccatattcaaatgagaattataaggtcagcttgtgacttcagtcttgtgagatcctaagcagagagcccagttgagctttgcctagacttctgacctagaaaactgagataataaatgggtgttgttttaagctgcaaagtttctactaatttgttatgacagtggctagaaaattaatacaatatgctttgtttatttaaattttacatactgcaccataagcacctttgacataaacagaatgcttaaaattgatatacctttcacatattaattctttactttttcttagtatagtctaagaatactttcctgtacggtttctttctttgttttgttatttaaactcatctcaccactttttaataaaataaatatttactttttttttctatatttttgttgatggctttcatgaaacttcggttcttgtcttcttagtttaaaagaatttaaacaacagacacacagcaaaggagatacaacatagagcaatttcttgcaaaggagaaaggatactctgaaagttaggtgcagaatcaacagtacaccccaagagacaattcagggcaggttgcttgtgcgggtgagacagtgttgaatgttactggggaaactccctttatgggagtcttacatgattattcataagggggtgggaagatgtgttactagcaagcatgttctgggtggttcctcctcagttctgagttccttctcatttaaacttttaatctgcctcagtataatctctgtatgtgtgtatgtatgggctctttttactatcccactaactcactaattgacccaacactatttttagtaatttttcctattccactggattaaaagtttgctttattatgcactacattcttaatttatccaacataaatgcaggataacttgttctatccttgaaagcagtcccagtatgatgttctttagagaggccagagcaaatttccccatactccatttcaaatacttcaaattatattgcaacctcttgaaaaatatcaaattaggattgtatttctaacaccaagaaaaatgatttaaaattcttttaaaatagcttcttgtcctaaaaatctcaccataatttcctcatcactatgctgctttctctttcattccatattggtgtcatgacaatcaagtatatttcaaaaaacttgtttccggaccccttacatcccactgagttccattcctcattagctacagcccattaccctacaaatttggatagactccagaagagtagagtgggcccttatgtactttgaagaagtgaagaatataacctgtaacattgaaggcttcttagaaatatgtttgtctcccatcccaaaattttctcaaagggtttgcgacttcctagaaatgtaatacagtggtcctcccttatcgatggtttcactttccacagtttcagttactggtggtcaatcaatcacagtgtgaaaatataggtgtttagtacaataagatattttgagaagaggggagagagaaagagacagagaaagagagagagagatctcatttacataacttttattacagtatattgttataattgttctattttattattagttattgttgttaacctatgactgcacaatttgtaaattaaactatatcatatgtttgtatgtgtagaaaaacatagcatatacagagtttggtacatgccttcaggcatcctttggggtgccttgcaacatatctcccatggataagagggggctattgtaaacaaaattttcaatttcattaattgtggcataaattaggttctgtttatgtgcagccaatatcattccacagttgtcctttttttggggcactatgaacatgttttaattgtttagctttataatcatttgtaaacatctattagagtacctctccttatttttatcaatagttgtttttgtataccgctcttgaaagttagaaacattttgttaataaaactgtcttattactatttagattaaagcatcaccaaatccatgtattttgtctggaaaagtgacacaaattgccctgtccaagaaagtggtatcattgtttactaaacttctttctgtccttaagtaaatttctattcttttctgtggattgcacacatgactgctttgatattttgtatatttattgctcttttcaataattttttttctggaatggattcattgacctaatctgccagagagaattaatgaggccccacatcttctcattagttggagaagaaagtatttaatggtttaacttgaacgtgacttttgtgaatcttttttttttttttttttaaagcagaatcctgtatttggttacattctggtctagtgaccacttccttcaggtaaagcaagcttccctgtctggaacagccaggcatgtgataaaaaatttcctttgtggtcacttagttattattcctcttgtcttgagtgtctgggctgctattttcatgtatttacatccaaatgaagtctttctttccaactttttatagtatgttttgattcacaaaatattttagccttatctacaatataataatttctcacaaatgcaaagaatataggtttgtacagttttgaagtaatattggcaaaagagtatgaagcagagtgcccatatttaaatataactttcaacatgttagtctttctataggtgttttcaggataataaaaattaatttgattgatatagacttgggggcaatatatgagaaacaggctctgctctaaaggataggatgagaggtgggcagggaggatttgtatggtttgaattccaggcacacacgctaactgctaatttggcatcatccaccaggttgaatattttcatgaaattctgtcttacatctctgctaatcctaaaacaaagaatgaggatcatttcaggtgagtctaagtcaggagaaactattaaaattgttatattcttcatttaatttttttctatgattattttttcttctttttatactaattagaataggccaaactgctgcaacaaatagactaaaatgtgtattgtggctgaaatatagtagaagtttataactcactaatgtagcagaaggaggatattgaagatttgtgagtcacttttctccaggtggtgattcagaattccaagctcccatagtccaatatggtgcctttcattttttttcctgagaaaattaacacattttaatttttcctcaagaagggaggtacaagagtgatcaattgtgatctagaagattaaggcaagaaagttagtgaaatttgctacagtgtctactattatagttgtcattatgactgtaactaatatttgtttccctccttcacaagccattcttgattcccctcatcctctgaatttagtctagtttgtttttctgttttggtgacagagacaactattccagaagggtctatgttactatttactctgttcttgaattatgattgttttagtgtctactgacagacatgaccatgcatagaagcactaaaagactattgtattttcatctgggatagtagtctctgtcactaaaccagaagaacaacctagtttttagacctgttcaagcttggttccaaaggaaccacttctgctgcagatggattgtggttggtatccccaaacttacgactccatggatttatagctcttcgcatcatatggtcaatttaaggcacatggtcagtgtgctaagtgcctatcaggaagaaatgaacacttggtcatagttttagaactatgaaaggaaattaaatcttgggactccaactcattaagcctaagggaaaagttaatctgggaacggggttgcgaaaacccgcctccccctttttggttcctaaataagatggctacaaaatgaaaagctacatgcctccctcatattttgtccacaaggaaagtccttgtgagctgcaagatctttactctaaggtgtttctgttaaaattttaccatggcaatgtaaattggtagcttatctttacaggtgtagtcacgcccctgcccagaagacacaaatgcatatcttttttttttttctttttttttttttgagacggagtctcgctttgtcatgctggctggagtgcagtggcgcgatcttggctcactgcaacctccacctcccgggttcaagtgattctcctgcctcagcctcccaagtagctgagattacaggcatctgccaccatgcctggctaattttttttttttgtacttttagtagagacagggtttcaccatgttggccaggcctgtttcaaactcctgaccccaagtgatctgcctgcctcagcatccccaaatgctaggattacaggcatgagccaccgcgcccggccacaaacgcatatctaattgttccccttcccccgttttgtctatgtcatcttatgtaaaaaaaatgcagattaactgagccagacaaaggcatgaatgactatttttccttaccctcctcttacatgaaaattgtgtacttctcaatatccctaccctttccccttaaatttagagccctcaaaattatcttcggagaaaggtatagacctgtctcctgggtgcttattcttaactttggcaaataaacctcctaaaatgattgagacttgccatttttctcgattgacagaacacatgagttcatgcaaagttactgttggagaagttttcctgtggttgttttttggaacatgtaatatgaatgaagtgatcaagagtttgagctgtgacttacactttaggctataatagagtaattggtgcggttaagacttcatctctcctgggcagctttcttgagctttaggagactgactcacaatggagctgaggcttcttctgtcccttgctactgatctgtaagtaataaaactgcttcacataatttgtgtgtgagtgtgttctgtttcaccagactcagataaacaggtagccagtgcatggtggacataaacagtagctcagaatgcagtgggaagaagtatctggacctcttttcctggtggttggcatagtgatgatcttttctattctccatgcagtggaagtcctccctttcctcccttggtattggtaattagtaaacctgcttcataaactgtgattaatatactaaaatctctaatggaaaaggtagacaacatgcaagattagacagtttcagcagagatatgaaagctttaaggatgaatgaaatggaaataaaataaaaataaattaacaaaaataaagaatgcatttgacaagctcatcagcaaatgtggtacagccctgggaagaatcagtgagtttgaaatagatcaataaaaattacccagagtgaaacacaaagagagaaagagagtaaaagtacattaaaaaaataagcctggcacaatgtttcacatctgtaatctcagcactttgggaggctgaggtgggaggaatgcttgaacctaaagagcagcctgggcaacataaggagaccttgtctacaaagagagaaaaattaagtgggcaagcatggtgctggtattcccagctactcaagaggctaagacgggaggactgcctgagttgggggcgagggtgggggatgaagtgagctgtgatcgcaccactgcattccagcctgggcaacagagtgacaccctgtctcaaaacaaacaaacaaacaaacaaacaaacaaaggtgatgtaaccattcaatacagcactgcagctcttggatgctctgttttgtttttcccctgctcttcttttctctttgtatttcacattgggtaatttttattaggtatcttattgaattagtttgttaaaagataaacacattatttcggttggctttgcttttttaacattatattttgaaataattgtagattcaaagggagttaccaagatagaacaaaaagattctgtatagccttcatccagttttccccaattgtaacatcttacataactaaagtgcaatatcaaaaccaggaaattatcctgacatatatagtcaaacgattttcaacaggagtgccagggccattaaatgcggaaaggacagccttttcaacaatggtgctgggaaaactggaagtccacatacaaaagaatgaaactggactcttaccctacattatagacaaaatgaactcaaaatgaatcaaagacctaaatgtgaaaactaaaaccataaaactcttagaaaaaaaatagggaaaatcttcatgatatttgattaggcaatgatttcttggatataacaccgagggcataggcaagaaatgaaaaaaatatatataaattggactccatcaaaatttacaacttctaattgaggcatggaaaactaaataccatatgttttgatttgtaagtaggagctaagtgggtactaagctatgggtactcaaaggcatacagaatggtataaaggacaatggagagtaagaaattggggaggatgggaaggagggtgaaggataaaaaactacatattgagtacaatgcacactactcaggtaacaggttcactaaaattccaggcttcaccactatacaattcatccatataacaaaaaaccacttgtaacctaaaagctattgaattaaattatattaaaattaaaaaattattattgagcatctactatgtgttcaaactattttagatgctatatatttgccacttcatttaatccttggcattactctatggaatagataatattctcattttgcagttaaagaaactcatactcagagagattaacttggatttatgagcaatgttgacattataaagtagaggcaggaagaccagttaggatgcttttgcagaaattaacttgagtggaattgtcggtctgtgagaatagaaaatgaatcttttgggaagattctacaatgttattgtttttgcataagtgactttttcctctactccctcttttcacatgtaaaatgtagatttactgaggctaatcagactcacaagaatgtaaccacttgtgtcattgcctaccttccctccttttttttttttttttcctctctctttcccttcctgcttactctttctttttaaacattgaagttctcaaaaccctctttggaataagcattgatcacagatgctcctgtgattcgtgtttttcccaggtgcatcctgaaccttggcaaaataaacctctaattgattgagacctgcctcagtcacttttcggcttacaccaggatttctttctttttaaagcctgaatagaattccattgtgtatacatacattatctttacccattcatctgctgaatgacacaggttgatttcataccttgactattgtgcataatgctgcaatgaacatgggagtgtggatatattttcaacctactgatttaaaatcctttgtctgtatcctggaagtgggattgctacatcatatggcagttctattttaactttttgaagaaccttcataatgttttccctagtggccatactaatttacattcccaccaacagtgtgcaaatgttcccttatctccacgtccttgttaacacttgttattttttgtctttttgataatagtcatcctgaaaagcatggattgatatgtcattgaggtttaaattgaatatcttaagttttcctatttgaggatatgagtagtccccccaaaatattactactaatgttgcttttttgcatgaaccatgaccttgagctgagctggacacttgaattcttgagtacttggacatgagcttaaataggactgaaatattttttacatacctgaatattagttcttctctctactggtaagaacttgtagaagaagacattataaagatctcatagaaagatatttaaggtttgtctgggaatgaaggcacatgatgactacaaatctagaagctggggaagagttgtctctggaaatatcccaggcattactagggaaccagaagtagagacgaacagatatgttgcaaagagtgacatgtgtaggttagctctgggtgatgaaatcgtcagtggtccagctgaggtgatgcatggatgagattgactggaagaagaaacctgtagaaacagatcaggaaacaaagctccgttgtacacacgtccatagcaggcagcctgggttttcatcccagtcttcttctgttttcaagggccatttccatactgcatgagaagccatgagactggtgggctctggactcctgtgccagagatcactcaccttccccatttcccccaagtgtcccaaatgccttgtatcatctgattttctatcttcctgctaaagcttttcccatactcctagtccttcaccctgcggtatcctccaagtccttacctgacttccactatggagtctccccatggttacttgcttgaaggaggcactgtttgagcacagcctctgaatgctacagactctctcttcagattttctaaattgtcattttaaagagataactgtttaaagagaaaaggcctaccttatatgtgtcatgaaaaattcatgtaaccggttacctaaaagttgatataagagaaatatgtaagtagcttcacaaggttttgaaaaatttggagataattacttgataaatttttattaaaggaaaatgatattctggggctgtatttctgttaccactggcattaaggaggccacagaacctttctgactctacagtgtttcttgattctggaagtaattgcaggacagagtcctggataacccttctggtgacaggatgactcctgtgtttacattcaactgcactgaccaagcacagattctaagagatgctgaccagggaagatgatttctcccttgattccacaaagaaggagtccacaacctttttctgccctgaaagaagagacaatgtgccctggggagtctccctagtgtaaccttgacccgtaataacagcagtgtctttatcccatcttcccacatggggtgtgtgtggtctcatcctaagcgctctgtccccatcagaggccgggcaggtgatttgggtgaggcattcagaatcaggatgcttgtctgagttgccttcctctggccaggccaatagtggctgccctgagtaatggagcagggataggaacattgcaaagaactgtagagaaggctggatcagggggacacaactggcagaagccccaaaccaaagccttttagattaggtgttttttttttgttgttgttttgttttgagacagagttttgttcttgtcccccaggctggagtgcaatggagtgcaatggtgcgaactcagctcactgcaacctctgcctcctgggttcaagcgattcgcctgcctcagcctactgagtaattgagattacaggcatgcaccaccacactcggctaattttttttatttttggtagagacgggtttcaccatgttggccaggctggtctcaaattcctgacctcaagtgatctgcctgccttggcctcctgaagcgctagaaaattacaggggtgagccactgcgcctggcctcagatgaggttttagccagtcagaaaatggctctaagctgacactttcgttgctagttgaaaagtctgtgtggccaggtgtggtggctcacacctataatcccagtgctttgggaggccgaggtgggaggattgcttgaggccaggacattgaaaccaacctgggcaacatagcaaaaccctatttctataaaaatttttttaaaaattagacagaatggcggtgtgtgcctgtactcccagctacttgggaggctcagacaggaggatcacttgagcctaagaggttgaggctgcagtgtgccatgatcatgccagtgtactccagcctaggtgatagagccagaccctgtccctaaaaaagaaaagaaaagaaaaaaggaaaataaaaaaaaaggaaaagaaaagaaaaaagtctgtttgaagaggcccatgagactggggagtccctaggtttgacgtagactttgcctcacagccccagaataaacctgagggaagtttctccctttgaacaggaagaaggggtgggccagaggcctctattccgagggacgctgaggtggggactgagaggacattgagggcatcttcaggtccctctctgcctattctttcttgcccccagttccgttctaggtctgagtttgatgttcctcctttatgcttccatcgcaccagtggagaccctccttagactgggggttaccctgatcctgagtacaccactgctgctagaagcccagtaacaacgttcccagtctcaggtgatctaaatctatgcacagaataatacagaatattagagtggctcaatgctttcatgtgccactattgcaaacctcttgctaccgtctcttccctgtttctttttacctggtaaacatattctgcttttagatgctctctatcttctactttactaatatacagggaagagtgggaggaagggagacaagaagagaggtggagatatttattgtcttggttaggattaccagtaatgtttgtcaggcattgttttaattgctttataaccattagtactatccctagccatgggcaacgtaagcctgataagtaagaaatttatttataaaaacacattggtacctctgccattttggatttgatgtttagggctggcccaatatgacctgtaactctaaacatttgctccatcattaatacgattcagcccccaggaaattcttcttcacagcttttgttctctatcttcaaaactaaatgtgactgtgtctgaatactgtaaaatttgtgtattgtgcctttgctcatatcagatgcacctgtttcatggttcagggaggatttaagcagctgaagaacttacaagagaaaagtcaacaaatactttcactcgaagagcatgaatgcaataccttcttgcataataaagaatcacttgccagtagggctgggtgtcaacttttttttttcttgttcctcctattagcttgatagttacacataacagtggaggaggcttttgtaatattaaactagtcatattaatgttaaatttgtatatgtgaagatctagatgtaaaatgcataaaacatgatccacattttgcaaagagaagcctgggggtgaaaaggagttcagtaatttgttgactctcataaagcacattagtggtagaactgcaactcaccatcatttccttctaagaactttgctcttctcaccaaaacttaaggctcctcagagtgtctaatagaagtgaacatttctgtgacaattttctgttccctgaaatatgatcctcacttaatttgccctactaaaactcccaagtataagaacaataggttgtaagatgtctactcttgaatcacatttgtcttttgcttcttaaaacccctaagccattcaatcttcagctattcagaaatcttcacctcaaatgttcatctagtgcaatttgaagaagaaacagtgccaggcattggagtgagaatcttcacagaaaaatgtctgcccagaggcagatgaggtccttcagctccagtgctgattggttcctttcctagggactccccaatcctaccacacatggaaacatccagaggtttttattctttccggcaggtacataagatccattaggtttgagctgtgttgactaccactgctttttccttggtctcacttatgtcttggaagatggctctgcagatccctggaggcttttgggcagcagctgtgaccgtgatgctggtgatgctgagcaccccagtggctgaggccagagactttcccagtaagtgcagggcagctgctctcgagagccaccactgtgggaacaggctctccttgggttggagtatgggggatggtgatctccatgatctcagaacacagtcttttatcaccatttattctttttgggaaatagagctatgttgcatttttatttccaccttataatgggtgaggtgaggataatccaaccccaatcccacaggtttaagcctgaaggaggagagaggaaagaggagacaaagtgtgcattcactacctgtgacaggacaaaatgaccatggcactccacggttatgcatttccccaaagatatgcatttccccaaagacacagtaggatttttctgcactgggaaaatgtaaggcagcaatggtgtctgtagtctctgtattggaggtaaaggagtctatactactgactcgagtggagagtttgtggaggcaaactcttagtactgagggaaggtgactggatgaccacagacagggagtcttactttgggtttcactgatttatgggcaaaaggtgacttgagtgggattcagggacctgagttgatggtggactgaatttagtatgataggaaggaggaagtaaagaagggaaataatacatattgagaaaccactccattcagacacaggacagtactttctataaatcctctctcactcctcctaacatcctatgtgtaggtatcatgattttccttttatgtaattatacttgtgatatggatattctgttaagtaacctgcccaagctggtgattgactcagtttaattggaccctatagaattcaaaagcttgggctctttccatgaataaatgtttccttctaggactccggaggtgtaggtcctttctaacacagaagtgagtgaacctcacagggcacttgggcgggtatagcagaaagagagtaaatccaggcatgggtttacttggtctcttgcccagggaccaagagaatacttacatcaggatgagaacaagcttaattcctgaacctttctcgttattcccttgaactctcaaatttatgtggataactctgtctctgagattcccaagagctccatggaaaatgggatttcatacgagaacgccctgatctaagagcagaggtcaatgtcgaatcggtccgactgccctcttcacttggttcacaggctcaggcagggactgggctttccctcttacctccctaaaggaaggcagattcccgaggccctcagagagggcgggcagggctggggcagagatgtctcgaggatcccaggtccggagcacgaggcacgggcccagccaagaactcaatttcgcgtggacgggtttcgcagctgctggccgggtcagggcagcggctgaagggtgcggtccggctgggggctggggctagggccgtgctggggcctgactgacccgccgtgattctccgcagaggatttcttggtccagtttaagggcatgtgctacttcaccaacgggacagagcgcgtgcgcggtgtggccagatacatctataaccgcgaggagtacgggcgcttcgacagcgacgttggggagttccaggcggtgaccgagctggggcggagcatcgaggactggaacaactataaggacttcttggagcaggagcgggccgcggtggacaaggtgtgcagacacaactacgaggcggagctgcgcacgaccttgcagcggcaaggtgagcgtcgtcgtccttccgcggggctcacccttggccggggcccgagtctcttgcgcacggaggggcgaggacggcgcggcctcaaggaccgagccctgacccatcccagggtacaggaaggtagcggggatttggaggctggggtagtatcggaggggcggggatctagggcagagcagggggatgcacaaaagcatcccttagttccctgcagggttgggttaggctgcccagtgtgtccccagcctccccgtccatcggccttgtcctctgctctgcatgttcttgccttgtgccttatgcgtttgcctcctcgtgccttaccttcgctaagcagttctttctgcccgaatgcccgccctcttcccctgcccgtccgccccactagcactgccccacccagcaaggcccacttgcacagctcgcgccgcaggaagcttcaggcttggcctggtggagttagggctgctccacaactgcgcgcagggcatccagcaattacagttgtgaaataagatattttaacttttggcttcaaattattattcatcgtaattctgttttcttaaacggctctcattcatggcggagctctttgaggtgagagtgttttaatcattgcatgcctagtacctgactcgtggaccggcatgtggtatgagctcaatgatcttctgttaaattaatgaataaatgtactcagctgcccatccacttaggctcaagggaaagcagaggataaatagagccttaaagatggactttatcaattattttctattattttgcttaatgctgtaaactcttattgacttggatcttagtaaggtttgtgaatgcagtctggggaaaaaggtgtttgctgaaaataaaaacaacgcttgaatggtgttataaggcagttttaatttcttagaaaagctgaacaaatggcacaatgaaaagagcagaagctttggaatacatagattgaagccactaaattattgaataaaaatagtttcaggttgcttttggagtagattttctccctccccccatcactatccacttcgggcataaacattctgaacgtcaattttacccacttagtgagcacttatttctagacaattgccttagcaaacaccatctaagttatgtcatttaatagcacagttacctgtgcattagagattagcattgccactttatatatcgtaatattggtacatgataaacactttaagtaatcaacccacagttatgcactaggacctgaagcctcccccaaatacacagcattcttttatgttcttcaatactcgtctacacagcctaagggaagtaaagccttgttaaagccaattttgacaagaagcagcaatgggtctattcctgcctgttttcactgttaatgggacaaaatgatactttcaaggcattgaaaattcactgattaatcaatccctagtctgaccccagtgttatctatgcaggttcacaaaacttccttgccttcttctgacccacatcctaatgctgtcaattatttatatttttgccatttcaagtctatttctataaaagttattctatcatttttctcatgaatttgtgccctctatttttactttcagtcttttaagatgaacaaatcttgtaagtccccacatagctgactgttatttcagtcagactccaggaaggagggcctaaagaaaagttcaagtccaagcagaaaccaagattccttccagacaatggctcatgagtgccatttaattggggtgctacctgctgacctcagcaaatcccagctatatgtatatgtttgcattacaggcacattcacccaggccaacctctgcatggatctcagaatatttcctatggagaacgtacatgataatgtctgatttcagaacaagaaagtaattctcaatagcaaggggatggagtagggtaggcagctagtaattacactatcttgagggttaaaaggaaattaagaaaaagcaggaaaatgagagaacatattaccaagtaaataaagcatacattaaatatttactataattttacactaaagaaataaaggaaatgcagtaaaatggccagagaggtaaaggttaagatgtataaaatatgcagggaaaggtgtgtcatttttgaccatgagcagcgctctgagaagataaaggaattgagttatgggcaaacatgatgtttgatcagtgttagtttttttcaaggcctgcctacttttccttcaaatattacaaacttttgaaataacattcaattttttggtctctgttactagattgcaagttctataaaggcaggaaccagggtttgttgtttatttttggattctcagtgattgtcaaatttatatttgttgaaggaaccttaatccaagacttggactccaggtatctttctattctggttccaaggagggaccttcctcacagcaggcgtgctgtgtggtctcacatctcactcctatatctttccctgtctgttactgccctcagtggagcccacagtgaccatctccccatccaggacagaggccctcaaccaccacaacctgctggtctgctcagtgacagatttctatccagcccagatcaaagtccggtggtttcggaatgaccaggaggagacagccggtgttgtgtccacctccctcattaggaatggtgactggaccttccagattctggtgatgctggaaataactccccagcgtggagacatctacacctgccaagtggagcaccccagcctccagagccccatcaccgtggagtggcgtaaggggaaactggtttccttttactgtgggccccacaagacaaagggcagagctcccgctgatccttcccatcccatctcttgtccctgacatcactactgagctgggaatcacaggagactagagcacctgttgcccatggcaagcacatcagatgaatcctgatctctttgtctttccagatactagggagatcactttccacatttgtgttagtccattcttgtactgctacaaagaaatctctgagactgagtaatttataaagaaaagaggtttaattggctcttctcactccactataaagaaatacctgagaatgggtaatttataaagagaagaggtttaattggcttatgattctgaggctgtaggggaagcatagtggcttctgcttatggggagacatatggaagctcctaatcatggcagaaggaaaagagggagtgaggtgtctcacagggcaggggcaggagcatgagagagagggggttggtgctacgcagttttacataaccagatctatgagaactcactattgtaatgacagtactaagggagatggtgacaagaatctggtctaatgatccagtcacctcccaccaggctctacctccaacattgttaattacaattgaacatgaaatttgggtggggccacagaatcaaaccatatcaacactactaaagccccagaaccagctctgacagctatgagagactgacttagggctggtgactggggccttagggtttaaggttatggatgaagtcctgaggggcaggggtgtgcttcttcctctccctcacccacctattgtgtccaagacctactggctggtctttctcttccctagggtggtcagactggagaactagtgtcccctgacatctccacctcctgtaccaaggacattatggggtgtggggacaaacactcacactcagttctgctccttaggggctcagtctgaatctgcccagagcaagatgctgagtggcattggaggcttcgtgctggggctgatcttcctcgggctgggccttatcatccgtcacaggggtcagaaaggtgaggaaccccaagggaaaatggggaagatgagctgtgacccagaccctctattcagagaggttctgtctctagatgtagctctttcctccttaccctgagaggaagtgcgaggagacaggacaagattggaggaggcattggaatctgattttactgggtgaatggtagcgctgccagagctgactgatagagcttattccagggcgtccttaccgttcatcatcgtctcactggctcctttctaaaagcttcctccattatgagggtcagagcctcggcctccttgtcttctagtgacaatttcctttgttttgggggattttaacttagggtgcttaaggacttaaagaacatgggagggaagaggatataaccccaattaaactacatgtgtcattttcctttggggtaagatagtggttgtttgtttaacaagacctttctctgtataacttccttttgtaggacctcgagggcctccaccagcaggtaatatttcagccatgatccagtcaggggagagggcacaggcataagagggaagagccatggtgaaaccgcatctctactaaaaatacaaaaattagctggacgtggtggtgtgcatctgtaatcccggctacttgggaggttgaggcaagagaatcacttgaacccaggaggcagaggttgcagtgagccaagatgggccactgcactccagtctgggcgatagagctagagttgtctcaaaaaaaaaaaagaagagcatgagcgtagtgttccagggcacagtggtctctgttcatggcctgtttgctgctatgagggttaagacttaggggaaaagtttgccagtttctacgaatctccagagattgtttcctagaaccaggccttaactttggtggcatctttttgtgaaatgtggggacagagccacatcttgaatgtgagatagtagggtgatgcccactttgtgccacattttgttagctactgcctgtaggcattttcagtgactaaaagaggctgctagtggtggagatgaagtgtcacccaatttactaaaaaaatcaaactcttcatattacccagaagggtaactgctgttcccccacctccacatatctgcatcaagctgaagttctgtgtcctcatgagctgattttacctttacacagatattggggaacgtgatgatgatatgccctagacctcagcatcctctgtttgatgctacagagggaactgaggactaggggagagggtgtgtcctcagggtaccctgtgctgatcatgcctcgtctctcttctccaggactcctgcactgactcctgaggacttttgtctgggattggtcatcactcttctgtaatgcccacctgcccctgcccagaattcctagctgcctgtgtcaccctgtcccactgaggtcagagtcctacagtggctcatgcagccacaggtcaccttctgtgatccccatcccaaggcactggtggtgactctgcttcctgcactgacccagagcctctgcctgtgcactgcaagctgtgtctactcaggccccaaggggactctctgtttccattctccccccacagacctgtcaagagaagcatgacaaacaaaatcatttaccgactttagtgcttttttccataattaaaccgat

SEQ ID NO: 59858 - DNA, 574 bp, Homo Sapiens
tttttttttttttttttaatctctaaagcagctttcttttactgggagaagagatcagtatcatgtcctatactttccaaagacctctagtattcttattcaatgaatatttttaaagccagaattctgactgagaatgtgctttaagctagatttttataagaataagattttgtggtgatttttaaatgactggaaattgcataattttcaggattataactgtgtatatttccctcatgtaaatattaagattccttagtctcctggagaagtcttaactttgtctctacttttagaataaagtcaaggatttattaactgcactgcaactaaaatattaaacagaagggcctttcacacacagattcagcgttaaaaagcctcaaatcaaaacaaatggagaaattggctttaaagccagaaagaatcaattgtttttgggtcagttttggtttggggagcctaatgaagactgattgctcaacaagggctgtgattagtgcactgtcagtcattgctaatcactacagtacctcacattgcctgtcctgaatcaagacacctttgcctg

SEQ ID NO: 59859 - DNA, 488 bp, Homo Sapiens
tgcggccgcgcctttgttcgagaggagggctgggcgccgcctctgctgctcgcggggtggtaaacagcggcgcagccccttcagacgccggagactggtccgactctgcaacctggcgggcctgctggggtccccagacccggaacatacacattagaaaatggaaagccgtgactcgctctcagaggctgcaaggggcacggtagcagtggactcaaccattccctgtatttaaaaaatatccaagtagtatcttgttaaagaaactccactgcctgactgagtctcagaatcaaagaaagaacatgaatgctgctctgtgagtaaaaagtagaaaacacctgtggagtgggaaggcagtagcccagacacgttcctggtgcgcagccatggatttggagtagaactgctattgctccccatcagtaatgaaccacgtgcactgctcacaatcccgagtttactttaggcagggctgacagacgaag

SEQ ID NO: 59860 - DNA, 1974 bp, Homo Sapiens
aaagtgaatagaattgttttcttactcaaaacactgtttaacatgacacttggctcctttctttgcatctctgagctcttgtaagatttgagaaacaattacattcaagggcagtatgcttaacctactgacatttgaactacaaagcaaagatgttcagattttcctgaaggatcaagtctttcaggccacagaattttctgtcctagttttttaatacagtagtccccccatatctgcaattttcctttccacattcaattacgcatggtcagctgtagtctaaaaatattaaatggaaaattccagaaataaacaattcataagttttaaattacacactattctgagtagcatccatgatgtgaattcttgctttgtgcggcatattcatgcttaaattctccccacccattagtcacttagtagccatctcagttgtcacggactgtcactgtatctcagtgcttgttttcaagtaacctttatcttactaatggccccaaagcacaagtgtaatgatgctagcaattcagatatgccagagaagctgtaaagtgctttcttaaagcgaaaaggtaaaagttattaatttaagcaagggaataaaaatcatatgctaaggttgctaagatcgagggtgagaatgactcttcctgctgtacaagatgatcatccccagagcacatagccgtcagactttccaaggtcaatacaaaagaaagaatcttaaagacagctagagaaagggtcatataactcatcatgctaacagcagacttctcagcagaaactttacaagtcagaagagattgggggactgtttttagcattcttaaagaaaagaaaagaaatcctggctgggcacggcggctcacacctgtaatcccagcactttgggaggccaaggtaggcagattgcttgaactcaggagtttgagaccagtctgggcaacatgatgaaaccctgttcctacaaaaaatacaacaattagctagctgggtgtggtggtgtgcgcctgtagtcccagccactccggaggctgaggcaagagaatcgctttagtctgggaggcagaggttgcagtgatctgacatctcaccacggtattccaccttgggcaacagaacaagaccctgtttaaaacaaaaacaaacaaaaaaacaggccaggcgcggtggctcacacctgtaatcctagcactttgggaggctgaggtgagtggatcacctgaggtcaggagttcgagaccagcctggccaacatggtgaaaccccatctccactaaaaatacaaaaattagccgggcgtggtggcaggtgcctataatctcagctactcaggaggctgaggcaggagtattgctggaacccaggaggcagaggtttcagtgagccgagattgcaccattgcactccagcctgggcaacaacagcaagactctgtctcaaaacaaaaaaacaaaaaccaaaaaaccatagtgagacccagtctctttaagaaaaaaaataaaaaagaaaaatcctaaccaagaattccatatcctgccaaactaagctacatgagcaaagaagaaataaaatctttcccagacaagcaactgctaaaagaatttgttatcaccagactggccctacaagagagtcttgagagttctaaacatggaaatgaaagaatggtgacacctgctaccacaaaaatacacataagcacatagcccacagaccctgtaaagcaactacacaatccaaactacagagcaaccagctaatgacaccatgttaggaataaagcctcatgtctcaatattaaccttgaatgtaaacaacctaaacaccccacctaaaagacttggagtggcaaattggattaaaaacaagacccagccttctgctgtcttcaagagacctctctcacatgtaacaggactcataggttcaaagtaaagggatagggaaaaaaatctatcacac

SEQ ID NO: 59861 - DNA, 2098 bp, Homo Sapiens
taaaaaatgtcatcacttgccaagcctggtggctcatgcctgtaatcccagcactttgtgaggctgaggcaggaggattacttgagtccaaaagattgaagctgcagtgagctgtgattgggccactgccctctagcctgggcaacagagcaagaccctattcaacaataacaaaaaaaggaattaggtgatgggaaatgcctaccatttgaatctataaagataagcaaggcagggtgcagtggctcacgcctataatgccaacattttgggaggctgagacaggaggatcgcttgagctccagagttcaagaccagcctgggcaacatagtgagatctagtctctacaaaaataaacaaatttagctgggtgtggtggtgcgtgcctgtagtctcagctacatgggaggctgaggtgggaggattgagtgagctcaggaggttgagactgcaatgagccatgattacgccactgcactgcggcctaggtgacagcaaaacctgtctcaaaaaagagagagagagagataagcaagagttactcatgatgcttggacttgggggaagatgccaactctggcacatgtcagttactacataaaaagtcaagtgcaatgtcaaatccagagcatcaagaggaaaaaaagttcagttcccaagagaacatggatagcttaataatgtaaaacttggccgggcagggtggctcacgcctgtaatcccagctactagggaggctggggccaggctggtcttgcacacctgacctcaggcgatctgcctgcctccacctcccaaagtgctgggattgcaggcttgagccaccgtgcccagccctatgaattatttcaaatgcgttagatccacctaatcaaaattctgtcattcaacatataattttgagtgccaactatgtctcaaggtcagtgttcagccctacagtaaacaacatgaacagagctgctgccttcacagaacctccatctaaggagcaggtgaatataccaccaggccgtaattggttgcttagctccaaaatagcgaatttagggtcaattaagataataatctactaactgtaatgacatctctagagtattgtgtcttttaaagtacagttatagcctgggcaacgtggggaaaccccgtctctacaaaaaaaaaaattttttttctttgagacagtcttattttttcacccaggctggagtgcagtggggcgatctcagctcactgcaacctcaaactcccgggttcaagcaattctcatgtctcagcctcctgagtagctgggattacaggcgtacaccaccacgcatggctaatttttgcaattttagtaaagacgggattttgccatgttggccaggctggtctcgaactcctggcctcaagtgatctgcctgccttggcctcccatagtgctgggattacaggtgtgagccaccgcacctgacccctcctgtctctcttaacacacattgcctccttatagaggttcaggcaccatgctgagcctgggaggtaatacaaaaatgaatgagtggaccttgtgggttccatgctagttaaagacaccctatgagaccagcctggccaacatggtgaaaccttgtgtctactaaaaatacagaaaatagccgggcatggtggtgtgtgcctgtaattccagctactggggatgctgaggcaggagaatcgcttgaacccaggaggtggaggttgcagtgagctgagatcacaccactgcactccagcttgggcgatagagtgagactccatctcagaaaaaaaagacaccccgggccaggcaaggtgggtcacacctgtaatcccagcactttggggaacaaggtgggagaatcacttgagtccggcagtttgagaccagcctggccaacataatgagaccgcatcttcacaaaaaatatgttttaaaaagctgggcatggtgaagtgtgcctgtggtcccagctacttgggaggctgaagtgggagtattgcctgagcccaggagttcgaggctgcaggctgcagtgaactgtgatcacaccactgcactccagtgtgggtgacagagggagaccctgactcatt

SEQ ID NO: 59862 - DNA, 508 bp, Homo Sapiens
ttcatgtatctgtggtttccaaatctatattcctaaattccaactcactcctagattccacttttaaatttccagcagccttacagacatcttcacacagatatccccctgggtacctcaaagttgacatgtccttaaccatatgatcttcccaccgtattcctacatgcttaatgacaccagtattcaggctgttagccattccagaaacctcagagccccttagaatccccctatcgccttccctttaccacagtctgacctgttctatagtctccatatctctcagtggccgccccttttcggtctcctcctaggccttattcaaagccccactgatctcttgcctgggatagtaaattgcatgataacttatctataggactgagcttctcattccatcttatccactgctttacaatagtaattccagttgagtcacaaacccttgaggatagtaatttcaattgagttgagcagagtagaattatgggagaatttccctttg

SEQ ID NO: 59863 - DNA, 557 bp, Homo Sapiens
  misc_feature (425)..(425): n is a, c, g, or t
  misc_feature (451)..(451): n is a, c, g, or t
  misc_feature (470)..(470): n is a, c, g, or t
  misc_feature (494)..(494): n is a, c, g, or t
aagagacagcctagctctgtcacccaggccgagtgcagtgttgtgatcacagcgcactacaacctcaaaatccgggacttaagtgatcctcctgcctcagcttgccaaactgctaggattattgaggtgatcggctgcactcaactccatttttttcatcagcctttttgtcaaggactgatgagccctgccttctggaaacattcttgataatcatgacattaattttctgattcccctctaacctctgaactcccctctcacttttctaaagcgctttcttttcctgctaatctgtcagggcccagaaacaaatcaacaggagttcccattggagtggtatgaaaagagagatgcatttcagggaagggtttagatacgtgaggtccatagtggctttactaagcattaatgggtggtgaaanggagaaagcaaagtcacaatccgatncaaatctagaagaaaatcntagttggtggattaacaagttgtnggcccttgcaatgtacccggaaaataatgccttacttccaaagcatggctttcaaacctactt

SEQ ID NO: 59864 - DNA, 568 bp, Homo Sapiens
  misc_feature (522)..(522): n is a, c, g, or t
  misc_feature (554)..(554): n is a, c, g, or t
gtagagacagggtctcactatgttgcccaggctggtcctgaactcctgggcttcagtgatcctccctccttggcctcccaaagtgctgggattataggcatgagccactgtgcccagccctcataaagttataatatggtagcctagggctggtactcaatatgctgtgcctcgcagtataatatttttacacactcaagcttgttagcttttcagacgactttgggtttatagtttttaaatgtctgccagtaaatcagtcaaatgcaaatgctaaagactgcttcttccaatatatcattaaactcatgaagacataaaaatgatctattcctgctgtcaatataaaatatagaaatcttagacctaaaagttctgcatatactttcaataaaagtagaaataacagaagttactgagtttgattaagagatgactccaaaacctttaacttctgaagggatcatctacagcattggttttaaaactagaaaataagaccaacaaaaatatccaaatacnggttggtgaaaaactatgccatctatcaattngaattcaaaaatcc

SEQ ID NO: 59865 - DNA, 1654 bp, Homo Sapiens
caaacaaaaaaaaagcattctaaatccttcataaatattgtggttaatataatatattaaacatttagattttaaagcacaaatgcttgttaagtaaacatattcaattatatcatttctagaaatattccagatctaattctagaagagttctgtccaatagaactttctgtggtaatggaaatgttctgtatgtgtgctgttcaatatggtaaccacatttgctgttgagcacttgaaatttgggtggtataatagaggaactgaatttttaatttaattttaattaacttaaatatccaagtgtggctagtggctacctaactgaattgcacagttctagaacataattgtcatggtgtgaacatagtctgctataacaacccactctccacaaataattacaaaattgtatttctttggtaagatttggtgtagccctcacagttcaatattgtgtcctttggctaaaagcaaggtacaatgcacatgccgaaagaccttagttttggatgtgatgaaatgttttctatgcctggaataaatgccttcctttgggttgtaatttcttaaatagtattgctcctctttctgtgagttatttaatttttttctctgtagtagctatgatttctggttttctagtgtgatcatctattgagtaagaaagactaatctcatttggttgtttttgtttttgtttttaactgtccctattttaaaatatttagatgctaattcttccttttggcagtttgcacctgagtttcaggtaggagatggaattggaatggatttaaaactatcaaaccatgttttcaatgctttaaaacaacatgcctactcagaagaacgtcgaagtgcccgcctacatgagaaaaaggagcattctacagcagtaaggatttatagatttttttttttcttttttactagaaagattcatattagaaaactttgggtaaagaaaaaaaaacttcatgtttgatattttttcatgagattggctttttaaatcaaagatgtaaataaatccagccactgtggtgcccgcctgtaatcccactactttgggatagcagatggagacaggaggattacttgagcctaggagtgcaagaacagcccaggcaacataatgatccccagctcacaaaaaaaattagctgggcatcatggcacacacctgtggtcccagctacccggggggctgaggtgggaggattggttgagcccaagaagttgaggctgcagtgaaccatgattgtgccactgtactgcagcctgggtgacagattgagaccctgccttaaaaaaaaaaaaaaaaaaaaaaatgtaaataagccaggtgaggtggctcccagcaccttgggaagccaaggtagaaggatcgcttgagcccaggagttcaagaccagcctgggcaacatagggagaccctgggagaccctgtctcagcaaaagttttaaaaaattagccgggcatgttggtgtgcacctttagtcccagctgctcaggaggctgaggtgggaggatcacttgaacccaggaatttgaagctgtagtgagccataatcatgtcactgcattccatcctggacaacagagtgagaccctgtctctctctctgtctctaaaaaaaaaaaaaaaaaa

SEQ ID NO: 59866 - DNA, 2504 bp, Homo Sapiens
ctttatttacaaacacaggcagtagcttgccaaccccctaactagagcgtagctgtcactttgagacctgagtaacttctctgtaggattacacccttgcaagaattctgcccgcagcatttccgagtttgcattataaccttgtgggcagggcagtgaaagtactgttatataggaaagttaccgtctcctaggaattttgttttaagaaaaagattctaatactaaagtatgacatttgttgaatattttttattggcagtaggaaaggaaaattgaaattacatacaggaactccaaaagcttgctcgtgctcatttttcttctattacagattgaacatttaatgataaatgtgggtggggggatttaatatttcagaacagaaggcagagattaattttattttgccccctaaaatgtaatacattttctctctcttcttgccccctgccctgccctttcccactcctcctctctgtccctttgctgggatagggaaattgactgtaaggggattatgggtctatgtgggagggagagataagagggtctcagcaaaatgccaccttccaaccctgctatcgctgtaagcagtagggaaaggaaggggtaggtttatagctcccaacccatgatcaactagttctacttccttgattgtttgatcatggtcaatctgtagaggatccatttctgaagagctttgtttaaaacggccccttctctaaacaccttagagttttgcacccagtgccccggatcacccgctggaggccacagaggacaaacgctagttgcagtgtttgtgagctgcctttgctgaacagtagtgcgcgtgggaagcatcagcaattatccacctgtttctcaccatccctttccaaactgacttttactcattcatggccatggagatatatttgccagtctttgtcaattcatcagtttttttccaggaagtccttttcttttaaatgctatcatatgaaggctgcccttgctttaagcatttttgattgttcttattaaaatgaagaataaccccttccttctctcctaccccacactccctggaggtttaagtgagcagaaaatggtagtacgataaaagatccatgtaggtgggtttgcagaaaagttaatccaagataagtaacagattgaaaatgtaggcttctgactatgctagtgcaaaccgagttaaacggatcgattagagtttactttccaatatgattttgatgaatggtgtaacattgtgaaaggctttttgaagacaaaaccactaacccgttgtattgttttgttttgttttgttttgttttgttttaagagacagggtctcgctctgttgcccaggctggagggcaatggtatgatcatggctgactgcagcctggaactcctgggctcaagtgattctcccacctcagcctcctgagtagctgggattacaggcacacaccaccacacccagctaatttttgtattttttttgtagagatgaggtttcaccatgtttcccaggctgatctcgaactcctgggcccaagcgatcctcctgcctcggcctcccaaagtgctgggattacaggtgtgagccactgtattttaaaatacagtttttaaaataaaaaaactgtattttaaggattcaatttgaatttgtgtttagatccatgctaaggcatgcaagcaattgacacacggaccctgggatatgcggtgtcctgtctgactgattgattgatttctttctttttttttttttttttttgacagagtctcactaggtcaccaggctggagtgcagtggcacgatcttggctcactgcaacctccgcctcccaggttcaagcgattctcctgcctcagcctcctgagtagctgggattacaggcgcacgccaccacgcctagctaatttttgtatttttggtagaaatggggtttcaccatgtttgccaggatggtctcaatctcttgaccttgtgatctgcccgcctcagcctcccatagtgctaggattacaggcgtgagccagcgcacccagcctttttttgtgtgtgtgtttttagtagagatagggtttcaccatgttggccaggctgatctcaaactcctgacctcaggtgatccacccacctcagcctcccaaagtgctgggattacaggcatgagcctgatttacaggcactgatttctgacaatacatccttactatatatccaaaacttacctgccctttgaaacccagcctgtctcacctctacaaaaacaaacaaactaccttcctaaccattcctacgatactattctatttctgtgaattcttaaaatctgcttgaacagcccattttgacatttgattctctgtgtcagtgtttattgtcttagatttaccccctgcatgcagaagtgactgcatagtcactacttttagtgagtttgaaatctgtttggagagctatgtaagtaccaatggaaaaaaaaaaaaaaaaa

SEQ ID NO: 59867 - DNA, 2136 bp, Homo Sapiens
gaaattagggctcagggaagtctggtggggaaagcacagagctgtttaaatagaattgtagtgtccagagtaagggaagtgaaagcctcacttctctcccatgtgcttggagtaggatgtagactcttcaggtctggccaccctactatacggggagacattgacacagcagttccaaagagagcagccagggaggtaaaaaggccaatccccacttttttttttttttttttagagaagaccaagacaaagaaaaaggataattgatttggaaaagacttgaagagggatcggtgtctttacctaattaaaagatttgctcaggaaagagaaattagaccaactctgtcgttttggaagtagaatctagggccagcgggtgggagatgagaacacatggagctgggaataaaacgggcagcttcctcaatggtgagcaaagccaagggaagcagggctggggaagtgctgctgaggaaacctcaaggattggaccggatggcctccgagtcccttcccactctcagagtctgtgatcctaatcaggggactcaacagaaacttaagggaaaccccctgacttctcgactcgatgtatctattggagctggatttttacaccccgtgttagcagtaacagattggcaaagcaatagaaaacaaatgcaccaattcatgtttttcagaaacttaacaaaagttagcccctgaagtcatttctgtgttatgtgtgtggaggaacactgccggaggaccctgaccagctctgccaactcttttttttctttttttggatctcactctgtcatccaggctggagtgcagtggcacaatcacggctcacggcctcaacctcccaaagtgctgggattacaggtgtgagccacacagcacccagcccgtgctggtcttgacctcccaggctcaagccttccaagaggctgggactgcaggcatgtgcccccatgcctggctaactttaacttttgtagagacgaggtcctgctgtgttgccagtgctggtcttgaactcctgggcccaagcgatcctcctgcctcagcctcgtgagccaccacatcgggcaagccctgccaactctttcctgacctgaggcagggctgaatgtaggaggttagggaattagaaacctaagggttgtcttgtttaattattattccggctatgtggagatctgagccattttccgttgtaagggtccttctggttgatgtgtatatgttgtggtttttgctttttttttttttttttggcaggtgtgcgagggacattttgagattgttccaattcattgtcatgattgagggattatgattaggattctgtaaagtaactagtccaggccaggtgtggtggctcgcgcctgtaatcccagcactttgggaggctgagctgggtggatcgcctgaagtcaggagttcaagaccagcctggccaacatggtgaaacctatctctactaaaaatacaaaaattagccgggtgtggtggcacgtgcctgtaatcccagctactcgggaggctgaagcaggagaatcacttcagcccgggaggcggaggttgcagtgagccaagatcctgccactgcactcgcgtctgggcgacagagtgagactccatctcagaaataaaaatttaaaaaaaaattagtccagaaaaacatctcacagctgaagtggtctcatgggaagggagaacagcactgcccaataggaatgctataatgggagccatagatctaaaatcaaattttagattttccaggagccacattaaaagaagtaaaaagaagcagataatatgaatttaaagaatgtattttatgccaggtgtggtggctctcgcctgtaatcccagcactttggggagccgaggtgggcggatcacttgaggtcaggagtttgagaccagcctggccaacatggtgaaaccccaactctactaaaaatacaaaaaactagccaggcgtggtggcttgtgcctgtaaccccagctactcgggagactgaagcaggagaaacgcttcagcgatttaggagaaccaggaggcagaggttgtggtgagttgagatcatgccactgtactccagcctgggtgacagagcaagactctgtctc

SEQ ID NO: 59868 - DNA, 747 bp, Homo Sapiens
  misc_feature (10)..(10): n is a, c, g, or t
  misc_feature (34)..(34): n is a, c, g, or t
  misc_feature (49)..(49): n is a, c, g, or t
  misc_feature (165)..(165): n is a, c, g, or t
  misc_feature (198)..(198): n is a, c, g, or t
  misc_feature (361)..(361): n is a, c, g, or t
  misc_feature (402)..(402): n is a, c, g, or t
  misc_feature (441)..(441): n is a, c, g, or t
  misc_feature (571)..(571): n is a, c, g, or t
  misc_feature (606)..(606): n is a, c, g, or t
  misc_feature (650)..(650): n is a, c, g, or t
  misc_feature (661)..(661): n is a, c, g, or t
  misc_feature (705)..(705): n is a, c, g, or t
  misc_feature (723)..(723): n is a, c, g, or t
  misc_feature (729)..(729): n is a, c, g, or t
  misc_feature (738)..(738): n is a, c, g, or t
gcgcccgttntttttttttttttttttttttttntttttttgagacggngtctcgctcagttgcccaggccagagtgcaatggcacagtcttggctcactgcaacttccacctcccaggttctagcaattctcctgcctcagcctcccgagtagctgggattacnggcacccaccatcatgcccgactaatttctgtntttttgtaaagatggggtttcaccatgttggccaggctgatcttaaactcccgacctcaggcagtgacctcttttctgtacaccgaattccttcttcagtacagacagagttactacttcattcttctctcaacattataattgttttgcggtttctgggganaatttatcttacttatttccttatctcaaaggcctatgcanaacagctaaataggtaactgatgagaaatatactacganacaaactctaacactcactcaacctaaaggtcttagaaatttgttctgtgacattttattgaaactacaccctgcatccaaccaaaagtaagggctgaatgactccttttatcctagagtgcactagtcnctggggtatacatgcactcctcaatcagttctcanatgattctgcctctaagagcagcagaaactacaggtaatcatcnccgggcttacntgaagttgtgtgcccattccaaaatcttgccttggtcactcaanagtcccaaggtaatcacngggccnttcgagggncattaggga

SEQ ID NO: 59869 - DNA, 551 bp, Homo Sapiens
  misc_feature (433)..(433): n is a, c, g, or t
  misc_feature (437)..(437): n is a, c, g, or t
  misc_feature (509)..(509): n is a, c, g, or t
  misc_feature (512)..(512): n is a, c, g, or t
  misc_feature (514)..(514): n is a, c, g, or t
  misc_feature (524)..(524): n is a, c, g, or t
  misc_feature (542)..(542): n is a, c, g, or t
  misc_feature (551)..(551): n is a, c, g, or t
ggttcctacctctttaacagaaaacaacaatgcacttgagaaaaagtgattctttgggaagaccttcggaagcagcatgacagtgaccaaaatgagctcagatggacgtcctgcactgacactgaatgctagagagtcagtcatttcacttgcctgaacctcctcgtccccttgtccagagtgagagacgtgatgttcacatcacaggcttgctgtgagggccagtgaggaggcaaaagggataatgccacacaaagaccaggtgctcaataagggctgctgttattactgaagtcttgggctcagttccagctgtcctattgcttaagtctgtgagctgagacaagtcgtgtcaacttttgggccctctagaacacctggatagtctttggtgggtaccaccttgaaaaaggcttgggggtccactgtaccnttancaaggggtcacttacttttccaaattcacttactcttatatcagaatctactggatcgtaaaattctttcantanangggcctatancttggcacatttttaaanccctggatn

SEQ ID NO: 59870 - DNA, 1727 bp, Homo Sapiens
tagtagagatggggtttcaccatgttggacaggctggtctccagctcttgacctcgtgatccgcctgtctcggcctcccaaagagttgggattacaggcatgagacatcacgcccagactctttttttttcttaagacataatctcactctgtcgcccaggctggagtgcagtggtgtgatctcacctcaccgcagcctccgcctccctggttccagctattctcgtgcctcagccttgccagtggctgggtctacagcgggggtgccaccacgcctgtttaatttttgtatttttagtggagacggggattcaccatgttggccaggctggtctcgaactcctgctcctgacctcaaacagtcctcacgccttggccttccaaagtgctgagagccaggcgcctggctctatgtctttttttggggggtatggagtcttgttctgttgcctaggctggagtgcagcggtgtgatctgggcttactgaagcatccacctcctggtttcaagcagttctcctgcctcagcctctcaagtagctgggactacaggcatgccccaccacgcccacctaattttgtgtgtttatttttagaagagaaggtttcactgtgttggccaggctgatctccaactcctgatctcaagtgatccgcctgccttggcctcccaaagtgctgggattacaggcataagccactgcgcctgactcctatgtcttttatttctaggtgtgtcccgtatcagtagaacctgactttgacaataacttggaatttgaagaggaggagaattatgtgaagtgaggctgttgtctgactgaaattcctaattgtagggatggtttcatttaagtaattttggagccttacaccaagctccatgctgagggcaggacccctagatgaaccaaatgttgtttcacttactttgttttcatggtttgtttgctttcagtttctatagctttcggtccagcctttttcagatattgaaatgattttcgttttggagaaagaaaggcacggtctctcttttcttgatcctttttctaatctgctgattttactattttgggaataatctcttttgtccttctgtcctctcttaagtctcttaagatgtgaaggtttagccacccatcccatccaaacaagattgggcacagcagcctaaagagatgtgtcatgagaggttttccttttctccacatatatgttagtgaatgactttgtgctcctgtatgttaattgggtcttgtcatgttagcatttagaagttcagacccttcagggattcctaaaccttgggaaaaaataacttgatcatttacattttcgtgaagcagtcttgctctatcattcatactgtgtctccacaagacatttccgtcccttttcataattttagtcaaagccacctagtaacctttaattatataggagagcttgattaagcagtgggtcagatgctctgaaccaccttgattcttagaaggtcatgaaaaaatgttgcctatagttaataattttcttaaaactttattaactatgtaattattttatgagcctctgatgttttagtacgacattccaccagtggaaacatgctcccctttattatgtggcaagaatgataattcgggccaggtgttgtggcatgtgcctgtacttgggaggctggaggatcacttgagcccaggaatttgaggccagcttgggcaatg

SEQ ID NO: 59871 - DNA, 530 bp, Homo Sapiens
  misc_feature (437)..(437): n is a, c, g, or t
  misc_feature (491)..(491): n is a, c, g, or t
  misc_feature (495)..(495): n is a, c, g, or t
  misc_feature (511)..(511): n is a, c, g, or t
  misc_feature (519)..(519): n is a, c, g, or t
  misc_feature (523)..(523): n is a, c, g, or t
  misc_feature (527)..(527): n is a, c, g, or t
aatcaaaatgggcatgaaatttctcatgggaatgtaaaaagaagaacaatgtatagatttctatatgagctaaatactgtataaaacttcctctattaattcttgcacacttcctatgagaaaaagctctttggagatgagaaatctgaggctcgggaattaactctcttgtccaaggtcaaatagagtggtgaaaactagaagcaaacctgtctgattcatcctatggctcatttattttaatacataaaatacgaattactgcttttataagaagtaagatggcagtaccgttatcctgaaacttctaaggccgggcgtggtggctcatgcctgtaatcccagcactttgggaggacgagacaggcggatcatgaggtcaggagatcgagaccatcctggctaacacggtgaaaccctgtctctactaaaaatcnaaaaaattagccaggaagtggtggtggccgcctgtagtcccagctactcgggangctnaagcaggaaaatggcntgaacccnagangcanaac

SEQ ID NO: 59872 - DNA, 548 bp, Homo Sapiens
  misc_feature (471)..(471): n is a, c, g, or t
  misc_feature (516)..(516): n is a, c, g, or t
aacataaacattaccacttctgagacttctggaaagaaaaaaaggtgagaaggaaataattctctaaattgcctggtttattcatatgcctatcatacttttgttagttcatcccttaagttataccccatctctcactaaataccaacaattcctattagctttttaaataagtggttggtaaatgctgctgagaaatgaagcaacttttcaggctctagaggacgccagagcaaagcctaagacatctcaatacttgcacaacacacaaaaccctcaacagcattcatttattcctaaacgtttactgagtgccagacacaatatctggcacagaagatacagtgacaagcgcctgcaagagccttataagtaaacacaagtagttctctgacattcaaaacgggaaacatttgcagattacgtaggacaccctccatctcaagatgctgctgctttaaggttgggganggggctcttgaaatctgcagcttaactaggggcccagctacttantacagggctggaagctctaccgaaaaggttct

SEQ ID NO: 59873 - DNA, 470 bp, Homo Sapiens
  misc_feature (453)..(454): n is a, c, g, or t
  misc_feature (457)..(457): n is a, c, g, or t
  misc_feature (462)..(462): n is a, c, g, or t
  misc_feature (468)..(470): n is a, c, g, or t
aaatggagtctcactctgttgcccaggctggagtacagtggcacgatcttggctcactgcaacctccgcctcccgggttcaagtgattctcctgcctcaacctcccaagtaggtgggactacaggtgtgcgccaccacacctggctaatttttgtatttttagtagagacggggttttgccatgttggccaggctggtcttaaactcccgacctcaggtgatccacccgcctcagcttcccgaagtgctgggattacaggcatcagccaccgtgcccggccaaaacttctttctaatctatggaattgggtctgagaactaggtatgctctacattttcacacaaaaagaattaaggatatggattctacaaaacatgaacatcctagagatagtggaaaaaacaaattcccagtcgtactcatttatcatacttctagttctttctgagggnntanggggnaagggnnn

SEQ ID NO: 59874 - DNA, 1084 bp, Homo Sapiens
ggggatgaggactatgagcgacgccgcagcgagtgtgtcagtgagatgctggacctagagaagcagttctcggagctaaaggagaagttgttcagggaacgactgagtcagctgcggttgcggctggaggaagtgggggctgagagagcccctgaatacacggagccccttggggggctgcagcggagcctcaagattcgcattcaggtggcagggatctacaagggcttctgtctggatgtgatcaggaataagtacgaatgtgagctgcagggagccaaacagcacctggagagtgagaagctgctgctctatgacacgctgcagggggagctgcaggagcggatccagaggctggaggaggaccgccagagcctggacctcagctctgaatggtgggacgacaaactgcacgccagaggcagctccaggtcttgggactccctgccgcccagcgagaggaagaaggcacctctggtttctggcccatacatcgtgtacatgcttcaagagatcggcatcctggaggactggacagccatcaaaaaggctagggcagctgtgtcccctcagaagagaaaatcggatgacgggcggacccacaggcccctcagggtctgcccagccaggctcctgtggtgctgctgggccctcccactccatctggcactggtctggactcctcctctgccctcctcgaggcctgcacagctgtggccgtggagctgacctgaccaggcaaggctgctgtctccatccctgagccgcctgccacctcccactcctgaagatccatctcttggggctcccctgacagagaagacagccgaagtcaaagccacatcctcttgctgatgttggatgcaggctgtccggcctcagggccagggagccagtttccaccgtgcgggaactctgagtcagacgtgattatctgggggtctgtccaccctggctggatctggaggcaagatgccaggccccccaagtgttctcagggcagttcttggtgtctgcttctcagattccaaggactggaattaaaacctttcctgggactctggaaaaaaaaaaaaaaaaaaaa

SEQ ID NO: 59875 - DNA, 1453 bp, Homo Sapiens
tctttttcagtgttgcataacagttgatttccccaccattcccataccctaagtgaaaattcaactttgttctgattatcagaaattgattccttctcctatagattctttaaagaaacctctgatggtttaggcttactaactcaaggtgctcttaatatcagtgttaagctgtgtgttaagcctacttggctttaaaaaagtgttacacaggtgcatatggaaactttaacagctttcaagttttcagtccaaatctaacattttgcagactaatgtgataatttcagattaccaaagtagcccttttatagtgaggggcctttgtgtcttacaggctttttttgtggtggattgggtgtcctaaaattcacctaggtgtcttgtaagcctccccagtgcagcagcagcttgctcttgtgctatcgcagtgccgttaggtccctgagtttttaagtacttacttcaaccattcttctgtattggcagaccattgtcttgtgttgggggctcagaaaatactttcatccttaaagtgcctaacccagtggcatacacatagtaggtactaaataaatgtttactgatttcttaaaaaattgttaactgattgatgaaactttttcagtcattggaatttgatttcataaagcctcctatgtagacttcaaaataatagtatttccagagcaggagtcaaattataaattataacaccacaaccacagaaataatagccccatacttgttattcatgaactgtacatgttgatatctcatttacagttatttgcatttaggcatgtcagatagtagagcagaggtaaatgtcagcattttttctagtctaatattttttctttgaaaatgaatctttttaaattttaagatattaactatgctctggaaattcatgttagagaaggcaaactgctagcaatttagcaaaattaaatcataaaattagtttctttgtattatctcaagatgcaatttaattcattacaaaatttcttattaaaactgtaagtcagcatatctttaagtgaatttcaacaagaaattcattgggggatgcttttatagtcctacagcatttagtaaataccagtttatcagtgtgggtgggagattgataactaattgcatttttaggttaagcagtatgtactttgcgttaaagtgtatcctgcatgtgttctatggaacaatatgtggactgttagtattgtatgagaaaagagttccgtggtctggtaagtttttgggaaatacaggttgaatatccctaatcagaaaatgagaaatgttccaaagtctgttttgagtgctgacatgatgctcaaaggaagtgctcaatggagcatttcagagtttggattttcagattagggatgctgaactggtaaatataatgcagatattccaaaagccaaaaaaaaaaaaaaaaaaa

SEQ ID NO: 59876 - DNA, 2279 bp, Homo Sapiens
acacccagcaggcagagaaggcagcagcaggcaggaccgccaccctcccatgcaaatcacccccgggagtgcagctgggctcctcccgctcctcctaggcaatgctcctggggagtctgtggggaagatgccatccagggtgctgtgcgctcttcctcatcctcgccctcctgctggacgcggtcggcctggtccttttgctgctggggatcttggcccccctgagttcctgggacttcttcatctacacaggtgccctgatcctggctctcagcctactgctctggatcatctggtattccctcaacattgaggtgtctcctgaaaaactggacctgtaatttggccatgggaagaggagaagagacgcaggtgctgtatgcagacatgtctgtgaacctggggctcttgggcagcaacacgttgcagcttccacctagcaagccacgccgggaccaggtgagtgcacacaagacctacctggcagggtggccagagaggcttggacaagcaggggcaagaccaggcctcctgaggctgcataagcaaatagccagacactgcaccctgactggggatcctgtggccctggcctcaggtcctgctggggtggccagccaagaggacgtggggcaggtgttttctcctccgggcccttttcctcgcagaggctggaaagagagtctcaacagccccttccacccctgatataccacgaatgatcctggcttctgggcacaatgggaagttatccctttacctcggaacttggggacaaaaagaccccatctgcattctctgttgggaagaatctctgctggggagaaaagtctttagcacaggagaggacggaaagttccccaatgactcttgtgcccttgcatacatgaaggggtgtgaactgggccacggtaaaagcaaacagagcagaaccacccagaacggcccctctcgttcacttcctccctgcacctgcccagatgggatacaagaagcggggtagggactactcgcctccatgcccactcagtgcacacacctcctctctctgcagtattcccaccccaccctcactcacactcacacgcagccaacacatgtgcccagccagtctccaaggcccagaagtcaagacagtttggcttcatggatttcatccgctgagttgcatgtcacagctcagtctatcgcgtgcaaccaaagaggcagagagttgtaagattttttcacatcaagacagagtcccagagatagagtggtctggtccttacaaccctgaattagagatggacagctgtctccaggggactgaagtcagagccacggtccattgggcagccataccctcctccccaggtgggcccaacctgcacgcaggtgtatccaggcactcccgtttcttactcccttaccagaagtaagagcaaaggtcgttgctgagttgaaagaaggaaataataattgtgtcttttgtgggggattacacctgactctcagaactcagagaaaagagaagcaaaatgaagaggtctcagtagagtaaggtaagcccatacctaggaaatgatgtagaaagagatgagaagtcagtcccactctgatcttcagcacttgttggctgggtgtttttggccaggttgcacactctgagcctcaggattctcatctgtaagatgaagagaatatttctggcccttattgctgcaaggatcgaaaagagataaggcagggaaaggctgtacaattgatgtggttcttacaccagatgtcaagcatacaaaacacataatctgggatgagttaactgacccaaagtccaaatgtgaagtaccttggtgtctctcaaattggtagtgatgggggtcaactcacactttgcatcaggaaacttcggagcaaaaagggtccctgatttgtgtgctggtatgttggaatgtgtcaggcactgtgcaagacactggggataagaaatgagacacatggaccaggcacagtgactcatgcctgtaatcccagcactttgggaggccgaggcgggcagatcacttgaggtcaggagttcaagaccagccttggcaacatggtgaaaccccatctccaccaaaaatacaaaaaattagccacgcatggtgatgcacacctgtaatcccagctattcaggaggttgaggcagaaggattgctggagcccaggaggcacaggctgcagtgagcagagattgcaccactgcattccaacctgggcggcagagtgagacctgtctcaaaaaaaaaaaaaaa

SEQ ID NO: 59877 - DNA, 3878 bp, Homo Sapiens
attcagggaccatgcaggcagcacgcccagcactaaccttcaggatcagctctaccacctccgtgtgcaccaggccatgcacaggttccccattgacatgggtgatgaggtcaccttgacgaagccctgcctcactggccggacctccatcctccacgtgctgtgccaggaagagaacagtactcagactggagcctgaacacgaagtatggggcctggttctggacattaagctgtgagccccttcaccaccaccctttgacccccgagcagggacagatgggctccacaaaggggaagctggaaggatgatgaagcagggagacagcaggtctggatggtcagacatacccacaccatatggtgcacggtgtagacatcggagtcacccatgtagacgcgaatggcccgcagggtgaagccatacttcttgccagctcggtggatgatgatgggaggcctcatgctgccaagggctggcaagaagtccctgcttggagaagagtcccgggatgatgggttggacgactgagaatgtggggacatggggctggccaacggggagcaggtgtggtgttctggagaaggagaagccaggacttagtgggtcagagggctttggcctggcccctggtccagtctgttgatgtcagcacaactctagtcacagacagagcctgagcctaggtccattttccccacagcccctgacctgtgaagccctctcccgtgtccagaccccaagagacggtggtggtgatgagaaatggcagctagcatttatgtgtgtatcagggactatataagcttgtcatatatatttaaatgtcacaacctatcagctggcctctattatatccacatttttggataagaaacttgaggcttagagaagttaagcaacttgctcaaggtcaagagcctgttagtgatggagccaggatttgagtgtgagctctctaccccaaagcctgcacttgtgacatggtgctgtcctgctttctggcacatgtatacacaaccccagacaccaatacacaccttcagagaccacagtcagatctgtgcttaacacacacacacacacctgccacgtgcagaaccctcccaaggcctagagattacaaggcccttcctgtgagttttatcccagctccccaggggcctcacccgaaggaatgaggagtgagagggctgtggctgaggcggacttgatcactttgttgacagggcgagcagtgcgcttctctgttgagtccccagagagcagccggtggcgggccctacgcacagccaggtcactgatggccttggctgtggctccctcagccagctgtgaggtcccacggcctcgggtctccatagctgtaggcccaagtaagcagtgagacccgcgatgccgctgagcctccctgccctgcagtatcctccagcttaggtcgtttggccgcccactgggccatacctggactggaaccactgctccggccaacagcttcctcatccagctttggccgctgctcccctgagtgttcagtgacaggcccagataccccctctccagatgggggtgtcaggacccatataccctcctgtggttgcctcctgagggtgctgctggcctcctcagggccctccgggaaccgaggcgcatccaggaggcctgagcagcggcgtcgcactgtcattggagggcttgagtcactctctgtgtgggatgactcagacaccgacagccgcttccgtaatctatgagacacaaggcctggggtgagtgacccaggtggtccccctcctcctgccaggtctccttaggggcacacaagggttatagtaacagaactttcctccgcagacattcctccaggagccacccttgtgaatgccccctccctgccacctgcactcctccctggcatcggaatctctcccatgatctgtgacaatgcagggatagctgtgtcgcccaccctgggtgaactctgggtgctcacatctcaggggagccaatcacccagctccggtctcggcctttgagccctgccaggccatctgaatggtcctccttctcctcactcaggctgcgcttggtcgggggtggtgtccggcgctcctcgagcagtgagagccgctccatgctgctgtacacctgtgggcacaggggatgcgctggggatgggctctggcagccgtacctcccaagtggcataaagcatccttggcatcggaaacctaggaatttgaaccagtcggttccatccctccttcacacacccctgctgaatatttggggaaggagttattccactgatctgacctggcatctcatgtcagggacagcagtggttctagaagcacctatatatagctatatgtagccccaacccttagctcctctttttctagaggtggccccaaccccaactccctgagcctgccccaggtgtgccctttgacaggccctcttcttctgatcctccagcctgttctgcccattctgggcctcctcagtcacaccttgttgaaccttggagagcaggaagagaactggcggatctcaaggcagccatcctcactcacttcttcctcatcctccgagtccatgtggtggtatcgctctgagcgggctgggccagacataaaggacactttccttcagagccctgctggtggcctccttgtgaccccattagatttcagcagagccctgagaagttgctcccaatgcaatttcagtgtgcacaggtgtttctaggcaaacaggtaggacccatcctccaccccacccatcggtggccttactgtcaaaatagctagtatcatcctctgactccaactgaggaataaattcagccttctggcggagaagtcctgtccagtccagaccagtaaagaatgggtgctgcttcacctcataggcactgcctgtggacagggaggacatgggcaagggggtaggatgagcagcatggagtctaggtcagcaaatctagcaagaagccagaccttcagaagctatacctaggggatcagctcaagcatcttcccttttctgcctacagagcagggcagagtttcaggatccagaggggctgcccgtaaccgaagcctgaacctccagggtacatgactcagcctcccttaccccttttccaagtagtgagaaaagttagcagggcctgccctacctgtgccaagtctctccagagggttctggtggagcagtttggaggtgaggtcctgggcgtctgggggcagtgcctcatcaccctcaggccacacaatctcatctgaagtcatcaggggtgagagggaaaggagaaattgtgggtagagtggagagatgcagaagagggtcccagaacagtgaaaggaaaggaggcaaaaaggacccagcctggagcccctgaaagccttgcctgggaccccagtccttaaattctataggttcctagaccatagcttgatctttgatccacagcaggcactgcaaagctctagctcaccctgcttttatactccacaaaacatacacagacgtacccctcacacttatgggatgtgcacatacacagacaggaacacccaggtgtatatgagagaccaggtgtctatgagagacatgtgaagccccaagggacacagtgtgcacatgtatgtacatgcagaaacacagagacacccatccccaaagcagcagacatcacaaacacacatgatgagttcagaacaagagctcacaggcctcacgagctgcctgcatacatcatatttgtggattcagactctgtttccccactgggccaggggcatagtacctaccactgacacctgcccaaagagctcctccggagtatctccaaaaaaaaaaaaaaaaa

SEQ ID NO: 59878 - DNA, 484 bp, Homo Sapiens
  misc_feature (356)..(356): n is a, c, g, or t
  misc_feature (359)..(361): n is a, c, g, or t
  misc_feature (372)..(373): n is a, c, g, or t
  misc_feature (375)..(376): n is a, c, g, or t
  misc_feature (383)..(383): n is a, c, g, or t
  misc_feature (396)..(396): n is a, c, g, or t
tttggattttcagcaggaactttattccagtgctaatggcagacatcaggaaggaggagaggagccatttgtgcagatcatctagaagaacctggaccattcttgacagagctgaatacagtgatcacgttgtcctccaaggagcaggggtggggtggggtacttctaggagtcagttctgcaggctgtacaggaagcatggctggggaggcctcaggaaactgacaatcacggcagaaggcgaaggggaagcaggcacgtttcttcttaatattcctttgaaattctttatggtgcacaggtagcgtagaaaataactgcttcacactgactgtcatccctcctgggtggggggnggnnngaggttgtaanntnnccatagngataaacaccagncgggtcccaaccttcccgatacatgggagggagaaaatggggcattactcaatgcacaaagggggcttagaagctcccccccaaagcc

SEQ ID NO: 59879 - DNA, 530 bp, Homo Sapiens
ccaacgtttactccccccaaccctcaagctctcaagtggtgaccacgtccttccggccagctgcaggtggagctggagcaagaataccaagacaaattcaaaagactgcccctcgagattttggaattcgtgcaggaagccatgaaaggaaagatcagtgaagacagcaatcacggttctgcccctctctccctgtcctcagaccctggaaaagtgaaccacaagactccctccagtgaggagctgggaggagacatcccaggaaaagaatttgatactcctctgtgaatgctcctgccaggccttcagaaattgcatggccactccagcgtcatcggactctctcttattacaaagatcactgcccaggaccatcttcccgagaagcatcccttagcctaaaatccacaccaaagggagagttccagaggaatccatgaagaattcccatgcccaggctccatgtgtcatgtggaaacctccacaggtctgctagtgaagaatgcatgtatgtgagatttttgttttct

SEQ ID NO: 59880 - DNA, 573 bp, Homo Sapiens
ttttgtgatagtgtatcgctctgtcagctgcttgggctgtccctaatgtctccttggactgtgggtctgtagcacctgtcataacagagtactatgaattaatatgcagaaaaaagttaacattagcagtcctgaagctgtgtatccttgaaaatgcctgttcccaaagtgtaatctttgatgacattgttagagaaggcagatatctagccaagagcaggaagggtagcccctgggaaatcccacaaccccagggaccacccaaaacaggcatgctagatataagcagagaggaggggagacacctaagtagaaagaaacatccattatgatgcccaggaatcattcagtttgcagttatcctgtcagaatgtagctagatagatgctgataagaagggcaaacaggacattactgaaaaaaacaagaccgtaattacacaagagggcaaacaagaaactcctaagagatacccaggtgtaatgagcacagatttaaccactatacgaccttcctggggtggcagtaatgagcaatgcagccacccacatatccattgatggctgaatggat

SEQ ID NO: 59881 - DNA, 1078 bp, Homo Sapiens
agcggaagatgctgaaggagattgtaaaagctgccaaggcccctgtgaaggccaggatacttccccaagatgtcatcctcaaattccgggacaagattgagaaaatggagaaagatgtgtatgcagttctgcagctagaggcggaggaaaaagagatgcagcagtcagaagcccagatcaatacagcaaagcggctcctggagaaggggaaggaggcagtggtccaagagcccgagaggagctggttccagaccaaagaagagaggaagaaggagaaaattgccaaagctctgcaggaatttgacttggccttaagaggaaagaagaaaaggaagaagtttatgaaggatgccaaaaaaaagggggagatgacagcagaggaaaggtctcagtttgaaatcctcaaggcgcagatgtttgctgaacggctagcgaagaggaatcgcagagccaagcgggcccgagcaatgcccgaggaggagccagtgagaggtcctgccaagaagcaaaagcaggggaagaaatctgtatttgatgaagaactcaccaacacaagcaagaaggccctgaaacagtatcgagctagcccttcctttgaagaaaggaaacagttgggcttgccccaccagagacgaggaggaaactttaaatctaaatccaggtgatactggctgttttggaggggcataggttttgggattagagataaaaacctttcatggaaaagaagcttctccatcctcattctggtcttaactctgattttcttacagatacaagaggaggaagtagctgtcgtggcctgaagaaattcatgggggcagcccttaaatcccttccctgtgggaagtcatcctggctggtctgtcttttctccatttgtttaaaaaaaaaacaaaaacaaaaaacaacactttggtgtggtggtatggtacgtagctattttcctaagcatgtctgtcaatctcccttcttgctgattagctttcatatgactatattaaatggaagtatttttgggaaaagagaaacctaaaaaaaaaaaaaaaaaaaaaaaaaaaaaaaaaaaaaaaaaaaa

SEQ ID NO: 59882 - DNA, 539 bp, Homo Sapiens
caatcttgaaatatatccaggccgcggcagcctttccaaactcccgggcttcccacagaatgcgctcgaatgacactggaaagatttcaaaaatccaggcctccccctgttttaattcctttcttcccccaacagatgttgcaggcctggtgaggaagcccatcgtgtgtgactctcacgccactgacggggtttcgtggtgcggccaaattcctctatggccatccccagcatcagtccttccagattgaggaagccccttccaggaatgagctccatatttaaaggagtggaggagatgaacacctctccaccttggagccaagaggttaagctttcaggaggccccagggctgggcaggaaggattgaagctgtccctctgcccatccctcagagctgtttctctggactttaattgaaggtcgtgatcctcaaaccttcattttaatgactagttgcaacctcttctcttgttcagaccttgacccagcttctcaaccagccagagccactggtttggatttcatcttctatata

SEQ ID NO: 59883 - DNA, 468 bp, Homo Sapiens
  misc_feature (154)..(154): n is a, c, g, or t
  misc_feature (372)..(373): n is a, c, g, or t
  misc_feature (387)..(387): n is a, c, g, or t
  misc_feature (389)..(389): n is a, c, g, or t
  misc_feature (429)..(429): n is a, c, g, or t
ttttttttcatgttacaattttgatttatttaatggcttctttagttattaacctagcaattaattagatattctgcaagtacaatcacatttaaaataaacccattatataggttcaggactctgcaaattaaatttcatattaaaaataatngactccatataataaaacatgtgtgtttaatattgattctactgtacaataataatgttacaaatagattctgctaacacattgcttcaggctactgggattcacttactgaacacagtctaacaaagcaagcagtgttcaaatctcaccctctggccaggacttattgagaaggaaatgttctctaatatgggcatttccaccttctgtggtatttnngctgtggagatctntngacagtcatttgggccccctggagggcagaatggtcatcntttcttgcacgtgtgaattcccaataatcataactttcg

SEQ ID NO: 59884 - DNA, 483 bp, Homo Sapiens
tttttttttttcacatttgagcagagtttattagcatttttgaattatcagagataatattagattacagtatcatatagtattagataagatgcaccgttgacacaggtacagaagtttccatatagttcaactgattttttatttattttttatttttttgagatagggtctgactctgtcacccaggctggagtgcagtggcaccatctgagctcactgcaacctccaccttgcaggctcaaacgatcctcccacctcagcctcacaagtagctgggactacaggcatctgacaccacacccagctaatttttgtatattttgcagagacaggatctcgccatgttgcccaggctggtctccgactcctgagcccaagtaatctgcccccctcggccacccaaagtggtgggattacaggcatgagccaccatgctcggcccagatcaactgaatttaggatttgatattactttgactt

SEQ ID NO: 59885 - DNA, 862 bp, Homo Sapiens
tccatgctaacgtacagttgctccgctctgctgctgattggtctgctggtataaagtaccatgaagagtccatccacgccgcttacgtccatgtgatagagaacagcaggcactatatctatatcgaaaaccagtttttcataagctgtgctgatgacaaagttgtgttcaacaagataggcgatgccattgcccagaggatcctgaaagctcacagggaaaaccagaaataccgggtatatgtcgtgataccacttctgccagggttcgaaggagacattccaaccggcggaggaaatgctctacaggcaatcatgcacttcaactacagaaccatgtgcagaggagaaaattccatccttggacagttaaaagcagagcttggtaatcagtggataaattacatatcattctgtggtcttagaacacatgcagagctcgaaggaaacctagtaactgagcttatctatgtccacagcaagttgttaattgctgatgataacactgttattattggctctgccaacataaatgaccgcagcatgctgggaaagcgtgacagtgaaatggctgtcattgtgcaagatacagagactgttccttcagtaatggatggaaaagagtaccaagctggccggtttgcccgaggacttcggctacagtgctttaggtctaaaatgactccaggtgtcgaagatccctgatctttggcaagaagatgcaaattttaaactaatctgtggtgaagcagagagagtactgggctaggaagctgggctcgtttcagctgtgcgatcctaaataagtccattcaataaagtgttatttagaactttcaaaaaaaaaaaaaaaaaaaaaaaaa

SEQ ID NO: 59886 - DNA, 1172 bp, Homo Sapiens
gaggagaggctgcagctagaggctgggccacaacagtgaaagctgcccctgagtggaatgttgtcagtgtccctccacactggggggctgctgggtgggaggacaaagctgtcctccagaggctgtgcctgaggctgggtgaaagtgggcactgtggcatgtaccatcagacatgtgcagttgactgtggtgagcacaaggctacatttgcagccaagcccaccagaggacccagagctagagggtgatgcttggaccccattctgcagggcagtttctcctcgtatagggtgcatgtctgtttagggccatgagaagcactggttgagtgcttatcaagttccctgtgcccggccacataactttaaacccccagcttagtgactggctacaagagtcaaactctgttcacaagccatgctacctggactcctggttccatttctcaggagtctaccagtgctgcccccagccccaaggacttcttagcagagcagggcccttagtgcatctgggtgggcccagagcagctgcagccctctctcctgcacggccagagcgacttagctgggccctgctctgcctgccctgtggccatgcttccatgggctcctgactctcctagggccttcttctggaaagtgctcaagaaccgagacactatcaccaaaactggagactctgggaataggatgtcatgtgttaagcatcagaatgtcccctccaacaagctaagagtgtctactcttgccaccctgtcatcattgtgcttgaggtcaaagccagtgccagaaggcaagaagaaatgaaaaaccatccaggccagaggggaagaaatgaaaccatctccctttgcagatcacatgattgcatagaaaatcctagggaatctacaggaaagttattagaactaataagtgtgtttaagcaaggtctccagatataaggtcaacgtaacagaaatcactcatatttatataatctatctgtaacagttgaaaattgaaaattttgagaaaagtgcccttaataatagcaccaaaaaaaataaaataaaaaaataaaaataatataaaatatgtgcacattctgtttgctgcaaactgtaaaaccatgatgacaaaaaggcttaaataaaaggaaagataccatgttcatggatcaggtgtctc

SEQ ID NO: 59887 - DNA, 397 bp, Homo Sapiens
tttttttttttaaatttaagtgtatatagtgagcaatttctccatgttaaggaatagatttccacagcatcatttaaagtctcactgtatgccatcttgtgttttatttggccaacagtcattgttagccttataggttgttcagaattttgctatttcaataagcactgtggtgaacctccttgtagcaaatcttttgtagattcctaattactccaaccaagtcttcagtggaggtgccatgttcatgctatgcactttctggagacttctgtctgactcattcagtccaattattctgccagaaggctgaatttaattccatgtggggctgaagcaccatacctgagtccatagacaggagcgttttacttagaaagaaaaaataactggtcag

SEQ ID NO: 59888 - DNA, 487 bp, Homo Sapiens
aggagaaatgatgtcttcatccctgtgtctcccaggtataagttttgtatttttctaagttcaaaacaagcaaggatcatgtttgccttatttatccttaaaatcatagtgcctggcagagttaagtgcttgatatagactgctgagtcaatgaatgaatgtaggtcctacgtatttttaaagtttactcctaggctctttttaataatttttgttcctatcaatctcttttcatcaccattatattttctacctggctactattggcacatagataagaaaatagtttctattcattcattcaatcacttattctttcaacaaacatttgcaaatcaacttctatgtgtcaggcattcttctgagtgctagggatagtgtgtcaatagagtccatgtccttgtggggtgcaaggttagaagaacatacataaaataaataagaacagataaagattattagattataaggatataaggaatgctgc

SEQ ID NO: 59889 - DNA, 593 bp, Homo Sapiens
cttacccgattttgaatgctctacgaaggctctttaaaatactcaggactatgggtgagtagtgtttaattttccccatttttttatatgactttgtctttattcctatacaagcaatatgtgaaagttttaattattgcaatcatagtacaattccatttgtctatttcatttattaaaaatattctgtttctacttgttcataattaaccttctagtgactgtatggtattaatcttctaacttgttactgttttccaaaatgctatctagttgggcttccatgcattcactcaacaaatattctaggcctggcacactggctcatgccttcagtctcagaatttcgggaggctgtggtggacagatcgcttcagcccatgagttcgagaccactctgagcaaatggagaaaccctctacaaaaagtgcataaattagctaagtgtgaggcgtacctgtagtcccagctacttgggaggctgaggtgggaggatcgcttgagcccaggaggtcagggatgcagtgagcgtgattgtgccaccacactccagcccagtaacacatctgaccctgtctgcaaaaaaaaaaaaa

SEQ ID NO: 59890 - DNA, 522 bp, Homo Sapiens
  misc_feature (414)..(414): n is a, c, g, or t
  misc_feature (463)..(463): n is a, c, g, or t
aaggtagttaaatttatccatcttttctttcaggtgggactccaattattctggttataccactgcttagagacaactagtggaactgaatgtgagtatcacttcaagcaattaagaaaaagagagagttattttggtcggttttacaaagaagtctgaataagaaggactgtttgggtttttgtttcttagaaatttccatagttctgccggccttggtggctcacgcctgtaatcccagcactttgggaggccgaggcgggaggatcatgaggtcaggagatcgagaccatggccaacacagtgaaaccccgtctctactaaaaacacaaaaaaattagccaggcgtggtggcgggcgcctgcagtcccagccactggggaggctgaggcaggagaacggcatgaacccggngggcggagcttgaggcgagcagagatcccaccactgcactccagcctgngtgacagagtgagacttagtctcaataaataaataaataaataaataaataaataaaat

SEQ ID NO: 59891 - DNA, 543 bp, Homo Sapiens
  misc_feature (543)..(543): n is a, c, g, or t
accaaatcatttgttctcacttgaaaatctcgaatgtcattttctggcttacaagttagcttgtaaaataggtctacgtgaaaaatgaacatatctgttgattaaagcccttttgctctgcattaaatctgtgttcctgttttgggtacagaatgaaaatctgccttattgtgtaggtcggttctaaatgttttcacatcatcactggccgggagacattggagctccttgcacagaagggctcatgcccggcacggggacatcagtgacaccagcgcatctggggctccggtcctgattctgacccttgcaaggactgtcagcaacagaataagctttctgagcttctgacaaattggaaataacaacatttgccctgcctttctgaggggacgactgtgagtttcaagtcggctgattataaagttcttggaaaaatgaaagtgttacacaacatgagatagtgttcatgacagcagcatgtgtgaacatcacttactaaatgctattactagggatatctgctatacacagagcatgctn

SEQ ID NO: 59892 - DNA, 6855 bp, Homo Sapiens
aacatatatcctgttccttagatgttatttagcctcagagtgaactgtgtgatacacacacaaacacacacaagtatatatgaagtttacactcttttgttagtctcttgtgtagtgaatttatttttgtacacctgctacccttctcttttgtttgtttttgttttttgagacagtcttgctttgtcacccaggctggattgcagtgatgcaaccttggcccactgcagccttgaccccctaggctcaagtgatcctcccgccttagtcccccaagtagctgggaccacaggcaagtgccaccatgcccagctaatttttttgtagagatggggttttgccgtgttgcccaggctgtctgagatcaagtgatccaccagcctcagcctcccaaagtgctaggattagaggcgtgagccacactgcacccggctccctgtacccttcttaatacgaacttaaagtgttcgtaatgagccaaccgttgtaaggtttttggacttcttataaaaagccagattcaaatacagttgtttagacaaaaatgtcttagtatggaaatatgcatgagcatattttcctgccagatttgtggttagaaaagaagcaaattttcctcctagagtggaaggaagaaaaaaacaataaagaaaagaagcaagctattcaagaagaaggtagtatagtggtagctttttgttgagaccagtcaccagcctggaactttctttggtaagtaattagattcattgaataaaatgttcaaccgagcttggtgcaatctcatagttacaaaacactcttgccaaagaaagttgcagtcttaatatccgtaatcgaatcatttcctgttcgggcttgcaggtggggaacaatctgaaactgcagtcctataagattagttataaagaaaacgccttggtgggagaagccttgatgataatattgaatagacagcctaacaagtgtggggatgaagaaggtacaccaggatcctgggactaaccagatttaaaggcgtaagtcgggatctgcaagcccactcccttggggtgatctgaataaagctactctagggcattcaggtatgtgctgaacacactcgggcagtgggccaggcagatggctcattcctgcaccgaccttcgaaggcctgccaggttgaaaagctaccactggggaggcatggctgtgctctagcaagaacaagaacatgcatttcatgtagcatttggtccttcccagttgagggagatgccttaggactacgttaatctctgagtccacttagggcttgggatgtattctcacagcccttgctcctcctccatcttagagtttatttttaccgtcattgcaacctcctctaagtgattcttccagacccatagttagcctttgagattccgcagttctcctccctactcttccccaccatgtcttcattgagacccacatttttaggtttgactaaaccttccatctaggaataggtaggaggctaagcaatttaggccgcattcatgtatcctgtcatttgcttcactgcatcttcttggctgtggtaaaggaaatttaggtgtgatacactccttaggcttccctgccctgcccccctttccttttgcccttttgattttttttaatctgatactcaggctctcctcccgccttcacacaccattggagtctcctaagctatttctgtcagtttaatgatccccagctgttgccacagttcaggctgttttcatgcccaggagaagcatcgaagaggcagaggaaaaggggtcttgtttgttgtctgtcccacagtgtgtaaaacaaatcaaattcatttttctgaaactactagtgagattccttagggatggatgttaatactgggatgatttgaaaatcaggaggaggaaaagtacatggtagtatcagggacatttttaaaataagcattctgctgataggtgtggcactctgcatcactcagaattatgctagaaaattgaggtatgtggtatggaggaattatttgatcactttgcattcttttagattttttttttttttttttgagacggagtctcactatgttgccaggctggagtgcagtggcgcaatctcctctcactgcaacctcctactcccagatgcaagcgattctcctgcctcagcctcctgagtagctgggatttacaggcacgtgccaccatgcccagctaatctttgtatttttagtagagacggggtttcaccatgttggccaggatggtctcgatctcctgacctcgtgatccgcctgcgtcggcctcctaaagtgctgggattacaggtgtgagccaccgcacccgcctctacttttagattttgagctggaatttcccttctactcatgtatgttgaaggagtatctaaattaaaagaattctgtaataggaaatatatggaaattgtttctgaagtatccagaaaaggcatttatttaagttctgctttaacttaatgcaggtttgtttcgtaaaattttgtgcaaaacctgcagtagtgaaatgttccatttgcaaattcaaccacacagacttcaggaaatacaaagttgcggtacttataacatgaactcttctacagttacacctacctttgcttttgaaaagtctttactaaacctgggggatgtggagtgggaaaatcctacagtagttaaatgggctcctaatgtattataatgatctggcttctcctttatgtgtttgatcttgagaattttaacccattccaacaagtttagctgatttgtagcttttacgctcagacactacatgaagtttaattttatggatttctttcttccacagagaagacaaattttgctgcagactttatcaaattttatttttaaatttttatctttttgagtcaaatagctaaaaatttacatcatttaggactgaagagtgagaatttactgttttttttttctttatccatagaaaacttgatacataaacatttgaataagcttcagattgtttgtctatctaattatctatctatctataacccaacccatatggtctaatttttaatcacctttctattccctactgcttcccatagaaaagggccaggtgtagtgcctcatgcccaatcccagcaaagcctgtaatcccagcattttgggaggttgaggtgagcggatcacttgagtccaggagtttgagaccagcctgagcagcgtggtgaaacaccatctctacaaaaacaaacccccaaaaagcaaaaattggtcaagcatgctactgtgcgtctgtagtcccgattactcaggaggctgaggtgggaggactgattgagtccgggaggtcaaggctgcagtgagccatgatcgcaccactgtactccatcctggcgacagaatgagacctatctttttatttttattttaattttttttttttattgagacagtctcactctgtcacccaggctggagtgcagtggcactatctcggctcactgccagctctgcctcctgggttcatgccattctcctgcctcagcctcccgagtagctgggactacaggcgccccccaccacacccggctacttttttgtatttttagtagagatggggtttcaccatgttagccgggttggtcttgatctcctgacctcgtgatccactcgcctcggcctcccggggtgctgggattacaggcgtgagccattgcgcctggctgagaccctatcttaaaaaaaaaaaaaaaaaattactttaggtctgtcatagtggctcacgcctgtgattccagcactttgggagactgaagcaggaggattgcttgagaccaggagtttgaaaccagcctgggcaatatagtgagaccccatctctacaaaaaaatttttttaaaattagccagacgtggtggagagcgcctgcagtcctagctatttgggaggctgaggtggaagaatcacttgagcccagaagtttgagattacagtgagctgtgatcctgcgccactgcattccagcctcggcaagagagtgagatcctgtctctgtgttttgtttttttgagacgggctcactcttgttcaggctggagtgccgtggcgcagtggtggctcactgcagtctgggtcaacaggcatacactacaggcacacacaaccaggtgttgtctccctgtgttgcccaggttggtctccggctccagctctcaagtaatcctcccaccttgacccccacaaagtgctgggattataggcacaacccactgtccctggcctaatttaattttaaggaaaacaattttttgtcacttttggtttgctctagaatgactaccctattccaagttttgaatctgtacaacaaagttgggtgcagaatgtcagcatcagtgataccagcagggattagcaaatgagattcaaggctgcccatattttctcagtgaatgggcagaactaatgcaataaggaaaatgctgttcttggtgcctttaactttggaagggagtgttcagatggccctacctaaaagtgctaaaggaagcacattcctagtttatctccaccctgttcaggcatctggtgcaagtgcatgctatgcccagatcttacatgatggagttggttgcacattgctttatagatcctcaggaaagagactgatgacattgaagtaattggcactttgagatctgtttgccaccattagaataggaggtcacctcaaggggggagatgagcagctacccaaaatgaagtggtgagcttcagatttttgaggatgtggggaataatatttatttatagttattaatatttttattatgactgtggcataaatgtgatatagtagaaaaagcacaagctttgatatcaggccaacctgtgtttgaactctggctctacctgttaccacttgtgcagcttcttcatctatgagatagtacatatctcaaatagccattgagatgaaatgagtcaccgtagtagtacttctacccagtgacaacacaatgtaagagctaaacacattagagtcctcatttctttttttttttttttgagatgggagtcttgctgtgtcacccaggctggagtgcagtggtgcgatctcggctcactgcacgctctgcctcccgggttccagcgactctcctgcctcagcctcccgagtagctgggactacaggtgcccaccaccacgcccagccaactttttgtatttttagtagagacggggtttcaccgtgttagccaggatggtctcgatctcctgaccttgtgatctgcctgtcttggcctcccaaagtgctgggattacaggcgtgagccaccgcgcctggtcagagtcctcatttcttctattttagttttcttttcaaggcaagccttttctcagtgcctttgcacttgcaatttcttatgtctggaatactctccagatcatttttatggtttgtcatattatttaggtttctgtccaagagtcatcggtctcttcaaaagggccttctctgtgtaccctatctaaaattatcaccacccctgtcactctctgttctcttgttccactatatttttcttcacataatgtactccctgaaattataatacgtacaccttatttattatgttttccctgctagagcatatgttctatgagggcagggacctcatctgtccatgttgttgttttattgcctataaatattgaccttatctgttcatgttgttttatcacctgtaagtatcacctatacatattagttcaataaatgaatgaacgagccaactgacaatcttcctagtgcccgaaaagaacctgtggccgaatgcaggaaggaagttgtaccaggaagcaaatgctctctgcttttgtggagtggatgttcccacactgagagccagataggcagtagtcctgtgacgtcctcttacatccttttagacttcttcctgtctctctgtctgggaagagcccctttgacctttatttagtatttgttgttattttttgagacagggtctcaccctgttgcccaggctagactgcagtggcataatcatggctcactgcagcctcaacccctcagcttccggagcagctaggactacaggcaaggactactacacctggctaatttttttaaaaaattattttttgtagaaacgggggtctccctgtgttgctcagaaaagtcttgaactctggccgggcatgttggctcatgcctgtaatcccagatactcgggaggctgaggagggagaatcgcttgaacccgggaggcggaggttgcagtgagcggagatcgcgccactgcactccagcctggtgacagagcaagattctgtctcaaaaaaaaaaaaaaaaaaaaaaaaaagtcttgaactcctgggcgtgatcctcccaccttggcctcccaaagtgcagggattacaggtgcgaaccatcatgcccagcctgaataacctttagatgtgaccaccgttatcctgttaaaatctcgattccttttggaattagaacataagcattgttttcagtctccagagttctactgtgtcatatactctacatgttccatactattcactgaaatcacctggattttcccctagttagtaagtatgtagatcacttttttccatccatatcagcatgtcatgctgataacactatcaatatagtgtcattttaaaacagaggagtgggggtgcagtgtttcatcatgactgtaatcccaggaatttgggaggccaaggtaggaggataactggaggccaggaattcaaggccagcctgggcaacaatgcaggaccccatcttgacaaaacat

SEQ ID NO: 59893 - DNA, 477 bp, Homo Sapiens
ttccaggtttaaagtcctttgtattaaatttttgataggtatagacatttacaaatacttcatacaaagacacaaaaggtgagcactcagcatggaagagcaaaagagaacatgcttacttgatcagcattccttgattgggtagtaattccagatgaattttcccaccttcctgagttctcaagtaggcaaattcctccagcatatcaatatctgcaggccagattcaggttaaccacatgtaaaaaaaggtgctagttttctctgatgaggaaatggggtctcggcagttgagtaacttgcccattgccatcccactaaaaaaggtgccagttctctctgataaggaaatggggtcttggcagttgagtaacttgcccattgctaccccactaactgcagactccatatttgaacccagatctgtctgatgccaaaacctgattcttatacccactaaactccctcgcacagata

SEQ ID NO: 59894 - DNA, 556 bp, Homo Sapiens
  misc_feature (543)..(543): n is a, c, g, or t
aaaagatggagtctcgctatgttgcccaggctagaatcaaactgggctcaaacgacccttccaccatagcctcctgagtagctgggtctacaggcacacgccaccatgccaggcctgaaaggagattttaaaatgagatagataagggagcaaaagtgagcacattactattcaggagaaagggactacacagagagctctccagggaaattttaaagaggaattacagcccaagagggaatcacagggcaaatatgagaagaccctgagttccgccagggatctgctcagagggaggagtcgcatcaaaatcacgttccctctctgagccctagtttccccaattataaaaacaggccgctgaatgtctactatctagtaagttcattgtgaataactctgcaacatgtggctgttaaaactactcttcaagatgaagaaaatagttttgtcagttgtgccactgataattctgcctcattcatggaaagggacagagtactctgacattaagaaacccttgggaccattggggcagggttnaaactactctgct

SEQ ID NO: 59895 - DNA, 511 bp, Homo Sapiens
  misc_feature (106)..(106): n is a, c, g, or t
  misc_feature (446)..(446): n is a, c, g, or t
  misc_feature (464)..(464): n is a, c, g, or t
  misc_feature (508)..(508): n is a, c, g, or t
tgcactaaataattgtgattttattgtttttttccacaaaatacaaagctttgcaccacattgtggtaagtgttctagcacaagaaaatcccaaggttttcatggnggggagggggagaagggtaatttacagggtgttcattttatcattcttgaaatgttaactaaaaatttcaggacaaaatatgtcaaccttgtataacatgcagattattgcttagaacttgcatatactttaaaatggcacacataaagtatacaaacatttcaaaattttaatggaaataacttagacatttattatccctccaaataaaacaaccaggaaacaaaataaagaatgccaagttgctattttaagtactgataagtcctagtaacactgattcatacattatctagtcttacattttggtaaataaaagttcttcagccttatggaaatnaattagaaggtatgttcnccaaatggtattaagtatatttgaaagacttccaaaatctttgncca

SEQ ID NO: 59896 - DNA, 1402 bp, Homo Sapiens
cgacagagagagcgagcctgtgtccaaaaagtaagtaagtaaataaatacataaaaataaatacgggtttctgtcacctcgcttcagaatcagacagctagaggtggggcctggaattggtgttgttaatgcattctccaggaatttctcctgcatagggaagttggaaaccactggcttccttctctctgagcatctcctgagactagctcctgaagtggatagaaagtttttcaagtagcagattaagttttatcccttaggctgctaataaaaaacaattgactgtgattgcgtaattttacctgtcgtacacctttcagaaggcagaggctttggttcacccctctacctccagggcctaaaacagtgcctggaggaactcaattaaacatttgttgagtgaatacgtgaattacattgcagcgaggccaatcttttaaaagttacttgtcaaattaatctatcagttagtggcatattaaagcccagcatattacaaaaaaaatttttttagtagtcactgattttataaattaggagccacaagcactataccccagtgacttctgtaagtttggttagtttagaaaggagagagcctttcccagggcgtagtgtgctcaaggtgattagccagaaagaagattcagaacaaagcatttgcttagagagtcaaatgtaattagtcacagtgtagtggtaaatcatatatcaaacttatatttggtatattgtcttatatcaaaatatcattttataaaccataagtccaacatactgctataaaaattggtttctagcaaatagagaaaattgttatgttttccaatttcacttttcatactaataaaatttgacctttacaccttctttttcaagagttcaccacaggggcaccatagatattatgtagttaagagctcaaactctggagaatattgtgtttgaccacacatagtcagggagtttgatctaacctctcaatgcctcatttctcagctgaacatggaaatagtaataataaagttcacatacttctaagtgcttacctaagtttttgagacacatccacttaataaatggtagttacagtgatgataaagaattggggtgtataaaaatacctaaaactcaaaagctaacccatttaattattgtactactggacttttatgatagtaagtagaaatctgttgcttaaaaaagaagtttctttggtggtgtgcgtctatagtcccagctacttcggaggctgaggtgggagaatcacttgaacccaggagatcttggctgcagtgagctatgattgtgccactgcactctagcctgggtgacagagcaaggccctgtctcaaaaaaaaaaaaaaaaaaaaaaaaaaaaaaaaaaaaaaaaaaaaaa

SEQ ID NO: 59897 - DNA, 728 bp, Homo Sapiens
  misc_feature (690)..(690): n is a, c, g, or t
tttttttttttttttttactctaggttatgggtcacattttcctgcttcttggcatgtctagtaattttttattggctggtggacattgagttaagtatctgaactttgccatgttcccttaaagaatggcttcgttagaagacagttaagttactggaaaatcagatttgtttgatcctttcatggcttctttttaaacgtgtttagggtaggtttgaagtagcctctattctgggatagtttagctctactactaaggcatgggatgacccttctggttctcttgaaaagtcactttggaagccaattctcttgaaaggataatatggaagttccctggctcgctcttgacaaaatactcataaaagtctacctccactataataaagctcaaaacaaagagttgttgtaaaggactgtggaatataagattggctgcagttacatagaatgaacgaaagtgtgatgagatgaatgctgagaaatgtttaggatgctcctgtaaagtagctatcagagggtcactcattaatcacaaagtttgtattttagtatgatacttaattctctctatatacaaatatttaacagccttttagtctgccacatagatgatgatgatcttcctggtccctgttgggatacagtgataccaaagatcagattaatctaactatttacctccgtangaccatcagcctacacagaggaactgtgggaaacaatg

SEQ ID NO: 59898 - DNA, 601 bp, Homo Sapiens
tttttttgatttttttttttcatttttaatggtaacttcctgtggaaacacattttaaaagaataataatttagtttttcaggccaacatttctcaaactaggaagtaagccataaacccgttaagccctctgggatattggaggcatgtatttttctttttaacaaagatttttataatattcaagcgtgacatacaaagcagcgattaatgcatttttccccctgctgcttagttagtgctatacagagaaacacgtgatgaacatcggaatggtattagtgttcctaataatatttacctatatttactaataaatttcttgtaattagatacaagaatgacaaaatatagtagcaaaactcgaaaccttagccgggcacggaggcgcattcctgtagtcccagctacttgagacctgaggtgggaagattgcttgagccagtagatgcgttactatgttgctgaggcaggtcagcctgtgcaatatagcagtagatctcttaaaacaagacaaaaaatacttcctaatcttgtaaatgtgtttatagaattcccttttgtgttcagtccacctgttcttgtccgtttggctaatgtc

SEQ ID NO: 59899 - DNA, 595 bp, Homo Sapiens
ctaaattcactttcagtttttgctttgaatagcttgatagaaaagagaaaaagccagaaacccacaaagcgatctgacaaaatttaaagataatattcggggactgatagagttgatgcatgggaggctgttagaataagattaccattaatgacacagcaagatgaggcatccagatggggaggggcagacagatgcccaggatggagacgccttctgcctcaaggtcaagggacagctgcatttctccaaagaggattctgctctacagatgggagacacttctccaaagtgtcagcgcagcacagactgcaagggatgccaccaccgtccccctccatcttcccaaaggtgaagaaagaatgtctgggaagatcccgaactcccacaccattcgtggatggaagctcagacagcaagcgacggcccagctcctcaaggccacctccgacctcggcggggtggggcagtcgtgtccactgtggggatccacgtcctgactaaccttgtgttcctagaaatccctcactggcagatcggtgcctcctgaatcccacccaaaattcccactgggaatgtgttcctgaaagagctg

SEQ ID NO: 59900 - DNA, 353 bp, Homo Sapiens
gatgaactctgtcctggctgaactgtcctggaactactccggagacctcggggcgcgagtggccctgcatgaactctacaagtacatcaacaagtactatgaccagatcatcactgccctggaggaggatggcacggcccagaagatgcagctgggctatcggctccagcagattgcagctgctgtggagcctggcctgggcagccctggaagctcggaggagaggccaccttcttaggtgcctgtagtgactgacaagcagagttagtggaaggtgactcccagtctcctggtggctctggcctcggccctgctggatccacctcctagacccggggcctcggctctggggt

SEQ ID NO: 59901 - DNA, 348 bp, Homo Sapiens
  misc_feature (341)..(341): n is a, c, g, or t
gcttaacctgtgatcctgagactccggacgcaagctacctgtggtggatgaatggtcagagcctccctatgactcacagcttgcagttgtccaaaaacaaaaggaccctctttctatttggtgtcacaaagtacactgcaggaccctatgaatgtgaaatacggaacccagtgagtgccagccgcagtgacccagtcaccctgaatctcctcccgaagctgcccaagcctgtccctcggcacagcctcggcacaaaccacattgcctgggtgggggcccagtgttacttgaaataaagtcgtttccgataggacacgttcaaaaaaaaaaaaaaaaaaaanaaaaaaa

SEQ ID NO: 59902 - DNA, 2302 bp, Homo Sapiens
tagctgatcactgatctcctctgcactctcaatatggacacactgatgactagaccagctcaggcattggaaataattggacccggactcagtttacagagggtgcacgatcattcagaatttaagagacttgttttgcttggagcaaaaagcagtatcctccctttacagatacgtctttggcattcatagtagcgaatttctggggccagagaggtgcacacagcttgccaagtgataatgtggttttggtgacagcctttactgcaacactcactggcctcatttgatgaatcactttttaaaccaagtttcagggtgttgtgcttaatgtatacagcttaagagttaagagaccaagaatatatactgtcttcagctttctcacttgattttgtttttattttgcaaagttggtgtaaggctgccctctaaatataaagtacatctttttttttttttgtaaatagctaaattatatgcaatttcagtgtaatttttctgatagcactaaaatatgttgtggccagctctgaatttctgaaatattgtttttataaaatcagcacacccacgctctttctcctttcctttttactgtatgtcttgtttaccgggtttggggaaggtataggaacttaaagtatttttaactagagaagttaaatgtaaaagtgcatcaaaacaaatgggggtgactgaaattttaagcattgatggaggcatggggaaaacatgactttatctgtctaaaggacattccctgatgaaggactgtttggacagggattgtaaatttcagcaagctttttagaaagatgctttacaatgcaagggtaaagagaggtcattatgtatgaacatgaaaagagaacataatgttgttaaatgaaaaatggagtttacaggataacataggttgattcctttttgtaagtatttttcttacagcttttaaaatattcaagcaaggagttagtgactggtgtctctggctgttttggcggtgggatgtatttatatggactctaacagaatgtcagatgtgtggcaagggctcagaatggtggtggtgcttgttgatagagattttagcagaatcactaacaggctacgaagaagtaaatcttggttgtcttttgttcatggagatgttttttatttgccaatattcgtagtttgattactctgtgattctcctgcattttgcatttacatagagaggataggagtagttctcagggtgtatactgtcttgtttttctgttggaacagagttcttgatttgccttaattagtcctctaacaatctgcaaaggtcagtgccaattgcctgttcatttacatttgtaattgtgatggcttctgattacatattccttgtcttagtccatcctaagtatatgctagtgtgtcctccccactacccgctacacacacacacacacacacacacacacacacacacacacacacacacacacacacacacacacaccccagagtggtgtgaaggccaaaaatctgactcctcatagaagaaacctttgtagcgactgcccagcctcactggcacttcagtgtctgttctggaaagccatcttggagacgctattgcttctaagttagggatataatgaagccagagtcagggaaattacgtcgataccaggcaagaaatctgagagccattatctaggagccttgttgaactgagtaattaagggcaattaaacttttctgcttgctctctgcaaaatatgctaatgatctggtctgctggaaggtggacatatgcagtgctgtttcactgctgtcagacgctgctgccctggaaggtccccctggagaaggtgtggcatcaccaggatggtcaggtgggcagtgggttgagcgtgcagcctcgtacccagcctcctgtgtcctggctggctgttccaggacttgcaccttttcagcagttatctagacctggccgcagtggcctgagttgcagtgattcgtattcactcattctttgatgttctagatccaccattcattcgttgcgttatttttctgggatgatgaagctaccagggttttgtgcgtgttgtttcagcatatgacacgtggcaccagctgtacactgcccttctggttagtgttgttcttggtcaagggctccaggctgtcttccatgctatcttcatgagtgggtggcagcacgtgcccaacgctgcccactgggagaagcattgatactgtggccactcactgcagagagggttttttttggcacagcaaaaaaaaaaaaaaaaag

SEQ ID NO: 59903 - DNA, 384 bp, Homo Sapiens
aggatatggaattcctccacaaatgggaagtgttcctgtaatgacgcaaccaaccttaatatacagcagcctgtcatgagacctccaaacccctttggccctgtatcaggagcacagatacagtttatgtaacttgatggaagaaaatggaattactccaaaaagacaagtgctcaagcagcaaaatccttacttccagcaaaatccaaactgctgtctcttaaatctcttaaactctcttcttccattaaaatgtatgttagcaaaatgggtggattttcaaataaaatgcagcttccacaaaaaaaaaacagcatcgtcgggaccagactcgtctcaggccagttgcagccttctaagccgccgacggctcactaccatggt

SEQ ID NO: 59904 - DNA, 1735 bp, Homo Sapiens
ttaaatatttttcatgtcattgtggtgattgaggatgttaatgaccacgcccctcaattccggaaagatgaaataaacttagaaatcagtgaatccgtcagcctggggatgggaacaattcttgagtctgcagaagatcctgatattagtatgaattcgctgagcaaataccaactaagtcctaacgagtatttctcattggtggagaaagacaatcctgatggtggcaaatatccagaattagtattgcagaagactctggaccgagaaacgcagagcgctcaccacttggtactgaccgccttagatggtggggaccctccccgaagcggtactgctcagataagaatcctggtaatagatgccaatgacaaccccccagtgttcagccaggacgtgtacagggttagccttcgggaagacgtgcctccaggcacctccatcctgagagtgaaggccactgaccaggacgagggcatcaactcagagatcacttattccttctttggtgtggctgacaaagctcagcacgtgttctctctggattacactacaggaaacattctaactcagcagcctttggattttgaagaagtagaaagatatacgataaacatagaagcaaaagaccgaggatctctctcaacacggtgtaaagtaattgtagatgattctcaatcttcccccaaagcatggtttggtgccagccccttcacctccttccagagcccaagatcagtgctcaagttttggaggacatgatcaccatccccatggtactgatgcttgctggatttagggagggcattttgctaccaagcctcttcccaacgccctggggaccagtcttctgttttgtttttcattgtttgacgtttccactgcatgccttgacttcccccacctcctcctcaaacaagagactccactgcatgttccaagacagtatggggtggtaagataaggaagggaagtgtgtggatgtggatggtgggggcatggacaaagcttgacacatcaagttatcaaggccttggaggaggctctgtatgtcctcaggggactgacaacatcctccagattccagccataaaccaataactaggctggacccttcccactacataatagggctcagcccaggcagccagctttgggctgagctaacaggaccaatggattaaactggcatttcagtccaaggaagctcgaagcaggtttaggaccaggtccccttgagaggtcagaggggcctctgtgggtgctgggtactccagaggtgccactggtggaagggtcagcggagccccagtgcctccttgtgcatagaccttcttctcccacccccttctgcccctgggtccccggccatccagcggggctgccagagaaccccagacctgcccttacagtagtgtagcgccccctccctctttcggctggtgtagaatagccagtagtgtagtgcggtgtgcttttacgtgatggcgggtgggcagcgggcggcgggctccgcgcagccgtctgtccttgatctgcccgcggcggcccgtgttgtgttttgtgctgtgtccacgcgctaaggcgaccccctcccccgtactgacttctcctataagcgcttctcttcgcatagtcacgtagctcccaccccaccctcttcctgtgtctcacgcaagttttatactctaatatttatatggctttttttcttcgacaaaaaaaaaaaaaaaaa

SEQ ID NO: 59905 - DNA, 1695 bp, Homo Sapiens
tcgtaaatgtgcatacgtctgtgtgtgtgtgtgtgtgtgagagagagagagagagagtacacgcattagcttgagcgtgaaacttccagaaatgttcccttgccctttcttacctagaacacctgctatagtaaagcagacaggaaactgtttacagggcctggaggcccagtcttgtcctcctctgtcaccgacttgctgtgtggacctgggacactctcttcacttctctgggtctcaattcatttactgttgaacacggacaatcatattcttccctcctggctgggaggactacaaagatctgaggaaataatggatatgaaggggctttggaaagtacaaagccatcttctcatgaggggcatgacagaaccctctttgcagagtgacctttggacgtgcagtcagttcttggagaagtgtggcccctgcagcagtgtcacggagaacacagagttccagagagcaagcctggggcaggggctgtgcaaacgtgtggtcagaggaacatcaaatcctggaaacttggtggcagggagaggcctggggcctttaccccatgccccctgggatctccactgtgactgtcccacaccctctgcccaactcttgccccatcagctgccctgcattgccttgagctgggacccctaggaaatggaaaccaggctcccctctctcaaggtatctgggaaccactgtctcaggagctgaagccaggagacctgaggggaggtctggccggagagtccgtgcgtaaagcagctacagctctgacctctctgacctgcagcctctcagggcgtgcgaagtccaaacgcactggcaacttcaccccctttgccctaacgcgggcaggctgacttggaggggtgcttccctatttacacctcagggtgaatttgttgatcaccttagctcctgtggtccttggggcttagggagaggagggaggcatgcctgggtcccaggtaagctggcaagaggaaagggccacaggctaggggaataacgaggccatgaacaagacatctcaccccagttacaatggcttttatccaaaagacaggcaatgacaaatgctgatgagaaagtggagaaagaggaatccccatatactattggtgggaatgtaaattagtatagccactatggagaacagtacagtttcctcaaaaaactaaaaataggctgggcgtggtggctcatgcctgtaatcccagcaccctgggaggccgaggcaggtggatcacttgaggtcaggagttcgagaccagcctagctaacatggtaaaactctgtctctactaaaaatacaaaaattagctgggcgtgctggcacgtgcctatagtcccagcaacttgggaggctgaggcagaagtattgcttgaacccaggaggcagaggttgcagtgagctgagatcaccccactgtcctccagcctgggcaacagagagactgtctccaaagaaaaaaaaagaaatagaactaccatatgatccagtaatcccactgctgggtatctgtcagcaaggaaatcagtatattgaaaagataccagtactcccatgtttactgcagcactatttgcaatagccaagatatggaatcagcctaagtgtccatccacgaatgaatgaagaaaatgaacacacaatgaaatattcagccataaaaaaaaaaaaaaaaa

SEQ ID NO: 59906 - DNA, 518 bp, Homo Sapiens
aacattttaagctgtatctttaatattggtaaacgggaacaatgagacagaacaacagaaaacgcagtatgttccgtcataataactgaggctggtgacttgtaacaggtaggtggatgaatatagtagcgtatttaaaattagatgtattgaaagcaggcatttctctgcgtccctcttcagatgggtcagcgagacccccagacactggattgatgacagctgttgttcccccaccccccactcccaatctcaaagcattgctatgggtcgatgtcatacttgtttactcaggaataaacaatgaaaggaactttgttaggaccaaatccttcctttcagctctgatgttgcatgatcggggtgaagtttccatcaaatgcgggcacctcaacaggtagcattttgtaaatgcctcctcctacctaccctcctccttctccctcacaagattcttcattttcggtttgagaagacgttggggatcctgggagagggtccagtgtcgtcagggcagt

SEQ ID NO: 59907 - DNA, 1864 bp, Homo Sapiens
tttgtattttcatcggagacagagtttcaccatgttggccgggctggtcttgaactcctgacctcaaatgatgtacccacctcagcctcccaaagtgttgggattataggcgtgagccaccatgcccagccccatccatgcatttctattaatgtctgctatccttgagaaactgtacataaaacatttttgtccccacatcactgaagataggacagaagcaagtgacagtcagacaactgtgtattaagggtatgctcttacagtgctcacagtttgatatatggctgtggggctgtttctctagatttgtaatacatactttgcaggtgaaagtttctggaatgtgagtatagcctcatttgggagttagagctcatttgggagttaggtgtaggtagaataacattgtgatttgaggctactgccaggttatgccttttcaaaaatagacttttcactcatttggcatggcctcccctttcttctctatttggcctgaaattcttaatttccctctctctcaagatagaattaagggcaagtgtgctggaagtgtttgatttggcaagaccaccattgatagacacatatgttgcccgggcaaaaaagatgctggttaatatttggatgagaagggtacatgttttcttcctctcccagttgtggtgatacctgtcagtttgtcagatactattttgctaccttgtcactgtggaaatttcataagacctaagcttccaactggccagggcactgttattttgggaggactaacctgtgctcacagattatagtaagacacttattcttaaataacttagaagtaagagagaaatagtggtcttgggataaagcttgaaatgtactgagtggcttcagaacaagaatggcctgttgccgatggactatattaatacatctaaggaaaagatgtgccaatctttatttttcagtctttaaaacatggttttaaataaaaaccaagtaacaaatgtatctccagagtatttaatatcatgagacatgtttacagtgtgctgtttaatagaataaaaatcatgatactctttaatacctgtacatctccatggatggaaaccttcatagtaagattgttttttcttttccttttttttctcatacttctattttttttattatcacagcaaggtgtgagaatttttttcttatacttgaaaaatgcttttctgtgattgctaaagtctctgaaatgagtaagtgttaatttacaaaatacatttcagccattaattattatttagaaaagaatacatgtatagaaagaaagaagagattgtaaaagaccagcaatggttgtgttcttctcctctgccctggtgtaacaactctggcccttgtaggtctctgccttttgtggagatgtttataataagccctcttagcctcatgcccgtcatacattcaggccgtaaagcttatcaaatagccatcctgttatgatttagctttccgggtacttggtctgcagaaagagtatatcttagcaggaggccccacatatgtgttcttttggccagattttattttattttaaagcaataatttggcccattggttgattcgtaagtctgtgtaaatttctcagcctgttgacaaactagtcttccaaatgtgcaatactaagttcatccagagtaattctttaccttttgataggtggcctgaagttgtttctagtaatagctcctgtaccacgtgccaactgggcttttcattttcaaaagtttattgaagaaagaaaattgagggctgggattataggcgtgagccacagtgcctggcaaaaaaaaaaaaaaaaaaaaaaaaaaaaaaaaaaaaa

SEQ ID NO: 59908 - DNA, 434 bp, Homo Sapiens
tttttacaaactttccaaagtgacaatggaccaggcttcagttatttctgtccaagtcctacccatttttttcctttctaatccaacccctcattttccaatgacataacccttacttaggaaactgcaacctcttctctctgtctttaaatctctatccggcttcaatccttcctaaatactccctaccagttacaaccaaggtagtcaggctgcttccctcaagtatcttccctagcaccttactgttgcctacagcaaggcacaaaatctgtagtttctttacagctacactctctttgtcacctccgggtcagtactcagacagtttcacttaattgtactatctgcccacccctcttagcatgtgaatttgccaacttgatataggctagattaacataaaaatggcagacttaggaacaaaatttact

SEQ ID NO: 59909 - DNA, 2215 bp, Homo Sapiens
cttttctgccgggtaatggctgcttccaagacccagggggctgtcgcccgaatgcaggaagaccgtgatgggagctgcagcacagtcgggggtgtaggttatggggacagtaaggattgtatcctggagccgctttccctgccagaaagtccaggtggcaccaccactttagaaggttctccatctgtgccttgtattttctgtgaagaacattttcctgtggctgaacaagacaaacttctgaagcacatgattattgagcataagattgtcatagctgatgtcaagttggttgctgatttccaaaggtaagttctgtttttgtccttaaaagaattaaatttgaccatgtgtggtggctcatgtctgtaatcctagtactttgggaggccgaagtgggaggatcacccgaggccagtagtagttcaagatgccagctctaaaaacaaaatttaaaaattatctgggatcaatggcatgcgcctgtggttccagctacttgggaggttgaggcaggagggctgcttgcacccatgagttcgaggctgcagtgagttatggttataccattgcactccagcctgggtgacagaatgagaccctgtctcttaagaaagagaattaaatgtattgtttgttaaaggagtgacataatctatatataaaataattcccatacaaatatgaaaattcatattcattttcaggtttctccttagacttaaaaaaaaaaactttacaactcttttgtacttctgagactttttttttttttttgagatggagttttgctattgtcacccaggctggagtgcagtggcacgatctcagcttgttgcaacttctgcctcccatgttcaagcgattctcctgcctcagcctcctgagtagctgggattacaggcgcctgccaccacgcccagctaatttttgtattcttagtagagatggggtttcaccatgttggccaggcctgtctcgaactcctgagctcgggtgatctgcccacctcggcctcccacagtgctgggattacaggcatgagccactgcacccagccaacttctcagactttaaaaaaatctttacattatttttcttgagtctgtaagtttgagaatgtcacatactaatttattttctataagttctctaaagagatgaactttccaaagagtagataatactcactttgcagcattccatgacattgtagatcttattgatgtctcccagattatgtctcatgttttaggccatagacattctctgagtgggtccttccagtaattccagaatagacttggcaacaggacactcaaaaggcagtgtttgggaatgggatccttggagactttcaagccaaaaggatattgcccaaacaaatctcagtttaaatgttgtgatgaggttgattccttttttcccaatttataatttctggaagtagttgtccaagagaaataccttccctgtatagttactgaaagcataaaatttggtgtatctggtaaggtcccattttgaggtattctgtcctgatttccccataaaacattgtagtagcccagacattgaatacccctgcatctaaactctgtttctcccaggccatataaaacattcctagcaaacagcttctttcttatgataggtcttgcaaaagagcaagctgtattattaagagctgactatgaaagtaggaaagcctggggttgagtgcaggctttcacacttcctaatcttgtgatttcctgccaagctacctaactactctaagcattgattttctcatctataaaatgggggtaacaccagccctcatggttattgaatattacataaaacaaagtatggaatgtgagggcgatctggctgtgacatctgtcaccccattaatcgccagggttgattcggctgatctggctggctaagtggctgtccccttcctccctcaccactccatgttcatgcctcccaaagctgtgttctcagtcaaagaggacaaccatctccactagaagaggaccagtctttggtcaagggtatacgagtagctgcgcttccctgctggaacctccagacaagctctcaagtccatttgtaggagaacatagggtagtcaagcttccaagattccagacacatccaaatgaagtgctgcatgtggcagtctgcctttcttaaaaaaaaaaaaaaaaaaaaaaaaaaaaaa

SEQ ID NO: 59910 - DNA, 1645 bp, Homo Sapiens
ggattgaattgcactgaaatgaaataactgcttaggcatgtatctttacatatgatcccagtattgcaaagtacaagagagaaaaagttattttatagctaaaatcaggaaattataaaaacaggaaataataacaagagttttaatgaaagataagtgaaaatgctgtaactttttgtttgcatgtttgtctgtttaaaattgaggtataattatgtaaactaaaaaatcatctattttggctggacgcagtggcttacgcctgtaatcccagcactttgggaggccgaggcgggcagatcacttgagatcaggagttcgagaccagcctgaccaacacagtgaaaccccatctctactaaaaatacaaaaattagcagggcgtggtggcacacacttgcaatcccatctgctcaagaggctgaggcatgagaactgcttgaacccagaggcagaggttgcagtgagcggagaccatgccactgccctccagtcagggtggcagagcaagactccgtctcaaaaaaaaaagagagagaaaatatatatatattttactgttcaatttgatgagtttcagcaattttatatatctttgttaaccaccatgcaacacaacatacagaacatttccatcacacttcaaaattcccttgcgtctttttccagtcgatactgcccctccccactagtaatcattcttctgactcctctcactgtagatttgctgtgcctgttcatgaatggaatcatacaatatttgttcttttgtgtttggcttctttcattcaatacagtgtttttgagattcatctgttttgttgcttatattagcagttcattcgtttttattgagcaatacttcattgtatgaatacaccacaatttatttctgtaatgataggcattaggattggttccagtttttgactactatgaatacaaattcagtgaaaattcttatgcaacttttttttagccacatttttatttcttttgggtcaatacctagaagtagaattgtcctgtcgtgtaaatatatgtttaactttataagaaactgaccagtagttttctgaaacgattgcatcattttacacccccgtcagcaatgtatgaaagttctagttgctcttcatgctcactaacatctgatattgttctccatttgattttagtcatgttagtagatgtaagatgttagttgcatttccctgatgagtactgatgttgagaacttttcatttgcttgttagccagtcacatattttcttttgtaaattgactgttccaatcttttacatgttcttaaatctcattatttttgttattcatatcaacagttaccaatagggcatttttatattttatcactagaaatcctttgtcacatatacatacctatattgcagatatttttcctcaaaggcatgtcttgcttattcattttcttttccttagtgatgtcttttgatgagcagaaatgtcttgatcatggtagttttatagtagtcttgaaatcaggtgatgtaagttatctttttcaagattgttttgactaatatagattctttgatttttccctaatgtggcaatcaacctttcctgccaccagaggtatgctagaagaaaaaaaaaaaagaag

SEQ ID NO: 59911 - DNA, 1974 bp, Homo Sapiens
aaaactccacaagcccccaaagcgccaccacctctgctgtgttggaacatccacatctccaacagacagacctctgtgttccggagacaccgtgcaggatctgagtgtgtttgttatccaacgggtataagagggaaatcaaacattctttcatatcattagaagccctgtgcaaacacagccccgtgcacaaaggcctttcccgagcccataacaaggaactgtttgtcctggctgcctgtctttagcagtcggagcagggccaagccgacagtggtgtcatgggccctactgcgattttgctttcttggaccaaaattttacaggtgtcatgggacagagctcaccaggtagaagttgaatcagatcacctgctgggaaccttcagtaaatgccacactgcacaagctcggagctgtgatggaacctgacaaagagcttgcacccaaccacagaaaagtcaaatgatcattttgtacatttgcctttgtgcacgggaattgactagccacacatgccggcagccgggtctcgtgtctgcctgcaaatgatgtaaccaaagagaaacctgggctcaggatcaaatgtcttcatcctcactcccttgaagaacacagacttaaccctgcagcatctgaacactatcgaggggttggtttcttcacccaagagcattttgatcagttcagcccagacccatatgtttttctggctgctgggattcattgagtccatttattctgtctcctagagtggcactgtccagtccatttgcctcatgctgcacgtggctgttgagcccctgaaagtggctagtctgaattatgatgtgctgtaaggataaaacgtgctttggatttggaaagtttagcacaaaaaaaaaaaaactgtaaactatctcattaataattatattagctatatgttggaagtatttttatctattgggttaaataacatacagtattcaaactcatttcacctgtttctttttacttcttttaatgtagctgctggaaaatttaaaatcacaaatgtagctcgtattgtttgtattagacagggctgggctagtgcttgaaggaagtttaggtttgtagtgccatctgctggctcatccggagcagacgtgaatgtaaacaagaatgaagcaatctgagctaacccacacgttgtctcttagcctggcagcacacaacctttttattccaggagcttctgaagcaggaccagactgaacccagaagctgctgaatccccaagagcctcgggaaggggagtgacaaactgctcaaaggtgcaagcctgtgtcacctcatgggtgccaaggaggctcttgagatagagtagtggtttgctgctcaccttccgcacttggggctctttcatgcagtctttttcactggttgctattcttaagaaatatttcaggccaggcaccatggttcacccctgtaagcccagcattttgggaggccaaggcgggcggatcacttgagaccaggagttcaagaccagcctggccaacatggcaaaaccgcatctctactgaaaatacaaaaattagctgggcatggtggtgcacacctgcaatcccagctactcaggaggtgaggcaggagaatcgcttgaaccagggaggtggagtttgccgtgagtcaaaatcgtgccactctactccagcctgggtgacagaccgagactccatctcaaaagaaaaaagaaaagaaatatttcaggccaggaatagtggctcccacctgtaataccaacactttgggaggttgagtagggagaatcacttgagcccaggagtttgaaaccagcctgggcaacattgggagacttcatctctttttttccccttctctgtggcgcaagacctcatctctacaaaaaaaaaaaaaaaaaaaaaaaaaaaaaaaaaaaaaaaaaaaaaaaaaaaaaaaaaaaaaaaaaaaaaaaaaaaaaaaa

SEQ ID NO: 59912 - DNA, 1545 bp, Homo Sapiens
ttgtagaatgtaatctctggtaacactgactttaagaggcaatgagtgtgtgtgtgtgtgtgtatgtgtgtgagtgtatatatattcccataggctagcaaatgaaaactgacagtgaacttttcctctagctctgatagagtgactggcattgggcatttcctcctggcatagacaactctaaagctggtaaaatgtgcatgacaaatgttttaaggcattaaacaacaggcagcacagaactgtaattcttgagagaaaggaaacatgagaggtgaggctcagtttgccccagtgctctgcctgggaccgtttcctgcacatctccagcagaactgtggcctcactgacctgaggaggagattggagctgtggtctcagaagcagctgagatttggggagccaagtgcaagagcagaagctgaggacaagggtttccagaagtcttgatgaagactcattgctggtttttggctgaaggctgcccacaccatggcaggcagtacacagggcctagcagtggttgccttctgcagggctgggaatgaatgaaggcattattgctatgcaccaccaggagatgctggagctccagctcagccagaatggagagaactcattgagcatctcagtcaggcattcagttgaaacctcagaaagtccacaccatagcagtaaaagctataccctcaaataagggccacaccttagcccataactagaataagttcatgtccatgaaaggaaagacatgaagcctggtatgaccaaaaagatcagttggtgatttccctgctgccaaaacaaaactcagagcacttctaatttaaaaagagattatctagaatcatgaaaacattttgtctatagtatccagaataaaatttttttaaaaaattgctagagtttcaaagaaacatgaatataagacccatgatcaaggaaaacaacagtcaatagaaacaagccctgagattaaatgcctttgatgttgaaattttcagacaaggattttaaggcagttataaatatagccaaggaattaaaggaaaacatggtcataatgagtaaacagagggaaagttgcagtagagaaattataactgtaaaaaataaaattttagaactgaaaatatgtagtagatgggtataataatagttaagaatggcagaagaggccggggcacagtggctcgtgcctgtaatcccagcactttgggaggccaaggtgggcagatcacgaggtcaggagattgagaccatcctggctaacacactgaaaccccgtctctactaaaagtacaaaaaattagccgggcatggtggcgggtgcctgtggtcccagctgctcgggaggctgaggcaggagaatgatgtgaacccgggaggccagagcttgcagtgggccgagatcacgccactgcactccagcctgggcgacagtgcaagactccatctcaaaaaaaaaagaaaagagtggcagaagaaatgctagccaaactgcaggcagatcaagagaattatttgacctgaaaagcagagatt

SEQ ID NO: 59913 - DNA, 4590 bp, Homo Sapiens
tcaggggtctggcccatctccatgcccacaaggtgatccatcgagacatcaaggggcagaatgtgctgctgacagagaatgctgaggtcaagctagtggattttggggtgagtgctcagctggaccgcaccgtgggcagacggaacactttcattgggactccctactggatggctccagaggtcatcgcctgtgatgagaaccctgatgccacctatgattacaggagtgatatttggtctctaggaatcacagccatcgagatggcagagggagccccccctctgtgtgacatgcaccccatgcgagccctcttcctcattcctcggaaccctccgcccaggctcaagtccaagaagtggtctaagaagttcattgacttcattgacacatgtctcatcaagacttacctgagccgcccacccacggagcagctactgaagtttcccttcatccgggaccagcccacggagcggcaggtccgcatccagcttaaggaccacattgaccgatcccggaagaagcggggtgagaaagaggagacagaatatgagtacagcggcagcgaggaggaagatgacagccatggagaggaaggagagccaagctccatcatgaacgtgcctggagagtcgactctacgccgggagtttctccggctccagcaggaaaataagagcaactcagaggctttaaaacagcagcagcagctgcagcagcagcagcagcgagaccccgaggcacacatcaaacacctgctgcaccagcggcagcggcgcatagaggagcagaaggaggagcggcgccgcgtggaggagcaacagcggcgggagcgggagcagcggaagctgcaggagaaggagcagcagcggcggctggaggacatgcaggctctgcggcgggaggaggagcggcggcaggcggagcgcgagcaggaatatattcgtcacaggctagaggaggagcagcgacagctcgagatccttcagcaacagctgctccaggaacaggccctgctgctggtaacgggtccctcagcgtcctctgggaagatgcttttcagagcttctttgctggaacgggatgggaacacttcaagggaagggattcacccaggacatcaagggaatacatctcctctctaggcagttggagaaaagagagggcatgcctgctctaactcccagggccacaccctgctgagccctctctccctacccttgggcccaggaatacaagcggaagcagctggaggagcagcggcagtcagaacgtctccagaggcagctgcagcaggagcatgcctacctcaagtccctgcagcagcagcaacagcagcagcagcttcagaaacagcagcagcagcagctcctgcctggggacaggaagcccctgtaccattatggtcggggcatgaatcccgctgacaaaccagcctgggcccgagaggtagaagagagaacaaggatgaacaagcagcagaactctcccttggccaagagcaagccaggcagcacggggcctgagccccccatcccccaggcctccccagggcccccaggacccctttcccagactcctcctatgcagaggccggtggagccccaggagggaccgcacaagagcctggtggcacaccgggtcccactgaagccatatgcagcacctgtaccccgatcccagtccctgcaggaccagcccacccgaaacctggctgccttcccagcctcccatgaccccgaccctgccatccccgcacccactgccacgcccagtgcccgaggagctgtcatccgccagaattcagaccccacctctgaaggacctggccccagcccgaatcccccagcctgggtccgcccagataacgaggccccacccaaggtgcctcagaggacctcatctatcgccactgcccttaacaccagtggggccggagggtcccggccagcccaggcagtccgtgccagtaaccccgacctcaggaggagcgaccctggctgggaacgctcggacagcgtccttccagcctctcacgggcacctcccccaggctggctcactggagcggaaccgcgtgggagtctcctccaaaccggacagctcccctgtgctctcccctgggaataaagccaagcccgacgaccaccgctcacggccaggccggcccgcaagctataagcgagcaattggtgaggactttgtgttgctgaaagagcggactctggacgaggcccctcggcctcccaagaaggccatggactactcgtcgtccagcgaggaggtggaaagcagtgaggacgacgaggaggaaggcgaaggcgggccagcagaggggagcagagatacccctgggggccgcagcgatggggatacagacagcgtcagcaccatggtggtccacgacgtcgaggagatcaccgggacccagcccccatacgggggcggcaccatggtggtccagcgcacccctgaagaggagcggaacctgctgcatgctgacagcaatgggtacacaaacctgcctgacgtggtccagcccagccactcacccaccgagaacagcaaaggccaaagcccaccctcgaaggatgggagtggtgactaccagtctcgtgggctggtaaaggcccctggcaagagctcgttcacgatgtttgtggatctagggatctaccagcctggaggcagtggggacagcatccccatcacagccctagtgggtggagagggcactcggctcgaccagctgcagtacgacgtgaggaagggttctgtggtcaacgtgaatcccaccaacacccgggcccacagtgagacccctgagatccggaagtacaagaagcgattcaactccgagatcctctgtgcagccctttggggggtcaacctgctggtgggcacggagaacgggctgatgttgctggaccgaagtgggcagggcaaggtgtatggactcattgggcggcgacgcttccagcagatggatgtgctggaggggctcaacctgctcatcaccatctcagggaaaaggaacaaactgcgggtgtattacctgtcctggctccggaacaagattctgcacaatgacccagaagtggagaagaagcagggctggaccaccgtgggggacatggagggctgcgggcactaccgtgttgtgaaatacgagcggattaagttcctggtcatcgccctcaagagctccgtggaggtgtatgcctgggcccccaaaccctaccacaaattcatggccttcaagtcctttgccgacctcccccaccgccctctgctggtcgacctgacagtagaggaggggcagcggctcaaggtcatctatggctccagtgctggcttccatgctgtggatgtcgactcggggaacagctatgacatctacatccctgtgcacatccagagccagatcacgccccatgccatcatcttcctccccaacaccgacggcatggagatgctgctgtgctacgaggacgagggtgtctacgtcaacacgtacgggcgcatcattaaggatgtggtgctgcagtggggggagatgcctacttctgtggcctacatctgctccaaccagataatgggctggggtgagaaagccattgagatccgctctgtggagacgggccacctcgacggggtcttcatgcacaaacgagctcagaggctcaagttcctgtgtgagcggaatgacaaggtgttttttgcctcagtccgctctgggggcagcagccaagtttacttcatgactctgaaccgtaactgcatcatgaactggtgacggggccctgggctggggctgtcccacactggacccagctctccccctgcagccaggcttcccgggccgcccctctttcccctccctgggcttttgcttttactggtttgatttcactggagcctgctgggaacgtgacctctgacccctgatgctttcgtgatcacgtgaccatcctcttccccaacatgtcctcttcccaaaactgtgcctgtccccagcttctggggagggacacagcttccccttcccaggaattgagtgggcctagcccctccccccttttctccatttgagaggagagtgcttggggcttgaaccccttaccccactgctgctgactgggcagggccctggacccctttatttgcacgtcaggggagccggctccccccttgaatgtaccagaccctggggggggtcactgggccctagatttttggggggtcaccagccactccaggggcagggaccatttcttcattttctgaaagcactttaatgattccccttcccccaaactccagggaatggaagggggaccccgccagccaaaacattccccccattcccgacccccctctcctcttctagcccatgcccttccccggtggagggagggagcagggagccctcactctccacgccccttgcttgcatctgtatatagtgtgagcagcaagtaacccttctcctccctcccccctcccccctcctcaatgtagtggccttggatatcctgtttgttaataaagacaattcaaccagctcccaccaaaaaaaaaaaaaaaaaaa

SEQ ID NO: 59914 - DNA, 434 bp, Homo Sapiens
tttttttttttttttttcctccttgaaaggtgcaacagaagaagatgaatcacttctttttttcccctggatctgtcatacaagaatcaaggacttgtcaatgactccaaacagcagggccttgacaactagtcaaagacaaagttgttttgtccagcatctctcctttctctggaagcattttcctcccaattaatataagttatgaggctgcactgaagagctcaataaactgacactgaaggacataagttgcttttttacactgaaaaccatggtaaactgatatatacagcttgtgtccatgaaggtggaggtgccagaacttctggtaacctctggctgcatcactgctgctgcactggggcagtcttgcattttctgatattctctcccttcctgggaatgttccataaccctcagcctcgtgccca

SEQ ID NO: 59915 - DNA, 1205 bp, Homo Sapiens
ctcccaccacagaaggcgtgaagaggcgcgttaagtccccggggagcggccacgtcaagcagaaagctgtgaaaagacccgcaagcatgtacagcactggaaaacgaaaagagaatcccatcgaagacgatttgatctttcgagtgggtaccaaaggaagaaataaaggagagtttacaaatcttcagggggtagctgcatctacaaatggaaagatattaattgcagacagtaacaaccaatgtgtgcagatattttccaatgatggccagttcaaaagtcgttttggcatacggggacgctctccggggcagctgcagcggcccacaggagtggctgtacatcccagtggggacataatcattgccgattatgataataaatgggtcagcattttctcctccgatgggaaatttaagacaaaaattggatcaggaaagctgatgggacccaaaggagtttctgtggaccgcaatgggcacattattgttgtggacaacaaggcgtgctgcgtgtttatcttccagccaaacgggaaaatagtcaccaggtttggtagccgaggaaatggggacaggcagtttgcaggtccccattttgcagctgtaaatagcaataatgagattattattacagatttccataatcattctgtcaaggtgtttaatcaggaaggagaattcatgttgaagtttggctcaaatggagaaggaaatgggcagtttaatgctccaacaggtgtagcagtggattcaaatggaaacatcattgtggccgactggggaaacagcaggatccaggtttttgatgggagtggatcatttttgtcctacattaacacatctgctgacccactctatggcccccaaggcctggccctaacttcagatggtcatgttgtggttgcagactctggaaatcactgtttgatactgatatattctcgtcatttgttcttttatgaatcaaaatgttgactgcctatttaaagaaaagaatgaacgctgtgcatcaaagtgtttgtatgttcgtagctacatacgtaccacagtattttggatgctttagtctacaatgaaactttcaattaattctgtcttgaaacataggagaaacaggattcatgtgtatctctttaccatgcacaaaatctcaaatcattataataaagcttgttttctccaaaaaaaaaaaaaaaaaaaaaa

SEQ ID NO: 59916 - DNA, 448 bp, Homo Sapiens
ttttttttttttttttttttttccatgctatgcaaagggaattttatttataaaatatcccataagatagttctaacatatccttattcttcctttcagcttcatgttatacatccagaacacgtgcattatgtagatgaaagagtccataatagcacttaaaagttaaaattatcactgttagcctaaacaacaacttaggtataaaaatccagacctctgctaatttactacaaattgtacatcttgacttattaaaaactccttttttaagattccagttgttttcacagggagacaaacaagatgtcctataaaattcttggaaggatttgcttgattctactggaagaatgacattagccttctttgtagatgcatctcaggactatgatgagttgcaaattctccattctgaaataagtctcctgccacattcattctacca

SEQ ID NO: 59917 - DNA, 524 bp, Homo Sapiens
ttgtgagaattgagtactcctcagatatataactataatatatctattaaaaatataaatatatataagagtactccataggctttcaactgacaacgtttacttatataatctagcccaataacaaactcaactgatcatatgtgatacgtacattttattgaacactttttttgatgccaggtaataggtaatactgagcacttcatatgtatttgtttaaacctcaccacaacctagaaaggtaggtatgactacatacatgagaacactgggcccagaagttaaagtgtatcactctgtggcacataactattaagagatagtaacaggactccagggaaggcctgtcttaactccaaaatgcctcaaatctctattttgtactgcaagaccttccacggtccaggcaggaagcaagagcatatgtattcaatggagactgacaaacaggaaggtctgtggcccatcatttagctccagccaattgttactaagctagaatataggctcagtattgctgg

SEQ ID NO: 59918 - DNA, 710 bp, Homo Sapiens
tttttttttttttttattctaaaatacaacgtttattaaaaaaacatgcgatcttgccaataggccaattccatgagaacaaaagattttttttcccacctacaagtctttttagagaaacaaacggaactatttccagatgaggcggggtgtctgggaggggctgtgggtggtctggggctggtgactggtgaggttgggtggccctctgggggtccgggaggcactttccgttttgcttctgttggagatgttcccgtcggatgctgaagaacaagcctgccggctgggccactccgacctgggctgtggcacccgtgtggccctcggccctcctggcctgccgttccccagggccgtcaccgccgatagcggtagcgcttgaagtgaaaccacagctggaagatgccgttggcaaactggcagcggaagccgtggcggtgcgagtattcccactcgcgggtgacgatcttgaaagcgatgtcctcgtagggcggccccgcgtggaagcgcacgatggcgaaatccttgttgtcggcgcaggccttcaagaagtactctggcgtggagcgcttgtcgataagtctggggtaaagaagtgaacttgtatccatggacgaacttgggcggaggttggtaaaatcgaaatgcgtctggttgaccttggtccactcgaaacccgtgtgcaccccgttgaaagagcgccgctt

SEQ ID NO: 59919 - DNA, 910 bp, Homo Sapiens
cttcagtgakcatgatattatgtacatcttgtgtcatgtgtgacaattctcttgggttcttttcagcagtgttgagaaggtggtgtaaagaacagctggtccasgcccctcagcaacatttgaccagtcttggtagaatttcgaggaggaaacgctataagtgtgcgaggygacaaatggggcaaagacatctgamgcccatasgctcmaagaaggagcctgtgtmtgaactattaatgggtttgggagtccttaagggtgagagggvgggggrggggccacatccaggcatctctgaggcactgaaggaaattctgaggtgcttctgtctgtgagccccaggccccatgaggtccagctgactttccaaccccacrgtcccaggagaraagcaacagctgcttttcctttcargtgaaattttcataggtargactttcaggaatctcaagawcattctgttgtggtggtggcaccactgtaagttgaacacttgtrcatacatggtgttctctccaaccacagactcaacttccgtgacatatggagtgacgggatcawagtctgcttggccctcaggggctgggtcatgtccagcgccctcctgagtgacctggtcaaatacctcatatcttccactgatgggcttgtgcacctcaggcctgtcctcatcctcctcagttgtgaggttgctgtcagagctgctgtctgaggtgggtgtaggctgttgctggcaggcctgaggggagtgtccacttctcatatcttgggagarcacaaagtatagcgtgtggccagctgtgggttctggtgtatccgctggggcctcagcttggctggaacaaaaggctgggactgaacacgttcttttcgcttccaatgcacagctgaagatcccacgcmcagaagg

SEQ ID NO: 59920 - DNA, 2346 bp, Homo Sapiens
cacctgcctttcaaaactggcccacctcctgctgcccaataacctgatgttgtcactctcatatttaaaacccataagtgctgccgggagcggtggctcacgcctgtaatcccagcactttgggaggccgaggcgggcggatcacaaggtcaagagatcgagaccatcctggccaacgtggtgaagcccagcctctactaaaaatacaaaaattagctgggcggggtggcacacacctgtagtcccagctacttggcaggctgaggcaggagaattgcttgaacccggaggcagaggttgcagtgagccgagattgcactactgcactccagactggtgacggagcgagacgctgtcaaaaaaacaaaacaaaacaaaaaacatatcaatgctgatgaaccaagtgcaaagccctgagcttggccaggcaacatagcctggaaacctgacttttaatccttactttgctctattcccccaacatacacacacttcatacaccacacctaaaagagacttcccacagttttccaaaaatgactcacatttatatttcctgtttttccctttgcccaccctgccctctctccctctgccttcatttttttaattaacctctggaactcaggtgctcctgctccaaggtttaggtcaaaagttacctcctccatgaagctttctctcattctcccacaatgtgtgaaagccccattctcagatttgcttagttgtgcatttgtatattctaccttgcactacagtcatttgtatatttatcttatggtttctgtgccttaggaaaggtacactgtcttaatcatctttgttcaatacagtgcctagcagagtgcctcaagtataatatgtgctcaataaataatagatgcatttttccatgcatattttctactatatcgaagtggaaaatatatccatgtgatatagtggaaaatatctcatgaagagagatacagtgaggaaaatatctcatgaagaccaaaaagcagaaatccaagttttttcttttcattactatcatcagtgattattaattttatgtgtcaacttggttgggcttagggatgctcagatagctggtaaaatattatttctggatgtgtctctcagggtgtttctgggggaaattagcatttgaatcagtagactaaataaagaaaatctgccctcacaaatgtgagccagcatcatccaatttattgacagtttagatacaacaataaggcagaagaaggtgaactctctttccttgagctgggacatccatcttctcctgctctgacattggagttcctagttcttgggacttcagattctcccctgaagtttctcaggccttttggcatcagactggaagttatgccattggctcccctggttctcagacctttggactcagactgaattataccactggctttcctggttctccagcttcaagatgacatattgtgagacttttcaacctccataattgcatgagccaatttccacaatatatctcctcttatgtatctatatatttcctattggttttgtttctctacagaatcctaatagatcatctaattgtttatctaacaagtattttcctccctagacgatatgttgggcactagggacacaaaaataaaaacacagacatctgcactcaataaacttacattcaatatcagagagattggcacagaatacaaataaaatgagatacatgcaaaataatatgaattgcaaaattacggcaattcaccaccaactaggtgtgtgaccgtgggaaaatcacactgtgagctaaatattagcaagtttaaaatgcaaaatcagaggcagtctatgaattggactttgctaatggcctcctttgctgatggatggcacattggtgttagaaagtgcttatttttgcaaaggtccattattgatgctttaattctaaggaaattatgtaggcagaaactaaagaaaggttaaaaaaacagcagctaaaattgatacttagacaataaaaaactaattataagtgatttatcagcaccactagataactacattggtgaaatttaaggccatgaaatgcaggacaagcctcgtaggaagcaaggtcccagtggatgagatgctgtcctctgggctcctaaccttccaccactagtattcaccatatctgattggaaatgtgtgcatgtgagtcggcctcccctctatgatgtgagtagggacctatttttgctcatctctgtatcctctacacacgatgcttggcacacagcaagtattcaataaatgtttatgaatgaagcaatcaaaaaaaaaaaaaaaaaaaaaaaa

SEQ ID NO: 59921 - DNA, 129811 bp, Homo Sapiens
gatcacgaggtcaggagattgagaccatcctggctaagatggtgaaaccccgtgtctactaaaaatacaaaaaattagcctgtagtcccagctacttgggaggctgaggcaggagaatggcatgaacccgggaggcggagcttgcagtgagccgagatcacgccactgcactccatcctgggcaaaagagcaagactccgtctggaaaaaaaaaaaaaatcactagagggtaccatgaaagctcataagaggggacatttcatccacattggcgctgaatctgggatgtgcccctggaagaagggtttcctgagagttttaaaggacacgtagaaattagccaggaggacagtgtgggggttgacttgtgtctgaggaccctgcatttcttcagagtggatgtaagaaggatttggggagtgatgtggaactgcaggggctacagggccaggtggggcccctgctaaggggctcttagcttttatcctgtggataggtgggggcctttggagaattaagcagggaagtaatatgattaggaagatgattctagtggcaaagtagagaatgggttgcagaggggcagggccagaggcaagagaaccaaggaagaagcttatgcagttgatcaagtaagatattcggatgtcatgaagaaagcagacttgagaaagaatgaagtggaatagatgagttgtgacctcctggacattggagagaggtaggagtcaaagaggtttgtggctaggatggctgtgggtgggtgatgttactgttcactggatggagactgcaaaagcaggggctttctggtcagggaagatgatgaattcagcgttggacatgttgattctgttgttgttgttgttatggagcttcactcttgttgcccaggctggagtgcaatagtggtgtgatcttggctcactgtaatctctgcctcctgggttcaagcgattctcctgcctcagcctcctgagtagctgggattacaggcatgctccaccacgcctggctaattttgtatttttagtagagacagggcttctttcatgttaggctggtcttgaattcccgacctcaggtgatccacccactttggctcccaaagtgctgggattacaggcgtaagccaccatgcccagttgacatgttgattgttgatttcaaagtaccttctggatctcctggcaccatctctcactggctgaactccaaccagggagcccgctgatgcagtccattcagattctccctggatctcagggagcacagcagggagggatggaaagtggatttggagggacaaacagattatatctagcagattaatacatgttataaaaaagatacacaaaataaggattgaaataccattagcaggccaggcacagtggttcacacctgtaatcccagcactttgggaggccaaggcgggcagatcacgaggtcaggagatcaagaccattcgggctaacacagtgaagcgccatctctactaaaaatacaaaaaattagccaggcatggtggcaggcacctgtagtctcagctactcgggaggctgaggcaggagaatggggtgaacccgggaggcggagcttgcagtgagccgagatcgcccactgctattagcagcaaaaggattgtaaggattgttggtggctttgcattgcatagtgttattagagtcagattctcctccatacttaggtattttttgagggcctgtactttaccctcaatggacatgagacatagttcttgcttttggagagttttgtgagggttataatacatcatggttaaatagttcccttttttttttttttttttttttttgagacagagttttgccctgtcacccaggctagagtgcattggcgtgatctccactcactgcaacctccgtttcctgggtttaagctattgtcctgcctcagcccccctaatagctaggactacaggcacgtgccaccatgtccggctatttttttgtatttttggtagagacagggttttgccatgttgttcaggctggtgtcaaactcctggcttcaagcaatccacctgcgttgggtgtcggcctcccaaagtgctgggattacaggcgtgagccaccatgcccagccatggttaaatagttctgatagtggttatctctgtgtagggaatctgagtgactggaggaccgggaagggaagttttttttttttttttttttgagacagagtctcgctctacccaggctggagtgcagtggcgcaatctcggctcactgcaagctccgccccctgggttcatgccattctcctccctcagtctcccaagttgctgggactacaggcgtccgccaccacgcctggctaatttttctatttttttagtagagacggggtttcaccgtgttagccaggatggtctcgatctcctgacctcgtgatccacctgcctcggcctcccaaagtgctgggattacaggcgtgagccaccgtgccccgccaagattttttttttgacttaattttcctttgttcgtttggatttgtatcatgactgtattatctattcaaaaatataaattgaagttttaaaaagcaatcttagtgatcatataattaagtaccaaagtgaacggtatggaccagaggtagtggtggactgttgacctgtgggctgaatctggccctcagaagggttttatttcaccgacatggggcctagcattttctttcatggagtgatcaacaagtcataaaggcagatttattggaggccatggaggctcagaggtgactgaggctttgctgtttggtgcctgggaggaaaacttgtgtgacggggcaatcaggaagcctcatttatggccagttagatttgggtgactggtgaggcatgagaatggaagggaccagcaggcagcttggaagtcagaatctggtgcaggtgagcagccagggggagatgcacacttggcggttgtcagcatggagatgcattgggcagggataaggtggaaatccagcaagataggaatttgggccatgtgaatgctggagacccccctgccacttcccctgctcaggcctattctatgtgaatagacaagttctgtgaacaagaaagagggaaacgcagaagggcaaagacagctttgaggaacatggagcagggatgagaaaaatcagaggagccactaaaggagaaagggaagcactaggcgaaaagcggggcggagagccagcaggtgagcagctctgtgactgcccctcctggatggcctgtaatctagggccagaagagttttattttcaggttcaaagagaaaggacccatttccccatcttaaccctcttttttatttttttgagatggagttttgctcttcttgcccaggctggagtgcaatggcgcgatcttggctcactgcaacctttgcctcccaggttcaagcgattctcctgcctcagcctcctgagtatctgggacacagggatgcgccaccatgcccgactaattttgtatttttagtagagacggggtttctccatgttggtcaggctggtcttgaactcctgacctcaggtgatctgcccgccttggcctcccaaagtgctgagattacaggcgtgagccaccatgcccagcctcccatcttaaccctcttaacccttcagtgtttacatgatatccagcttttgcctcatcctgcctcccacagatgtccagaccaagatagaacctgtctctccatgttcttccgtcaactctgaggcctccctgctctcagccgactcctccagccaggtgagcaccaccttccttccttcctccaggttttccagtgagttcctcctgacctagaggtatgagagctttcccttcttcagctccttctcctcgacactcttcctgactaatgtatctctggaatgccccacataggcttttataggagaggaggtcctggaagtgaagacagagtccctgtccccttcaggatgcctcctgtgggatgtcccagccccctcacttggagctgtccagatcagcatgggcccatcccttgatggctcctcaggtaatggagtctcctgacacttggaatccctagtgagaggcctttggtcctgacatttcttgttcttttctctcaccttccttcaggcaaagccctgcccacccggaagccgccactgcagcccaaacctgtagtgctaaccactgtcccaatgccatccagagctgtgcctcccagcaccacagtccttctgcagtccctcgtccagccacccccaggtactgaagaaggagaaaagggccgggcatggtggctcacgccggtaatcccagcactttgggaggctgaggcgggcgaatcacctgaggtcagaagtttaagaccagcctggccaacgtggtgaaaccttgtctctactaaaaatacaaaaattagcgtggagtggtggcaggcgcctgtaatcccagctcctcgggaggctgaggcaggagaatcacttgaacccaggaggcggaggttgcagtgagccgagatcatgccactgcactccagcctgggcgacaaagcgagactttgtctcaaaaaaaaaaaaaagaaaaaagaaaaaccaaaaaataaaaataaaaattaattaattaattaaaaaaaaaaggccaggcacagtggctcacgcctgtaatcccagcactttggcaggccaaggcaggcggatcacaaggtcaggagatcgagaccatcctgactaacacagtgaaaccccgtctctactaaaaatacaaaaaaattagccaggcgtggtggcgtgcgtctgtagttccagctgctggggaggctgaggcaggagaatggcgtgaacccgggaggcggagcttgcagtgagccgagatcgcaccactgcactccagcctggtcgacagagcaagactgcatctcaaaaaagaaaaaaaggagaaaaggaggcgggctgcattgaccctgtcagagagcttgcagccattgaggctgcccaatccttgggtgctcttgtgtgggtgtggacacaaggaccccacccagcgcacagccctctgacctctgctcacttgccccagtgtccccagttgtcctcatccagggtgctattcgagtccagcctgaagggccggctccctctctaccacggcctgagaggaagagcatcgttcccgctcctatgcctggaaactcctgcccgcctgaagtggatgtaagtgttggggaggagagaagtagggcgagtgatgggaagggaagagggaagtcttgccatagagagaactgtgggatgaggagggagtcgatacctaggagaaaaaagtgaggaaacggacccattagatcattctgagggtcagaatggactcctgtttctatatgaatatcaactccaggtagttttagggtcctttaggtttgctgtcactgcagatggagaaatggggttggtctccataaattaaaggcaaggaagtcgtactgtactatacgactacggtcatggccatagttggggagggaggctgcctcctaggggaaaatcaggtaaactgtataagcagtataacaaggttaaactttgaaccctacaaatgtgggctgacaggaagaaagagttacgaaggaaagagtttccaccagcatggagaaagttcttcccacactctaacctttcccacctctgaggagcagtagcagggaatgtttgaaagaagggccccttccctagcgtgtttgagtagagaggaaaaacctctctggctatgtaggtgggtcaggaaggcaggggaatggccatgtgagctttgggtaaatcattccttggggtttgagagcatagtctccttctgccaactcatctgtcattcttttttgaccttccgggtgcctaggcaaagctgctgaagcggcagcagcgaatgatcaagaaccgggagtcagcctgccagtcccggagaaagaagaaagagtatctgcagggactggaggctcggctgcaagcagtactggctgacaaccagcagctccgccgagagaatgctgccctccggcggcggctggaggccctgctggctgaagtaagaccagtctgtccctgggagaccaacaggaatacagcctccttggaatgattcccctttttcttgtctccttctttgtaccttagaacagcgagctcaagttagggtctggaaacaggaaggtggtctgcatcatggtcttccttctcttcattgccttcaactttggacctgtcaggtgagaccttccttgcttcactagaaccttccaggtggagcccacgttacagcctcctagctgcctgctttggcccaggccatttccttctgcttatatacaaatggttctggtgtccttggcaccgatgatgtgtctggccagccccttcctgctccattatttgtctttttttcttggagatggagccttgttctgttgcccaggctggagtgcagtggcacgatctcggctcactgcaacctctgcttcctgggttcaagtgattctcctgcctcaacctcccaagtagctgggactacaggcgcacgccaccatgcccggctaattttttgtattttttagtagagacagggtttcactgttgttgcccaggctggtctcgaactcctgagctcaggcagtctgcccacctcagcctcccaaagtgctaggattacaggcttgagccacctcgcccggcctcctgctccattatttttccagtggagagtagatgatggtgataatgctggtagaaatagtgactattaagtgcttactgagttctaggctctaggtgatgcactgtcttttttgtatgtagggaccatccttattcccatcttacagaggcagactcaggcttgtataacagattgcaactcaagcagtccatctgcagagtctttattcttacctagatacttgatacagctgaaattcttcattgtgctcagtccttctttatccacagcatcagtgagcctccttcagctcccatctctcctcggatgaacaagggggagcctcaaccccggagacacttgctggggttctcagagcaagagccagttcagggagttgaacctctccaggggtcctcccagggccctaaggagccccagcccagccccacagaccagcccagtttcaggtgaggagagagagagagggccccctctcgtttgagggtatgagttggtcttctccccgctttcagtgagggggacccaaagctttctcttgccgtcatcgccttctttgttgtgggagtgctgggcagtctccaagtgttgtctccttcctgcttcactccagcaacctgacagccttccctgggggcgccaaggagctactactaagagacctagaccagctcttcctctcctctgattgccggcacttcaaccgcactgagtccctgaggtgtgggattcattgctggggcatccagctcccccggcctcccaaggccttctgcagtcagcctggctggcctgtgtactaaagcgccagtgctccctgccctctcctcactcctgtgggtgggcaaggagggtgggaatcttggcctggcatggaggtcctgagctcctccatttccccaggcttgctgacgagttgagtggctgggtccagcgccaccagagaggccggaggaagatccctcagagggcccaggagagacaggtagggcgggtggctggttcaaggaaggccacttgaagacaagggctaaaggccttgtctggggatttctagtgggcatctcgctgtggaagtttgagggatcgtttgaaggaagtggagggttgagtgggaggtggcatcagcttccaggggctgtttgtctctttcccttttcccttcaccctctccaagtccttagatacttctccttccagaagtctcagccacggaagaagtcacctccagttaaggcagtccccatccaaccccctggacccccagaaaggtgagtgtggggtggggtgcttacttattaagtgaaattccactttcaagagctgtacccccagtagctgtcctgtgcctgtcattactgtcaccagtgggattatacctccctcctccactgggggtctcctgtctttttctctcatcctacccgcttccctggtagaaactgagcattgggcttagttcccctcaaatcctgtttccccacctgcctagggattctgtgggccagctgcaactatatcgccacccagaccgttcgcagccagcattcttggatgcaattgaccgacgggaagacacattttatgttgtctctttccgaagggtgagtttctcctgcccttccatctctgtcaccccaggttcccagcagtctgtcttcagtggggggatgtagagtagggctggggagcttgttggcatctttgcctccacccttctggcctggcccatctgttccccaggaccacctgctgctcccagccatcagccacaacaagacctcccggcccaagatgtccctggtgatgcctgccatggcccccaatggtaactctttccctgctgggtatgggggcagttccaacagggagatccagcctgggagctgagggggaagggggagaggagcagggcatccagagagctgctggacccacaggtgagaagcagcaggaagtaggtggagggaagagcaccatgcaggagacttgggagggagacaagggtgagggtccttccctggtgaaggtgcttgggtagatgactgggcagaggcggggggccgggaacctgctagactctcacttacttttttctcttgatgtcctctcctgtgtgaccccacactcaatgcccttttcttttcctaccctctccttgcccctgcaccaaactctgtccctgccatcctgtttaactcccgctatggatctgcctcctcactattgccctttctttttctctctgctcacctctacttttctgacctcctcccctcctccctgcaatccctgtttgcctccccatctcctcttccttaactctccccttctcacagagaccctgtcaggccgtggggccccgggggactatgaggagatgatgcagatcgagtgtgaggtcatggacaccagggtgattcacatcaagacctccacagtgcccccctcgctccgaaaacagccatccccaaccccaggcaatgccacaggtggccccttgccagtctctgcagccagccaggcccaccaggcctcccaccagcccctctacctcaatcatccctgacctctgccattcacactgacttagaacggggggagggggtaccaggtggccaggtgggactgtttcaaatttccctgatccccaggcttggggcaattggtaaaggaaagagcaggtgtgggggttaagcacttatttgaggtgggggtgttcacctctcttctcatcccttttcagaatatagggctcctctcattcctgtgaacccccagtcctggcttctttgtttgaggggattgtgtgaggttcagttgtggggtgggtggtgagctgctgcatattttttattttgtttctctagtgttatggcagtggaggtgggaatttagtccccaggtgggacaagggaagttttttcattttggagctagttactgggagtaagggagggtggggtgggggggagttcaggtttatgtgtgtgcatttcttttttattattattaaataaacaacttggagggagttgaaggaatggtggctgccttcctggctcgtgatggggagtttgggggaaagtggcttttccagagccagcatcaaagaatcaagcactgaagacatagctggctctgaggtggggtgggtgcgggatcacagaccgcatgtcatccccttgcccccacccctgcaactctggggtatatctgtgtctagcaacgatgtctcatggcgtgacagactagaggatacgcatccctggaatgtgagtcaacaggaaagatggggccccacgcccttcagggtgagcagcctctgggtctcctgctctcgagcaggttctccccctcttcttgctgtccaggatgagcagctcaaacaaacaacaagagctggggccagaggctcagagcccaggaagtgggggtctcggtgaagaaggggtgatatttggaagggaagggggatgtggcaggatatcctctaagccctaaactggaggggactgagacttgagagtccagatgaaagacaaagacaagagtggggcaggcagaaaaagctgtacattcttatgtttttaattttttttttttttttgagacggagtcttgctctctcacccaggctggagtgcagtggcgcgatcttggctcactgcaacctccgcctcttgggttcaagtgattcttctgcctcagcctctcaagtagctgggactacaggtgcacgccaccacacccggctaatttttgtatttttaatagagatagggtttcaccatattggccaggctgcccacttcggcctcccaaagtgctgggattacaggtgtgagccaccatgcctggctaggctgtgcattctaattaggaggaaggggagcaggacaaagtgagggattgagtctgaggccaacctggaagaatccccctccagctgctcctgttcagcagtgcctcaggcctgaccctgcaggagtgtcctgggtcagctggagggtgtgagctgggcctgggctcaatgcccagatgactggacaggggctgcctgggccataagcccaggcctgaaggagggaggaagaacctcatgtgtccagccaggcaacccccacacccctcccactgccctcacccattactgtgtttggggtgaaaacagaccaagtaactatggcaacctggaaccagggatcccaggaactagacctttcctccctccagagggcagcccagcttctcagctatgctttctatcccagagtccttgagccttatccaccgtatctctggagggggtgcagtgagaacaaggattttggaagcacatcacctaagctggattccctaccctgcctttcgttagtagatgtccttaaacattctgagccttagtttgcttatctgtaagatgggatgttcctacctcctaatcagggttgatgacaggatgaaagacgacgtcctcagtgcctggtccataatagatacaccttttcctcatcccttgcccctttctgtccccatctctgttgtccttctctcttccacttttatcccatttgggttcattactgtttcgttgtcccattgtcttcctccttcctgcccccagttcgggaaagtacttgaagtgctggcatctcaggggtcaccctggggtgggacatcctgctcctctgctgattggcaagggacagctggcactttggtgtggatgagacatcagacctctcttggctgagggattgtggtggcaggaaggattgagaaggacggtgagtgggtacctgatgcagggtgaaagccgggcaggctctgggctgctgccttctaggcccatgtggatctccattcctctggccacacccccaaggccactcagcatgccaggtcgctgtcactcctgcacctcattggcccctcctgccctatgcccactttgtctttctgttctgctttccttgtgccaccatctccttcatttcttcctcaggatcccaccttttgttctctctcatccctgacctcatcatccctcccttcctctttctagacttctttcctgcctttctttgctctctacctcattagcagttatcacaacctctttttgaaccattattcatcactgtttttttcttcttttgtatcttccccaccccatccactgcttcactgtcttaaattttttttttaatttaaaaatagaagtggggtctcgctatgttacccaggctggtcttgaactcctggcctcaagcagtcctcccatgttggcctcccaaagtgctaggattacaggcatgagccaccgtgctggccttatttaaaaatatatatatatttttaaattcactgtctttttcctttgtttttcttggtcttctcatctgctgctgctgctgaccctgtgcttgtctcctccctttctcatgccgccccctttctatttcccattctgctccctcgtccacatttcttgcccctttccattatgtcctctcttttcccccactttggtcctctcctcctccttccttcccccactccctttacttcccacaccagttctccatcctcttcccagctgtgggggccagcactggggagcctgatgtttgcctcatcgttctgctatggcttctggatacagcacatctggattccggggcccagatgtgtggttgccacagcgacctgggtccctctggtaaatacaggcgcccacccgcctcagagcagagaacaaaacaattgtgtgactttcttttgtcacgagatagaaatgtccttcctcctcccttctccccacacccatgtctctaggcaaaggaagttttaagggtccaaacccttccttctgaggctcccttgccccgttttcagctgtagcctcttagttctctcccatctttcatcctgcgctctgtctttacattctgtgttccccatcctcacccgacccccagttctcaataatggaatgttgaccacccccttccccatctgatgccatttcttctaagtgaatctacacaataactggatgcagaaaagtttcaaaaatctggattctccacccttctttgtacaagtgcttcaaagaagccacttcatttgttccctaagtcttcaatcctttcctttcctggagttgtttggggagaagagcgaatacaggcttaggaatgagaacacctgggtgagacccaccttcaccactactgacttagccccttgaacaagacccttaatgtctatgagcctccgtttcctcagccacaaagtgggattaatgcccgcactgtgtaggaaactgttttgtaaacggaagcccggcacaagtgttttctatctttcccctctctgggactgctttcttggaccgcagcccctggcatctcttgttcccctgtcttcatccttcaggtccttgccctcaattgcccttactcttatgtgtctgccttctctcctccctatctttcctttccttttctctatctttcatcccttttcctcctgaggtcaggacaggaacttggaggatcattcaaggagggaggctcagagctgaagacacagggactgaggttacagagaacagccggagcttgtggacagttctggacaacactgacctttctacccaccaccacccagacacctcagtgaagccaaccccagctctgaccactgggcttccctgccttcacgcctgggctccttaccctttccccctcctctctcccagtcctttcacatttcagtgttgacttgcatttattggtcacctacactgtgcaaggcttggtgcttttcttacaagatgtgaacatacaagacatgagcttctccatgagcctggaaaccaaagggtgaatcaaatggtaaacaaagataatttcagaacctgaaactatatctgctaagcttccagtggcttccccaaatgccttataagcttgtgtacatctggaatcccacatttctctctgagaccccaacagtgggcttccagaacatcccaggaccatccttcttgctgtcttctctgaggtccctggccactctctgtgccaaatgtacttatgttgaccattcttcctaaataataaagccaggacatagggcataggcacacgcgcgtgcacacacacactaaaggatatgaccatggaacagaaatctgaaggtgtcagaggaaattcataccctgtgttctgccctctgtgtgatactgtctccagaccctccctcttcctatcactgcagggctccccacctcctgccaggagatccttgggaagctgctacctactgctggctctgggggcttcaggccaaggcagaggaaggaagctgagcctggctctgtccaagatgctgacttcatcctccccatcaaagccaggaaaaaaacagccacacacacccagacacacggacacacacggggacacccacgcaaaagcccatgtgtgcctttgccctcggccacatggagcttactgggcatctggccacagccacatgcagtgcaggcacgccctgacccaggaacaccacacacctgccaccatggggatctgacctggtgtgcagacacctgggccgtcacccatgtggcagaatcaagcacatatgggctccctcacgtacctttcacccgtgacttggccaagttacacctcagtggtgaggtctgtagcaggatagagagacccagtcctcactgtgaagctgggggtagtgggttcccactcagctgggatatttctcctctgtagcaaagtctctttttcagctccttgtcagggcagcacatggggagatgaagctagggaaacacccaacagacttatgtggggtgtgtctgtctccctgtcccccctgtcctctggctgtcagtcttctgcctgggaccagagacagcgtgtccgtttcctccagcccctacctctccccgcctctgttcctgctcccccgcagcacccaggcaccagccccccaccctgctttccaccacttcaccctctattcaggtgacccacccttatatttgcctcctgtctctagccctttcttcaaccctaaaccttcctcctaaccttcaggctttccttccttgtccgccccaaccccagcttcctccccaaggcttgtatgtcccagtgttcacccaagcccttgccctgccagtgcccaagcctcacctgctctttctctagggacttgctgaggtaggagaatgcaaagggggcagtgacaggagagggactgaacagaacagacagcaggagtggctcggggacgggataagccgagaagatagaaatggtgggactggagcagggtggggacttggggtcccagagacggtcccagttggagaaagaggttgcctcttgcctcctgccctctgcccctgctccctgccccagactgccaggggagaactggtgagaggatgagggagccagcactgggtgatagacatggggtgcgatccagagatccaagctagagcagtggctgggaagagatgggagaggagcatgggggagggaggggaagggggctggccatgaggaaggatataggctgagaggaaaccactggggtcagagaggaggggcagcaggtggagaaatggtggggaaaaaagaaatggcaggaagggtggggggtgtcaagttgggcaaaaattagggtgagctaaaaatggcatagggaaaggacgtgggaggtaagaccggggctgggggttgagatgagggtatggtgagacagtgatgctagacagggagtgggggctggggtgggggcaggagaagaggaggggtggcatgtggtagggcctgggaggggtgggaggacctgccctatctccgctcccctccctgacctcatcctggtcctccccttctcctcccctgctcgctgcagactccctcctcactgtcgctgccgagatccacagtcggttgtggctcagcccctgttgcaggggacaagtgagggagacttccctgtcctgccctgagacgccgccctcccggggttggggacagagcaggtgcagaggcactgcagctgctcggttgcccaggtaaggaacagagttctggggagacccagaaggagaggcaagggatttctcgcctatccccatgccccaggtgaaggtgtggcaggtgagctctcagcagtgcttccagagcaaggacttctgttcaggacagaggacataggagcattcgctgggaaccaggctccctgtgaaggagtgtctgggaggagagggtggtatgtgtgtgttggggtgggcagtatgtgtcagggtttggatgggatgcagacaactgagaggggctgggaacaaaccgagggactccgggagtcagatggtggaaccagggtagaggtggttattggtgaggtgagcccctgggccctggaggtgctggggctagcgggaagataggactaggctgaactggtggccagctgaaccttggaaggaaagtgcttgcggaatcccaaatgtcgggctagagcagctgagcccaggctctgggggctccaggctccaggaggtgccagagggtgcttctttgggcatccaaatggggactccctaggtggcagcgtgagagttgcagggagggaggtctgggagatctctttaggaaatactgaaatgggacagtcaggactcgggtctgggacgtgcacagagcctgcagagaggatcctaaaacttgttcttggccagagctctgcactcatgactcacggttcagcagggctgggatggctgagagatgcctctgggggcacaggggctccgtcttcactctgtgccccttccaggctccccttgcctctgtctgtctgaacccgcactctccctcacctcgccgcccccgccccccaccaccagtacacgtgacacgccccgggtgggaagggcgggccccttatctcgcctggaaagaatttaatggcatagaaacaactggaagtggaactgagaggaactactgggaagcaactcggaaacaccacagctgctgcctgccctgcccctgcttcccgcatctccagcccctcctcttttccctgaccctgccttcaagtccctggggacccagcacctcaattcctcaaacttcctttgctcactccagacctagccactaggtgcaggaccagaaactgccttcctgtctctcattgcacccctaaccattttcagctggggcctggaaatcctttctcttaatttttccattcccaggccgattagctccccagaataaggggtatctggattccccaacctacccctccctgacacctccttcctacctggttccagcccaatatctgagacccccacattccctttttagtctcactcctagaatccttctaccttcacctctcattgccagattcaactgagggtgtagcaggagggtcagagggaggcatgggggcaggaccagaacccccatctgtggaacatcttttatggaagccagcccctctccccaccccttgggacctatacagtccctaatgagcaaagtgtcaaagttggctacaacacaaaatacccaggaagctgagtcacagtttgggaagatgcccccatccctgccagccctccaactgtggggagggtgccaagagggtgaggccatatctctctccaaacacacactacagagaaccaccccagacatagtggcagggggaatggtgaaggggagacacaagagacacccaattctttgcttgcccagtaccgagagaagagcagaattatcccaggagctggaatggggagctggagggctgggtggtggcaacagggcagggagggagattgggaaggagcctctgggtgtgtggtcaatggaggctgctctgctcttctagaccaatctcaccagctttccagaaaagctggtgagctctcttcactccttcctggtgcaaagaccctctctgctttcccccactgtgcagggaaagatgaggaatccacttatttggggaggggcactggacaactcacagaggcctccaggggtacggggaagtatggtggaggccatgtgtccgctgcttcccactgggaagggcctcctgctttgttcctctcacaccatccaggttctttcactcacagagctgccctcggagccaacaagaaatcagccttcttaggcatcacccaatgactaggtgtggaggaaacctgaaggggagattgggtgtgtgtgcacgtgtgtgcatgggcacccatatgtgtacctacaaggatgcaggttttgggggtggatttgtgtgtctgtgcaggtatgtttgtacttgtggatgagcacacattaatatatttgtaagtgtacatgtgtacacatctttgtgcaagcattcccagggtgtgggagtgattagcatggccttagacacaaagtgacaggatttgagggtcggtcagagcccatctcttacccaaggctacactccaggctgagagaagggctggggagacaggaaagggcagctctctgtatgccaggcctctcggcctgggctttcttgggtggggagcctcttggtgtggaaacactctgtccctgttcagctccctttccgtctcttgctggctggtagcagaatgtgatggctggtagccccaattactcctttttctctgatccaggagaaaagtttaagagtagaaagccagaagatgtgtgcgtgttgggtggaggtgtgtgtgtgtcacagtcacctccgcctaccagtgacacatcccccactcctcaccggtcagcatttccacacccaccctgccctcctcctttccccagcctctggtctggaagagctgggcacctttcaacatctctcctcaactcttcaccctagctgaatcctgactggccccctcacactcaggtttgccatagccctgtctcctgtcttatcctgggacccccctaccacctttcctcccacctcttgtctctgtgtgctccccaatccctgcctcagtaaactccacaaacacatacaactgggtaaccgtcatccagatcaagaaacaagacacctttagcaccccagaagcccccccccccatgcccctactagtcactaccccctcaagagtatcacacttctgacttggagcactacagattaatgttgcctctcctcaaacttcacataaatagaactgtgcagcatgctctttcctgtgtctggcttttgttcaacatcatcttagtaagatccatcacactactgcatataactatagttcattcctgctttattttattccacggtgtgaataaaccacaatttatttattctactgatgtgaaatgtttgagtagttcccagtttggggctattatgagctatgttgggtatattcctaggagtggaattgcggggtcatagggtttgcatgtgttcacctttagtacatttagtagattctgtcaaacagttttccaaagtgcttgtaccatctggtcctgccaggatcttccctggcctggcctctgattctgcctcagccctggtggctgtgtctaaccaacttccagtcccagacactgtccgtggtcctagccctgaccttggtcctgcccttggttccagccttaatgctagtcctgcgtttacattgaacttttcattcattcatatagtcggtaaatatttattgagcaccagttatgtgccagatgcagggatacagcagccaagaaaaaaaaataggtgccatgcctgccctcatggactttatagtctagtgggcaagaaagtaataaaataatctcacagtatatttattattactttggacttcaaaaaaatatttgtttatatatgattgcaaattgttataaacgctacacatgagaatggcatgatgctgtgatatcacatgataggaggacctgacctggtcaggaaaacttccctgtgaaaaaaatggcgggctgagacctgaaggatgagaaggccaagagagaagggaacagtgttccacacggatggaacagagtatacaaagatctggggttggggatgggcacagagagtatgagggacttgaaggtcagtggagctggaatggagggagggagggaaatgttatgggtggtgaagtgggagcaggggatacatgatggtagggctgtttgtcagtgttctaagagaatttggaagggagacactgaagcattttgaggatagggacatcctgattgcgtttgtgagactgtagagggcaagagtggaagcagagggaagggtcagggctggacacagtggctcacgcctgtaatcccagcacattgggaggctagggtgggaggattgcttgagtccaagagttcaaggccagcccgagcaacatagaaagatcctgtctttgcaaaaaaaattaaaaattagctgagcgtgatggcacacacctgtagtcccaactactcaggaggctgaggtgggaggattgcttgagcaacaggaggtcaatgctgcagcgagctatgatcgcaccactgcacaccagcctaggtgacagagtgagaccctgtctcaaaaaaaaagaaaaaaaaagcagccaggaggcaattgcagttgtcaggcaagaggcggatggaagcttggattagaatgaaggtaagtgggagagaaggaaatgaattaaagagatgtttatgagaaaatacaggtagatacaaggaaatatggtagccttgaatgggctattaggtttctggcttgtaaagctggatgaatggtggggtcctgagcttcaatggggaattctgggaggggatgggatacaggaaggtgaccgtgagttcaggttacaggcatggtgaatttgaggtgcccaagtggagatgccaagtaggcaggtggatatattgctgtggagcgagaggaagatgactggggtgttttacaaattggtgtatagtttggaaattgaagttataagtctggatgaaggtaccaggtggatgactagagcagtaggtctattaatttagtagaaatttgttgcacattacaatcatctggggagcttttaaaaatactgagtaaaattcacttacttggtcgttctagtcacatctcaagtgttgcagagcctcatatccctcctggctaccatattggtcagcgtggatacagaatgttttaaaagagaagggccaggtgtggtggctcatgcctgtaaccccagcactttgggaggccgaggtgggcagatcacctgagctgaggagctcaagaccagcctggtcaagatggtgaaacctcgtctctactaaaaataaaaaattagctaggtgtggtagcgggtgcctgtagtcccagctactcgggaggctgaggcaggagaatcacttgaaccccaggaggcagaggttgcattgagccaagatcgtgccactgcactccagcctgggcgacagagtgagactccatctcaaaaaaaaaaaaaaaaaaaaagatgcggtgaactgtgtctagtgattttgagagaagtcaaaggtcaagcaagatgaagacaaatgtcccttagattttgtggcaccgaagtcattgggaagccctagagggagctgtttggtgggttggagggagtagagtggattgaggcatgcataggctataaggaaatgtaaacatcaaatacaaataaattttgacaactgtggccatgaagtagaggagagaaatatgtggtggctggagggggtgtgagattggggataggttttttaaggtttcattttttttttttttttgagatggagtctcgctctgttgcccaggctggagtgcagtggcacaatctcaactcactgcaacctttgcctcccaggttcaagcgattctcccgcctcagcctcccaagtagctgggattacaggcacctgccaccatgcccagctaatttttttttattttttatttttagtagagacggggtttcaccatgatcgccaggctggttttgaactcctgacctcaagtgatccgcctaccttggcctcccaaagtactgagattacaggcatgagccaccacacccagccatggttcaatttttatacagcaaaatgccaaagtcttaagtgtgcagctcaatgagtttttgaatatgtatatatctatgtaaccacccagattaagatacaaaatatttccagaaatatgactccttccggtcaataatccctacaagtaatctgatcctatcttctaaaagcaaagattaactctgcctgtttttgtttgtttttttgtttgttttttgacatagagtcttgatctgttgccaggctggagtgcagtggcattatcttggttcactgcaacctccgcctctgggattcaagcaattcttttgccttagcctcccaggtagctgggactacaggtgtgtgccaccatgcccagctaatttttgtatttttagtagagacagggtttcaccgtgttggccaggatggtctccatctcttgacctcgtgatccgcccgcctcggcttcccaaagtgccgggattacaggcatgagccactgcacccagcctctgcctgtttttgaacctcatataaacggcattattcagagtgttttcttttttcttttttctttttttggtagctcaggaagggtatataagagtataagagcattctctttctgtgtgtgatattttttactcagcactatgtgtgtgaaattcacccatgttgcatgtagcaatagggtgttttttattgctgtatagtattccattgtatgactctggcacaatttatttatccactttatgaatggacacttgagttgctttcagttttagctaatataggaataaatctcatgaacattatggtctacgtcttttggaagaactatgcagtcattcccaccggatatttagttatagatatctgggttatagactatatgttttagcagatactaccaaacaactttccagtgtttgcattaatatatgctcccacttgcaacagatgacaattccagctgcttcacattcttgccaatatcaagcaatgacagcctctttgaagagggacaagcattctggaggatatttagtggcatcttattgtggttttaacgtacatttacccgataactagtgattttgtgcatcttttaaaatgctgcttggatctgggtgcagtggctcacacctgtaagcccaactactgtggagggtgaggcaggaggattgcttgaggccaggagttcaaggccagcctgggcaacacagcaagatcccatctctacaaaaaatttaaaaattagccaggcatggtgatgcccatctgtagttccagctactctggaggctgaggcaggaggatcacttgagcccaggagtttgaggctgcagtgagctgtgattgtgccactgtgcttcagcctgggtgacagaggtagagtttatcttaaaataaaatgaaatagggtgggtgtggtggcccatgcctgtaatcctaataactttgggaggccaaggcagatcacttgaggtcaggagtttgagaccagcctggccaacttggtgaaaccctgtctctactaaaaaaaaaaaaaaaaaaaaggctgggtgcggtggctcacgcctgtaatcccagcactgtgggaggccaaggtgggcggatcacgaggtcaggagatcgagaccatcctggctaacacggtgaaacctcatctctactaaaaatacaaaaaaatgagccaagtatggtggtgggcgcctgtagtcccagctactcaggaggctgaggcaggagaatggcatgaacctggtaggcagagcttgcagtgagccaagacgcaccactgcactccagcctgggcgaaagagcaagactccatctctacaaaaaaaatgagctgggcatgtggcgcatgcctgtatcctagctactccagaggctgaggtaggagaatcacttgagcccaggtaaaataaataaaatgtttattggctctttggctatattcttttctggagtacctgtttgtcttttgacaatttaaaaaactaggtttcctgattttggcttattttgttttgcagagatttttttttttttttttttttttttgagatggagtttcactcttcctctcaggctgaagtgaagtggcatgatctcagctcactgcaacctccgcctccagtttcaagcgattctcctcctcagcctcccgagtagctgggactacaggtgcccgctaccacgcccagctaatttttgtatttttagtagagatggggtttcaccatgttggccaggctggtcttgaactcttgacctcatgatccgcccacttcagcctcccaaagtgctgggatttcaggtgtgaaccaccacacccagctgccttcttattctcttaatgatgtaatttgatgacctgaaattttgttttgtttttttctttttcttttttttgaaacagagtatcagctctgttgcccaggctggagtgcagtggcatgatcacagctcaccacagcctcgacctcccagactcaagtaatcctcccacctcagcccctgagtagctgggactacaggtgtaccaccacgcccagtgaattctttttgttttttgtagagacagagtctcactatcttacccaggctggtctccaactcctgggctcatgcaatcctcacacttaagcctcctgaagtgctgggattacagatacgagccactgcacccggcctatggttaggttttgtgtgtgttttacttaagaaatcttgcggctgggtgcagtgactcaagcctgtaatcctagcactttgggaagccgaggcgggcggattgcctgagttcaggagtttgagaccagcctggccaacatagtgaagccccgtctctactaaaaatacaaaaaatagctgggtgtgggagcagatgcctgtaatccccgctactcaggaggctgaggtaggagaatcacttgaacctgggagacggaggttgcagtgagccgagatagcaccagtgtactccactctgggcgacagagcaagactcagtcttaaaaaaaaaaaaaaagaaatcttgcttactccaaggtcagaaattttctgtaagatattgctatgaaagatattgctttacttttcttatttaggtcctgggttcatctcaaattaatttcggtatatcagacataaggtggagaatgactgtttttttttttttttttttttttttacttagggatgttggattgacccagcaccaggaactaaaaagaccatcctttctcctcttaactgcaggggcacttttgtcgttaattagttgaccacatatgtgtgggcctgtttctgggccctattctgtttcatctgtctatccttgcacctttaaaataagtcttgatatttgatcatgtaagtcctgaggaagaggatttttgtttttttttttcaattggagatatttgagcaaggatccagttgagagtgaggagttgaataaaaaagagagagaagccaagcatggtggctcatgcttttaatcccagctacctgggaggctgaggtgggaggatggcttgagcccaggagttcaagtccagcttcaaccagggggttgagcaagatcctgtctctatattagaaagaggtcgtgcggtgactcatgcctgtaatcccagcactttgggaggccaaggcgggcacatcacttgtggtcaggagttcgagaccagcctgcctacatggtgaaacctcatttctactaaaaatacaaaaattagctgggcatggaggtgggcacctataatcccagctactcaggaggccgaggcaggaaaatcacttgagctaggagacagaggttgcagtgagccgagatcgcaccactgcactccagcctgggcgacagagtaagattccatctcaaaaaaaaaaaaaaagtgagagagagagggagaagataatctgcacttttcttagaagacagtaggagctgggatccaggtgtttggggaaggattggccctaggtactcatccactaattcattcaacattgatgtgtcagatagaacatttatgtgccagacacaagtatacagcagtcctgggatagatgaggtccttgttctcatggagctcccattgtagcattgagagaaaggtaataagtaaactgataactcaggcagcagtaaatgccatgaagaacaggaacaggatattgtgatagagagtaatggaagactgccctaactgggagttaagatttgaagatggagccagcctttatgagcagagtgaagagcatcccagacatagggaacacacaatgcaaaggcccttggagtagtgagagcttgtagtgctcgtgggaaaaacaaaagaccagtgtagagccgggtgcggtggctcatgcctgtaatcccagcactttgggaggctgaggcgagcagatcacctgaggttaggagtctgagaccagcctgaccgacatggagaaacctggtctctactaaaagtacaaaattagccaggcatggtggggcatgcctgtaatcccagctactcaggaggctgaggcaggagaatcgcttggacctgggaggcggaggttgtggtgagctgagatcgcaccactgcactccagcctgggcaataagagtgaaactccgtctcaaacaaacaaacaaaacaaaacaaaacaaaacaaaacaaaaaaaccagtgtaggggaacacaatagaaaagggggtgaggagcagggtaaataaatgatatcagagaggtagagaacagacttgcccagggagggtatcctttagggttgggcggaatgtgaatttttacatgcatgtgagttgggtagattacttgtgggtggtgggaccgtgggtatgtgctggagaaggggggattcattttgtctcctttttgaagctgctctcatacctaccctttctccctgcagcctcctgaatgatgccagcccagtatgctctaacctccagcctggttctcctggtgctgctgagcacagccagagcaggccccttctcttcacggtccaatgtgacactgccagccccccggccccctccccagccagggggccacacagtgggggctggagtgggaagcccctcttctcagctttacgagcacacagtggaaggaggggagaagcaggtggtattcacccaccgcattaacctgcccccttccactggctgtggctgtcccccaggcaccgagcccccagtccttgcttcagaggtacaggccctgagggtccgtctagagatcctggaggagttggtgaaggggctcaaggaacagtgcactgggggatgttgtcctgcctctgcccaagctggcacaggtgagcaggtgatcacagaagagggtggagaggtggggtggggtgggcattgctagtccataaaggtccttggtatgaattagaagaaggcactccttcctcaccatgaggggtgtggatgcagcccagaacacaacttggagagcagagctgggctacatgtcaaccaaagcatatgcgagggccctgagaggctgcatacattacacatactagcaactgggagcagacatggccttatgagatgaggctagcctggctaggggcctgcacataggagcactacataggctcagcctctctcccaggagagagactgagacttgcctctcccctcctactccaggtcagacagatgtgcggaccctctgcagtctccatggtgtgtttgatctgagccgctgcacctgttcctgtgagccaggctggggtgggcccacctgctcagaccccacagatgctgagatccctccctcttccccaccctcagcctcggggtcctgcccagatgactgcaatgatcagggtcgctgtgtccgtggtcgttgcgtgtgctttcccggctacactggccccagctgtggctggccatcctgtcccggggactgccaaggccgtgggcgctgcgtgcagggcgtgtgtgtgtgccgggcaggcttctcaggccccgactgcagccagcgctcctgccctcgaggttgcagccagaggggacgctgtgagggtgggcgctgcgtgtgtgacccaggctacactggtgacgactgtggcatgaggagctgccctcgcggttgcagtcagagggggcgctgtgagaatgggcgctgcgtgtgtaaccccggctacgctggcgaggactgtggggtgaggagctgccctcggggctgcagccagcggggacgctgcaaggacgggcgctgcgtgtgtgaccccggctacactggcgaggactgtggtacgcggagctgcccctgggactgtggcgagggcgggcgctgcgtggacggccgctgcgtgtgctggcccgggtacacaggcgaggactgcagcacgcggacatgtccgagggactgccggggccgcgggcgctgcgaggacggcgaatgcatttgcgacacgggctacagcggggacgactgcggcgtgcgcagctgccctggcgactgcaaccaaaggggccgctgcgaggacggccgctgcgtgtgctggccggggtacactggaaccgattgcggctcgcgcgcctgcccacgcgactgtagaggtcgcgggcgctgcgagaacggcgtgtgtgtttgcaatgcgggctacagcggcgaggactgcggtgtgcgcagctgtcctggggactgtcgtggccggggccgctgtgagagtggccgctgcatgtgttggccggggtacacaggccgggactgcggcacgcgcgcctgtcctggcgactgtcgcgggcgcgggcgctgcgtggatggccgctgcgtgtgcaacccgggcttcaccggtgaggactgtgggagccgtcgctgtcccggggactgccgtgggcacggcctttgcgaggatggcgtgtgcgtgtgtgacgcaggctactcaggggaagactgcagcacgcgcagctgccccgggggctgccgaggccgcggccagtgcctagatgggcggtgtgtgtgcgaggacggctactctggcgaggattgcggtgtgaggcagtgcccgaatgactgcagccagcacggcgtgtgccaggacggtgtgtgcatctgttgggaaggctacgtgagtgaggactgcagcatccgcacctgcccctccaactgccacgggaggggccgctgtgaggaagggcgctgcctgtgcgacccaggctacaccggccctacctgtgccacccgcatgtgcccggctgactgccggggacgtgggcggtgtgtgcaaggagtgtgcctgtgccacgtgggctatggcggtgaggactgcgggcaggaagagcctccagccagcgcctgccctggaggctgcgggccccgggaactgtgccgggcaggccagtgtgtgtgtgtagagggcttccgaggccctgactgtgccatccagacatgcccaggggactgccgtggccgaggagagtgtcacgatggcagctgtgtctgcaaagatgggtatgctggcgaagactgcggagaaggtgagcaggcagccttccccagtgtactctgggactgtgattctgtgaacaggagccatggggaagacctgagcctgaggaagagtggagggagagcatgtcattccaaggagccagtgcccaccaggggcagcagaaccacaggggtggggctttccagtgggcaggactggccttcagatctctgaggagcaggttggggcccatttagttgcatttagggagattctgtgctcctgaagatggagagaaggtgaaggcgatccaagccccgttcagccctctgtcagctattctccactagcagagaggagtgggagttaggatgggcctcttcgatgtccctgagtaaaaggggctgtgggtgggggtggttgccttgtgctaaccagctttccctaacccattctcttgggcagaggtgccaaccattgagggcatgaggatgcatctcttggaggagacaacagttcggacagagtggaccccggctcctggccccgtggatgcctatgaaattcagttcatccccacggtgagagagatgccaggctccaggaggggactgagtgggcaggacaggggggcagggctcacctcctggaggaagttccaggtgatcattggttgagtccagatggctgggtacctgaagctgctgtaaaggctttcttagcctgcttgacactgggcactgaggcctctgcagcatctccagcaagcattggtcccacacagttggaacacctggtaacagagagctcagtacttcctgaggctgtccagtccattgttggtcatcactgttagctgttatcattgttgcagaatccgtctgcccctattctagcacctgtccgttggccctagctgggtattcatcagcagctggaatgttttttgctttccctgtgtcctacaccacaggccttcaggtatttggagacaccagcctgatgtcttcattcctcaggcaaaacctcccagtttcttcgccccttttccctaagtctttattctctgaatcctttaccttcctgtgattcttgcttttttcatgtgcccccaaaatgtggggacagagaggggcccactgacttactctgaatttatggacacttttctcagagctggcgtatagcaatttgtagtcacacaagcaggcagctgttttggtcatatttggttttttaagtaacttttaattataaaagtaatataggccccgtgcagaaaacttagaaaatacagattagcagggaaaaaagatggaaggaaagaagacaacattcaactatatacacttttttttttttcacctaaatataggcctttgcatttggccctgttcaatgttatcttttttggtttgggccaagctgtctaggctgttgcaataattttgagtctgtgaacttcatctcccacctccttgtcatcagtacatgcaaaccagttttttctctgtctccctccaacttgctctttttttttttttttttttttttttttttttgagacagagagtctcactctgtggcccaggctcgagtgcagtggtgccatctcagctcactgcaacctctgcatcccaggcttaggtcatcctcttacctcagcctcccaagtagctgggactacaggtgtgcaccaccttagcctgctaatgtttgtatttttagtagagacggggtttctccatgttgcatgcccaggctggtcctgaactcctgggctcaagtgatctgcccgcctcagcctcccaaagtgctgggattacaggcatgagccaccactcctggccatccaacttgctcttaaaacattagagggaacaccctaaggacaaagccttgtggtcacttatttggggcctccctttgtgcagactgggcttttaagatatggtcgtttccccagctgcaaatcttctgacatttctaccatccaactcatgttttcctgcatcatcccacaaatgccatatggggtgtgggccatgtcatcctcatcttcatcagcttagccaggactctgtaaaaataaacaactccctgggcctaaagcctcggaaggcactaggacagaaggggacagctcagaggaactgtcatcctcactccactttgctttgtcttgtcattatgctcctcaggccagccccctactatgttctgcctctcctcactctccagccaaagcagaagcagaaatctcaacttcgtggcgcaaccaagatagcttgaattttttcttctgtttaaacatctttttttgttgttgttataaaaatactttaatcacgagacaagaatttggcaactagagaaaagaaaaacaattcctggctgctcctcactaaaacaagcactgctaacattttaaagtgtttctcccactctcttcttctctgtatatattatttacatagctctaatcttgaaagggtgggacttcgaaaaggaagtttcttaagaaatttcagggaaagaagaattaaaataaacacttgagataagaggagcttttagggcagcagttgtctcctgctctgagtaaataaatacaaaccgatccttggtgttgtcaagggcgccgctttccagttgaagccctagactttctccctcactcagagccaggatggtggtgccaagttggcctgtgccaggcttggccatgttcttagctcatccattctgctctcggtatgggcatctgtcacattctgggtcttctctgagcctgggtgtggaaaacactcctgtaaaattggtccccagacactcctcttgggcctgggctacccaccctcagaccatgctttctgctgtctgtagctggtccctggcatcgtaccttctgccttggcaagtgccatctatttcttttcttttctttctttctttttttttttttgagacagagttttgctcttgttgctcaggctggagtgcaatggcgcaatctcggctcactgcaacctctgcttcccaggttcaaacgattctcctgcctcagcctcccaagtagctgggattacagacacctgccacaatgcccagctaccctttgtccatttctgtgggtacagagtatattcaatagctgtctgtcctctggctgctgctgtcatcctagaagcctatctctacctcttaccttccctcttcccagaagcacttctctctcaaagcccaaactctgctattccagatcaagggacatacctagttattggaattatttttcagaatgcagaagaagaaagtttctcctctccctgtatatgtggcactgttactctgactcagtggttctcaaagtgtgttccctggacctgcagcatcagcatcacctgggagtatgttaggcatgcaaattgtcagactcccccactagatctactgagtcagaaagtctgggcacagagcccagtaacctgtattgcaacaagccctccaggtgattctgatgcccctccagcctgaggccccctaagtgaaggaatgttgctatcttgcaaagtgctagctccactatgaatgtgagagaaagcatggggaaactgagggagatgagttcctgaatgagaaagaggttcagatattccttgtctgggtgtgtcctgcagcctggaaatcagggctaggctaagtgttcactgggactcaaaacctcacagcctcagagaagtttttgcttgggtctagtctaaaaacagcaatgagggtgagataagctccaaggaccagccaaggtagagttcatctggagccacgaggttaatattgagataaactctaaaacttcccaagaacaaaatcagtgaagcaggccaggcgcagtggctcatgcctgtaatcccagcactttgggaggccaaagtgggtggatcatctgaggtcaggagtttgagaacagcctgaccaacatagtgaaaccccatctctactaaaaatacaaaattagctgagcatggtggtgtatgcctgtaatcccagctacttgggaggctaaggaagaatcccttgaatcttggaggcggaggttgtagtgagctgagatcgtgccattgcactccagcctgggagacaagagcgaaattccgtctcaaaaaaaaaaaaaatcagtgaagcagccaagctttaccaaggggcagagccagctgccagcatctgtttagaaagactgcttcagggccaggtgtggtggctcacgcctgtaatcccagcactttgggaggctgaggtgggtggatcacctgaggtcgggagttcgagaccagcctgaccaacatggagaaaccccgtctctactaaaaatacaaaattagccggacatggtggcgcatgcctgtaatcccagctactcgggaggctgaggcaggagaatcgcttgaacccgggaggcggagctcgcgatgagctgagatcgcgccattgcactccagcctgggcaacaagagcaaaactccctctcaaaaaaagaaaaaagaaagcctgcttcagaccagtaagatggtgctaggagacgtaggagacatgggttaggttgatggactttcaggggactgttcccagatggatctcaggaggaaccaagaagtgtctaaaggatatatatagggagaaggagaactctggggataggcttgcctcactgaaagaaccagacatcatcagggagcatccaaggtgtgtgtattgcggctgtggggatggggtgggtgtggataaagagaaagagacatacacacacacagagaaaatgaacaaataaattctgggaagggtaaggatttcatgggtcttgagttgaggccaacccaaggcttcctaggctggggtattctaaggcagggtgaataggagagggctggaggtcctatgtgcccaggaaaacttttcaacccagaaaactgacaaagctttacttcatcctcaacccagaaatctctacgtggccttctcatctggttttatacttcggtatttactatgttgatttccccacagttctcttggtttaggagagtaccttttgaaatttccaatcctacttggctgaatggaggtgtccccatcacagccaacatagctaggcagaacacagcatccttagcggctgtcctagctggacagcacagcaaaatgtggggctgttagaatgctcacagatgtacagttcctcctgtttccccagtggtgggcattccaggagaccctgcctggagcagggtccagtagattccctttggaggcaccacacataatcataattccttaaatgtacacttgtaggagtgttgttttctcacaagcatttgctaagcatagagattgttgtaagtatctcatatattcaagatgtggccatacatttagctattagagtctcagctacctgaggacagggaccatatattttatttttgtgtctccaatgcccagcatgatgccaggtacaaaatcaacaatcaggaaacatatttgtggaactttgagcaggtggttcttgttttgaggagcctacaacccgggtgaagagacaagaaaagtccctcaagggaaaggttgtgatgcgggtcccactcctgttacacagccatgagcaggcatctacgaggaggttcagggtgaggcagaccctttaaggagaaagtgcaacttgaaggggcatccttgatctacttcatttgttctgacaggaccaagcttaggaaaaggctcctcatgcccaggtagtcagagttgccagggcaaagctggagggagagtcctggtgcatgttgggtggaattctggcagatgaacacggggtgcccatgagaggggactctgacagataaatagggggtgcccatgagaggggactctgggatcacactgctagggcctaaattcttgccattttcttggtgttggtgacgttggcaagatacttgtccttctgtgtctcagtttccttatctgtaaaatgggactaataggacctgtttcgtagggttgttgtgagaattaagtgagttcatgtgtgtacctcgcctagaacagtggctcacaaggagttagcgctctcagcatgtttgctccccagcttgtacagggtcaagttccacacagtaccatgctgacactgtttagaattggagaaagaagagataagggggattgagcagcagaggcaagagtgccagcccctgagccacctggtgctctctctcacagacagagggggcgagccccccattcacagcacgggttccaagctctgcctcagcctatgaccagagaggactggcccctggacaggagtaccaggtcactgtccgagcccttcgagggaccagctggggccttcctgcctccaagaccatcaccaccagtgagagctggggctgtggggaggggtgtcctgagtggagatctggactagagagggaatctgccctccgggagggcagaaggaaggggctggatgggggctaggctcttggaaggaaagatgatgattgaagaaccagacacccacctgagtcctcctctttaacctggctagtgatcgatgggccccaggacctccgagtggtggctgtgacaccgacaacactggagcttggctggctgcgtccccaggctgaggtggaccgatttgtggtgtcctacgtcagtgccggcaaccagagggtgaggctggaagtgccccctgaagcagacgggacgctgctgactgacctgatgccaggcgtagaatatgtggtgactgtcacagcggagcggggccgggcagtcagctacccagcttctgtcagggccaacacaggtatggctggccagaggttagggaagggccctggtttcccagccttggatcctcctcctcaggagcccaggctcagggctcacagactcctctgaatgcttctggcaggtgtgtggcagtctcgaggcacctgctgggggccttgctctgtcctgaggccactggggagacagagccctcagatgcctggagtcctgtaggaaggttacaggttagcctatgaaaggaatggccccagggagagaagtgaataggagatgctgcctgatccagtcagttaagggaggttcttttttaaatttaggtaccgggacaggccttgtgctgatagatcttgtgggactggaattaggcagattagagatcatcagtcctgttgacttttggattgggattgctgggaggtgggtctcacagcagtgattttccactaaacctcgaggtttcttaacagatacctggatatttttcttttcctgtgacagggggacacccacctcgctgtagctcatgttctcttccccgactcccctttctctccttcagctacagggccccacccacgggcttctctcttctttctagggcaccaacagtggtgggcttggaggggaatgggggggctgcgggacactgaccgatttccctccgttctctttccaggtggggctggggcacagggaagaggcctctggctctggtgggagggatcgagggaggggctgccgcgggaaggagtgccgggagggagctgccactgacctgttctccccttttttgcccctggcagcaccaggccactacagttacccggaggtgcgccccccagccccgccccccaagtcccggccccggccagccccagccccgcggcccccacggcccccttggccctcgaggccagcagaggaaagggaggaggagtccccgcccaggccaagcctgtcccagcccccacggcggccttggggcaacctgacggccgagctgagccgtttccgcggcacggtgcaggacctggagcgccacctgcgggctcacggctacccactgcgggccaaccagacttacacgtcggtggcgcgccacatccatgaatacttgcagcggcgtctgttggccgccgccccagccggctcccccgcacccccgccccgccacccccgccccaccgccagccctgatcccggcaccaggaaacgggactccaaccagggaatctacggcctctcgcctgaaggcgtcgaccgggtggctgcgtcccgccaccccaagccagaggtgctgggcagttccgccgatggcgcgcttctcgtgtctctcgacgggctccgcggccagttcgagcgcgtggtgctgcgctggcggcctcagccgcctgcagagggccccggcggtgagctgactgtgccgggcaccacgcgcaccgtcagcctgcccgacctcaggcccggcaccacctaccacgtggaggtccacggggtgcgggcggggcagacctccaagtcctacgccttcatcaccaccacaggtagtgtgggctggggccacgggacacctatcccttgtccagcctcacctgccgttggagcctgcattcatgaattcctcccactgccaccccccactgcccccttctaccttcaggccctacctggccggggctccagggggcccccaggacaaagcacgagtccattgtccctagaagacgtccccaccccagggtcctggcatccatcctgtggatgcctaaggtcaaggcagcgccttctttggggtttcccgggacacttccaggattgttattttaggcaatagagggtgatgtggttggggcacctgcaaagattcactggagcagtttgagtgggctgggaattgaaaacagtgattcccgttctgactcactgtggtgagagtggctgaagactgtggttagtggttactgttttccacaatttggccttgaccttgaagggacacatcagaactgcgtgggggtggcctgggtgccatcaggcagcaactgtatattggggaggtgaaaccactgcttcttaagctggcttttcagaccccctggctcactttatgctggtctctcccacaggaacgatgtctgggcttggggaaagggcaccctgtggctgctgtggggagggtggtggacctcttcttcccccatagggcccagatgccacctgacctggatgtccacccccacaccctctctctcttcccactgcccactctcctcttgcatcctccctctctaacaccactgtctttcttccaggcttctcactgcagcactaatggaagccacctgaccaccacccagtgggggggatgtatgtggggagggacatggaagtctccgggggctggaggtcatggaagccttgtggggtgaaggatagcaggctttattttacctattacctgcctgaagcacaggcccgtctgctcaggaatgtggtagatgggggtgtttggaggattggctgacctttgggaggagggagtggcccaggtgagggaaccagaagtagaagtagaacaaggctcttagaggctggagggcagaacctggggactggggattcctttctagttctcatactggactctcctctttttctcaccctgccccttcccagggtcctcacccttgggcctcttggggactaccgatgagcctcctccctcaggcccctcgacgacgcaaggggcccaggctcctctcctgcagcagcgcccccaggagctgggagagttgagggtgctgggcagagatgagacagggcgcctccgtgtggtctggaccgcccagcctgacacctttgcctacttccaactgcgcatgcgggtgcccgaggggccgggggcacatgaggaagtgctgccaggggacgtccgccaggctctggtgcctccaccccctcctggaaccccgtatgagctgtcacttcatggggtccctcctgggggcaagccctctgaccccatcatctaccaaggcattatgggtacatcttggactctgctcagatcaatatcctgagattgggggaggagctggggttattgggacttcagaggtaggatggatattgaggggccagtgaagggcagggctgatgtttggggctggatagaggagaaaaggagagaaaaggaattgcaggttcagcaggaagatggatcgagggggatcttaaaacaatgataaggatgggtggggagaggggaaagaggcagaggtaaaaaggccgagggtgggacagagattccaggagagaggctgaaggtccctggccctccacctgcagctttccttgccctgtcccctgcccccactcttcggttgctcctctgcccttccctgccctataaatctttcagggtgggcatgggaaggcctctggacactgaccctcagcccccaatacctcgtccctgggagcctggtttgcagtggacagcagtccatggtcccatcagccagtttctgctgggggtgaaggctccttggggcagggggctccacagccatcaggacttcagacatggatgaggtttgcaggaccagtgaaagacaggtcctggggtacctggctttcacatcccctctttgttcctctctgtgggaccagggtggctgactcatcccccagctccaggtcaagctcaccactggaagagagggtggtaagagagacagcagctcaggtgggcagaggagctttcagactgctctgatgctgcagcagggaggcttgaaactctcattcagaaccagggggacctgaaacccccgcaaagatcctggtgtgcagagagaccaagaccttgtgagggatggagaaactgtcacaagggaagaagcagagattgagagggaaatgcccctcttccagaagagctagtcactgaggggtgggcagatagagtcttccggggagggatctatccaggatggagtgaggtgggcaggggagagggaaggagacacagacaagagaacggttgagtccactatgctttgcttttgcctctcaaactccagacaaggatgaggagaagcctgggaagtcctcaggcccaccacgcctgggtgagctgacggtgacagacaggacctccgactccttgctcctgcgctggacggtccccgagggcgagtttgactccttcgtgatccagtacaaagacagggacgggcagccccaggtggtgcccgtggaaggaccccagcgctcggccgtcatcacctccctggatcctggccgcaagtacaaatttgtcctgtatgggtttgttggcaagaagaggcatggtccgctggtggctgaagccaagatctgtgagtgacagcagtaacaccctgccctctgtactgccctgaagaggttttctcagtgctttgggaacctgctttgggagctccgggaaggcttcctggaggcagtggtgcatgagctgaattctgaagggaaagtagtggtggggcaggcaaagagtttgagaagctcagtgcagcctgagggagtcacggtgagtaaggtggggagagcatggccagtaagagaatcactgttacagtttcctctggctggagaacagggcatgtggggggtgccaaagggcctggtctcagggcttcctgtgctgtgctgaggggcttgggcctcattcgaaggcccctagagggcctctgaagggtaaagtgggagagtgatgagactagatatttatcttgcaaataaccgggtggctgctgagactagctggagaagtgagttaagagctggtaaaggctagcagggttgatcctgcctataatcccagcaccttgggaggccaaggcaggaggatcgcttgaggctaggagtttgagaccaacctggcaacatagtgagaccccccatctctactataacaaaagatattagccaggcgtggtggtgcgtgcctgtagtcccagctacttgagaggcttgaggtgggaggatcgcttgagcccaggagaccgaggctgcagagagccatgattgtgccactgtactccagcctgggtgctatccacactctgcacagagcaacaccctgtctcaaaaaaaagaaaaatgatgatgggtcagctgggatggtggcagtggggctggatgggggaggcgaaggaaagcaaggtgtaccaggcagcccccagggttctggatgagacagtcccattccctgaggcagggagcagcagaggtggggaacaacgccttagataaacttagatcaatatctaagagacacttacataaataccttttgtgcatttattgagagtcagttgtgatcaagatgttctctaagtggatcatcacaccccataaagcacacctgggaggcatgcctactttataggtcaggagaattgaggcaccagagtagtcgtgtggggttggggaagagacagggccactggaaccctgtcgacagcctacactcacagcggaggcagaggaagaagagcccacagggtagcttgcggagtgacttgcagggaggggcagaaccagggagggtgctgtctggactccaggaaggagggtgcggttggacttgtcagattccggaacagtgattcaagggctacggagcgtccacagaatttagcaatggcaaggccacccctggcctgcatgagagctgctgcctggtggaggggtggagctggatcgggagggtggtggaggtgaggacatggctgcaatcagtgtagacatcactttctggaatctggactgggaatgagagcaaagagggaagatggaggctagagagagatgcacacagagtgggggtgaggaggggtgtgacagtagcttgttgaaatgctgatggcacagctgctggggagtgaagggtcagtgctgcaggcgagggagtccatccatgggtcaaagttcccaaagaggaggagaggcctgcagcatagatgagggaggctgtcccacattaaaacgcttcaaggattgtgctctcctctcttggagaagaagccagctagtagttaggcttggaagcagtggaggttgtactgggaagatttccctggctatggagatgtgaaagggcctggctgggctcccctctttctgaagctccctgctgctctggtttgtggttggaggcagagccacactagtccacgcagtgcttccatgccgtttgaaagaaggcacccattccttaaagtggacaccactcctcaccagggcacacagctcggcaagcagagtgctggctggatttcagtccctctgtactccctcagcaaatgcacttttgtgcagtgaacaacctgcacagcctcacacagcattcctatgtgggatttggcttccccattctccttggacctaagtctctcccttctctctacccactcttcctagtgcctcagagtgacccaagtccagggactccaccccacctgggaaacctgtgggtgacagaccctaccccagattcactgcacctctcctggactgtccctgagggccagtttgacaccttcatggtccagtacagggacagggatggacggccccaggtggtacctgtggaagggcccgagcgttcatttgttgtctcctcactggaccctgaccacaagtacagattcactctgtttggaattgcgaacaagaagcggtatggccccctcacggccgatggcaccactggtgagtagcagccacctcagcccccatgtgaccccttctcagccccatgcacacttcccttcagcccaaaaccagctggggtcccccagcaagacagctgactccagcttcccggccccactccagggctgaggggcagccagactcccccgcactgctgggccccttccatcccaagcagcagctccccgtggcccagaaggtgtgtcataccctggctgtgtcaggcttcccagaagtttagcactcgaattaatggactagtgaccccccaccccccataggtgtgacatcccgtcgaaaccccaagccccagtcccaggctgccagttcagcacctggctggatctccttgtttacagctccagagaggaaagaggagcccccccgccctgagttcctggagcagcccctcctgggggaactgacagtgaccggcgtgaccccagactccttgcgtctctcatggacagtggcccagggccccttcgactcattcatggtccagtacaaggatgcacaggggcagccccaggcagtgcctgttgcgggggatgagaatgaggttactgtccccggcctggatcccgaccggaagtataagatgaacctctacgggcttcgtggcaggcagcgtgtggggcccgagtctgtggtggccaagactggtgagtcatggctgccaggcctccctcccctgctagccccatcctgtgagcgggacttggctggggctccttccagcctccctccatcttcgccttctcagctcattttgccaaagcctccacccacttcctcccgcactgctctcctgtcctctgcatgccaggtccccctcatccagcctccacctcctcatctcttcctcagcctcacttcttcatctccaagggcaggtcctattttcccccattccaaacacctggactcatccttccacctggggctgtcctccccacagatgtcctcaccattcggtcactgtgttctcacccctcagtttttactgggctccttcatggtctggtttgggccatggtcacttctgggcttctgtcacctgctgcccacaacctcctgccatttctgctgtgttcagaggtggcagatccaagtgacaagagcaccacgtttctctagcctttttgcagcatgaagaggactcctctcagctcccgactccttgactcccagcccccttggaacagggcaaagggattgtgttcagcccagcatcccagcctgttcctccatgtccccagcctttccctgtccagtgccattcccctggcctgtgaattatttgatgagagatagtgtggatagtggttaggagcaaagactccggagccaactgcccgagtctcactaccagccttgcaacttacttcctgtaggaccttgtgcaaattgcttaacctctctgtgcctcagctttcccttctgtcaggtggctggatttcagtccctctgcacagagctgttggaattacatgagttaatatatgtataacacttagaaaggccaggcacagtggctcatgcctgtaatcccagcattttgggaggccaaggcgggtggatcacgaggtcaggagatcgagaccatcctggctaacacggtgaaaccgtgtctccactaaaaatacaaaaaattagccaggcatggtggcaggtgcctgtagtcccagctactcaagaggatgaggcaggagaatggcgtgaacccgggaggcggagcttgcagtgagccgagatcgcgccactgcattccagcctgggcgacagagtgagactccatctcaaaaaaaaaacaaaaacaaaaacaaaaaaagcccacacacttagaatagtgcttggagcagcaaagcattttcagagtgagctgcaatttctccctgactctctcacttcccagtaatcttttttgctccccacctccctcccttcctctgggttgtcattcttgccaattctttcctcaatctgctatcccaaagtagtcccccatgtagcaggtcacagaagggctggtttcccttgtgccacagtctccccactccatggagcctcagcagagacctaactgtagggggcgggtaggtgcccacagggctgtgattccagagccagccagggaaggacatgtctctccttggatcccactcaccccagaatttttctcccactcatgcctggagccctgccttagcaattcattccttggggttaaaggggagggaggggcagggctgcctggggaggccacagcaagagcacattccatggtcagatcctcatatgaggggtggggcagccagagtgccctggggagggcacaggtaggaagaggcctcactgccctcctcactgtctgaggtcagcactgtcagtgaacgtggtttggaagaaccctcagaggcttcctctcttcccatctcagctcctttctcagacacgaagggagacccctcacccccacagaacccaccagagcaggatggggcaagggctgtctcagccttctccatccgtgagtgaccgaatggcaaatacaaaggctacagagcccctgagcccacagcgtaagggcatttccatggctgtcatctgtgggcagcagcagcaaagccagcagccctttatgcctctatctcttctctcagctcctcaggaggatgtggacgagacccccagccccacagaactgggcacggaggccccggagtcccccgaggagccgctcctgggggagctgacagtgacaggatcctcccctgattcgctgagcctcttctggaccgtcccccagggcagcttcgactctttcaccgtgcagtacaaggacagggatgggcggccccgggcggtgcgtgttgggggcaaggagagtgaggtcaccgtgggaggcctagagcccgggcacaagtacaagatgcacctgtacggcctccacgaggggcagcgcgtgggcccggtgtccgccgtgggcgtgacaggtgagtgaggggcaggggcctgctttggttccctcccactgctggctcccagcttccctgtagccagttgctctccttgctccagtggaaccttgaggctgcctgccaggggaagacctagaaagagcatgtcactggggactggcgtaccaccagctttcatggccctgagcaagttttaaactttctgcacctctgtttccttgtccgtaaaatggggacacctacctcacagagttattgtgagggttaagtgagttaacagatgtaaagcatcaagaatgggcctggcaaaagtaaatatgctgccagtgtctgctgtgagaattgttataaatattcttactctgaggtctgctttgtcccctttggctggttcagttacttggtcagaatgcacatgaatctaaggccataccaccctgaaggtgtcctatcatctcctctgatctcagaagctaagcagggtcaggtctggttagtacttggatgggagaatgcgcgtgagacattggcctcttcatcagtacagcttgaagcaagctttcttttctttcttgtcttttttttttttttttttttttgagacagagtctcactctgttgcccagcctggagtgcagtggtgcgatctcagctcactgcaacctctgcctcccaagttcaagtgattctcctgcctcagcctcccaaatagctgggactacagatgcgtgccaccacacctggttacttttttgtatttttagtagagacggggttcaccgtgttggccaggctggtctcaaactccagatcctcaagtgagccacctgcctcggcctcccaaagttctggtattacaggcgtgagccaccacgcctgaccacaaagctttctctttcttctttctctctttttctttctttctttctttctttctttctttctttctttctttctttctttctttctttctctttctttctgtctctctctctctctttctttctttttttcctttctttctgttttttgagctctgttgcccaggctggaatgcagtggtgcaatcttggctcactgcaacctttgcctcccaggttcaagtgattctcctgcctcagcctcccgagtagctgggattacaggcatgcaccaccacacctggctaatttttgtatttttaatagagatggggttttaccatgtcagccaggctggtctcaaactcttgacctcaagtgatccacccgccttggccttccaaagtgctgggattataggcataagccaccacgcccggccacaaggctttctttaatactcatccagtgagtgactttacagcaaagaagaacatcccttccaccctttctctcaggcctggttacagggccacatccaccaccacacaggaccagcctgggcacctcctctccagggcctcagcccaagaggctgagtggacagcagtgcctctgggaccctcgggctgacctgcccggtttagtcacagtgaggggaatctcttttttcctttgctcacagaaacaaagacacacctttctcaaaaataacttttactataaggggaaagattaaaaaattaaaagtagagaaatagatagttttccagaacatggtttctgtaattccaccaagctcagcctcatcatgacttggttgatttcatttccagaaccttccaccctcaatttattttctttgcctcagtcagccctgagaagagggagacggcaaagccaccctgagtggctgtccttggggcctgaggttgtagggtggaggctggtgccaggcccagacatgctgccaagtctgctcctggagtgaccctccctctgccgctctgtcccagggacccacactgggctctgtgaggccctgtgcctggtccctggggtaaggatgggctctgtcaggcactgaccaagtcggtgcagtagagataaatggagtttgggaatctgacaaactgagttccttcctgtcttcctctgttctcagctgtatgatttttatttttttattttattattatttttttgagacagagtcttgctttgtcacccaggctggagtgcagtggcatgatctcagctcactgcaacctctggctcccaggttcaagcagtcctcctgcctcagccccccaagtagctgggattacaggcgcccaccaccacacccggctaatttttgtatttttagtagagacagggtttcaccatgttagccaggctggtctcgaacttctgacctcagatgatccacccgccttggcctcccaaagtgctgggattacaggcgtgaggcaccgtgcccagccagctgtatgatcttgaaaaacttacctcctctcctggaacctcagcttcctcatattcaggagggagtaaacgctgcccagcttgttgtcacggttaaaggtggtgatgtaacatgtctggcatcttctcagctcattcatcttttgctcagaccttcccgtgagggaatccctgtatatccatgttctaatgctggatattttgaaacatgtattttacacgtcctggataaaatagatgaggccctttaggaaagaaatgggcatcagtgcgcattatcagagcagcaaaaggacgaagcagctggagtccgccaagctgggggctgtgtctggcagcacacacagtgcagttgccagggggagaggtgcgtggagctcattagacacacttctaaattggaaaaggactgtcccacatgcagcatggggactgccagagtcatgaatcgttataattgtacctttccagttaatccaaaccaccagcaataaagcttgatggtgaaggacattttcattccctcatggaaagaagtgcagagagggcaaaaaggagcagggaatgggtgctgcaggaacaagtaaggttagaaggcaaatgaaatgagagaaaatgcccagcctggtacctgtacatagtagatgttcaatacttggtggtcactctgctccctcccaccacctcagctgcctccatgcctgccctccccagcctgactcatttctgtctgcccgaggcctggtcaccagcctgttttaagcagttgtcacttgcttggagccttgtcttgccctccggaggaagccagagaaacaagttcttgggagccccacccatccagccaccttctctgccattttgcctcttgggaccaccttctagtttgctcactaatgagtgcttcctcatgcgggagtggtggggatctgcaggtcctgagcccagacctgtagaccactcattattttacagacatctgtggagcacctactgtgtgccagggactgggacacagcagtgaataaagcagagctcctgcctgaggagctcacattctagtggagagggacaggcaacaaattgcacaaatatgtcagtggcaccggatgtgacagtgatgagtggtggggaaaagcagagcctagtagggagacagcaagggcctcactgcgagggcagtgtctgaggaaagccctgaaggaggtgagaggacagccacctaggcctttggggaaagagcatcccagacagaaggaagagcaaatgcagagactggcaggcgagaagcagccccagatgtctgcagacagtgaggaatgcagtatgttttgtggtggagttggaggagggcaggcaatagggaatgatctaagagatgaatatgggacctcagaggccagtgcaggacttggatttcaccctgagtgaggtagaagccactgcgggaaccagctctggctaatgtgttaacaggatccttctggctgcagacccaacagactaaaggggggtgagggcagaaggcgatgacctgagagaatgttgtgataatccaggaggagccagtggtgcttggaggtggcaaggaggggtcagactctgaaggtagtgacaacaggcggatacccacagggcggatgtggagtttaagagaggactcggggatgactctggcggtttagatctgagcagctggaagaatgaagttgtaatcctggtcaggcgtggaggatcatgcctgtaatcccagcacttggggaggccgaggcgggcggatcacctgaggtcgggagttcaagaccaacctgactaacgtggagaaaccccatctctactgaaaatacaaaattagccggacgtggtggcacatgcctgtaatcccagctactcaggaggctaaggcaggagaatcgcttgaacccaggaggcgtaggttgcggtgagccgagagggcgccatcgcacaccagcctgagcaacaacagcgaaactccgtctcaaaaaaaaaaagttgtaatcttactgaggtggggaggctgtggcgggagcaggtgtcaggaagctcagaggctcagttttggacttgttgagtttgacacacaagtaggcctccaaggaagacgttgcacgaacactagtctggggttcaggggaggtctggacagagggtgtaaatctggagtcattggcatatagatggaatttcagcgctctcccagggtgtcagtgatggttgatactcttctcccccaacaaatgcagcctcagacaccgagcagggacctagtgaaggactgttgaccagacagatgttcagatcaatgcgcttttacatcaaaaccatcatgcgggttccacaaatgcaacagacatcgctgggtgtggtggctcacacctgtaatcccagcactttgggggctgaggcaggtggatcacctgaggtcaggggtttgagaccagcctggccaacatggcaaatgccgtctccactaaaaatacacacacacacaaaattaggcaggcatggtggcgcacgcctgtagtcccagctacttgggaggctaaggcaggaggatcgcttgaacccgggaggcagaggctgcagtgagccgaggtcgcccactgctctgggtgacagcgagactccatctcaaaaataaaaaataaaaaataaataactagacatcattactataagaaaagggggattctttactaacagccccctaccatctctgtcccagccccacaacaagaagagacccctccagccactgagtccccgctggagccacgcctaggagagctgacagtgacagatgtgacccccaactctgtgggcctctcctggacagtccccgagggccagtttgactccttcatagtccagtacaaggacaaggacgggcagccccaggtggtgccggtggcggcagaccagcgagaggtcacagtctacaacctggagcctgagagaaaatataagatgaacatgtatggactacatgatgggcaacgcatgggccccctgtctgtggtcatcgtgacgggtgagtaatggggggactcagtcctcatctctggttacccagagctcccccaccccatggcccttcttccagccctgccttggtaccaccgcaccctcactgaggggctagatcccctcaggccctggctcggtgaccctgccagtctttctgttccctgacccctttactcctcccagggctagagccttctcagccctccagctccttccccatctccactctgccccccgcccaggggaatgtcttatttccatttggcctaaatccagccacagactttctctccccctctccgactgcccacagctgtttccaccccttctctttacaaccctgctgtgacttggacacagctgccacctcctgcttctgcccttttttgttgaggcgaagtgctttacatcctgagtcccttctcaggagtcctctgccacctgcctgcactgcattccatcccagccctggagagttttcatctctccaggaggctgcctcactcttgctctgggctccttcctgcccctcatggcttcctgggcacaggttctccatgattgttgtgctgtggcatctggtgaaacccctaccccacctgaaggcaatgtttttaaatctgtaaaataagctgtataggattacaaaggaaacattatatttatagacagttatcaaaatatttcttttttatttttgagatggagttttgctcttgtcatccaggctggagtgcaatggcgcgatctcggctcactgcaacctccgcttcccaagttcaagcaattctcctgcctcagcctcccgagtaactgggattacgggcacgtgccaccacacccagctaattttttgtatttttagtagaaacagggtttcgccatgttggccaggctggcctcaaactcctgacctcaggtgatccacccgcctcggcctggcatgagccactgcacccggcccaaaatatttcttaaaaatccaaagttacgatttagtaatacttggacttatttactagttcattaaataacaggacttggtggcgcgtttactaaactacaaaatttagaagcagtgatggatataaaaggtattttaaagtttctgcaataactctaaggtgacatgaaaacatctgtggtttctattggtaacaaagtcacaataattctactctggtgggttttctatattagttttggaaagaaatgctgcatttcagttagaggtctggaagtaaaggtgtaactattccccatctcagttcacagcccccctgaggccctcaaagcccaggggttctcccctcagagatctcaaccatgttctttgtcttcccaaatcccagctcccctcccaccagccccagccacagaggcctccaagcctcccctggagccacgcctaggggagctgacagtgacggatataacccctgactctgtgggcctctcatggacagtccctgagggtgaattcgactcctttgtggttcagtacaaggacagggacgggcagccccaggtggtgcccgtggctgcagatcagcgggaggtcactatccctgacctggaaccctcccgcaagtacaagttcctgctctttgggatccaggatgggaaacgacgcagcccagtctctgtggaggcaaagacgggtgagatgggcccctacacagctgagcctgaggccacagccttcccacccttctcttcactccctctgctgagtcttccctttgtccacctgctctgtctcatttgaaaagccacatggggctagcacagtgactcatgcctgtaatcccagcactttgggagtccaaggcaggtcaggagtttgagaccagtctggccaacatggcaaaaccctgtctctactaaaaagacaaaaattagctgggtgtggtgatgggtgctagtaattccagctactcgggagtctgaggcacaagaatcacttgaacccaggaggtggaggctgcagggagctgagattgcgccactgcactccagcctgggtgatagagccagactccgtctcaaaaaagaccaaaaaaaaaaaaaaagaaagaaaagccgcaaagcagatgaggaccaggagagtggggccagttcctgggtctgctgtcccctgctgactctgcctctcttctcgtaatttccacttttgttggatgagggaagcccctacaggcctcttcctgcagggtggatgtgggagcctgggggtgctgggagaaggggcgaggggagccaggaacccttcctgccttgcgaatccatcacctcctgagagtctttgttgtctcccctgtgactctcacccaggttctcaccctcctagctcaggcctgtctgggcccatatgtgcctcctacagaggctgcccttccttctctgccctcctcctgaagtctcagaaattgggaaccagaggagcccagcccagctgtgcccctttccgagggttcagtccaagccctcccctgcccctgggggctccctattgccagaaaacttgcaataacaatgtcgtcagcgtcctcaccgtccaggaaggcagcaggccagctccttctcaagccctgggatggctcctcaggcagacaccagatcccttccctgcctgagctccccggcatcatccccctcaacattctcacaggcagcccacgctccttcaccaggcccagtgggagccttagttctcccgggccagccggtgcagaataagaaagggaacggagaagggtgagaactacctgtgtcgtaacatcctgcctccctgacctgccgagtgcccccatcagggatcctgcgctcctcggggccggccaaatcacccctttcctcaggggccggccaaatcacagccaaatcgtgtgctcctgggtaagaggagatagagacccagtctgtaagaagctgcaccctgctggggaagcagtctgtgagaggcggaaagaggctggacagaaaggggagtaagatgaggcagggagctagggaatctcttttcctggaggtgactcaggacaggtgaccctccccacttgggtcaaggggagagaggcatggaccagacggagatggtggtgaggatgggaggtgatggaaatattttggggaagcactgagcatttgggcagttctgggtttttccagccccagagggaggcagtcaaggagtcgttttggaaaaaataaacacaagaacctttcctctccagttgcccgaggtgacgccagcccaggggccccaccccgccttggggagctgtgggtgacagaccccaccccagactcactgcgcctctcctggacggttcctgagggccagttcgactcttttgtggtccagttcaaggacaaagacgggccccaggtggtgcccgtggagggccatgagcgctctgtcactgtcacccctctggatgccggccgcaagtacagattcctcctctatggcctcctgggcaagaagcgccatggccctctcactgccgacggcaccacgggtgaggggcattccctgcaggtccctgctctgctcccctcaggccaagcagcagacggtcacttgtggtggctgccattaccattatttggccccagccactcggctcagatccagctccccacgtccctgcacaagcccctagcacagcccggcaggactcagccacgcaaagccctgtctccagacctctcaatcctgcccgtcgaggtcacccagtcttccagaaacagctcagccgtttcctctccgtgtctccatctcagaagcccggagtgctatggatgatactggaacaaagcgtcccccaaaaccccgtctgggggaggagctgcaggtgaccaccgtgacccagaactccgtgggcctctcctggacagtccctgagggccagtttgactcctttgtggtccagtacaaagacagggacgggcagccccaggtggtgcccgtggagggcagcctcagggaggtcagcgtgccgggcctggaccctgcccacaggtacaagctgctgctctacgggctgcaccacggcaagcgtgtgggccccatctcggccgtcgccattactggtgagtgtgcggcagctggaacacctgtgcctccttcccgcctggctctcctggtctgactgagccataagatctctgagcttcccattttatatcatttccattgatccagaaagtttccttgtgcccctttagagtcagttgccccagtcccagcctccagcaaccactgtctgctttcgatcatcctggagacagcattttgactctccatgtaatggaatcacaatacgcagtctcttgtgtttcatttcttgcaattagcacaatgcttttgaaattcacccatgtgcagcaaaagctggtctttcgattgctgactgcttgccctcactccctctcctccctcactcctcctgagagtctgggtgcagcgacacaccagccatctgtctctacctgtctctgtgaaccagccggcagggaagaaacggaaactgagaccacggccccgacccctccagcgcctgagccccacctcggggagttgacagtggaggaggccacgtcacacaccctgcatctctcctggatggtgactgagggagaatttgactccttcgaaatccagtacacagatagagacgggcaactccaaatggtccgcataggaggtgaccggaatgacatcaccctctctggcctggaatccgaccacagatacctggtgaccctgtatggtttcagtgatgggaagcatgtaggtcctgtccatgtcgaggccctgacaggtgagaactctgcccactatgcctcctttcagatggctgggagagtccagaggacagcagagtcccgcggataccctgcccacctcagtcctctctttccatgtctctgtccagtcccggaggaggagaagccttcagaacctcccaccgcaacccccgagccccccatcaagcctcgcctgggggagctgaccgtgacagatgccacccctgactccctcagcctgtcctggacagttcccgagggacagtttgaccacttcctggtccagtacaggaatggagatgggcagcccaaggcagtgagggtgccagggcacgaggaaggggtcaccatctcgggcctggagccagaccataaatacaagatgaacctgtacggcttccacggtggccagcgcatgggccctgtgtctgtcgtcggggtgacaggtgagtggatgatgggagccccagggtgggagccatgggagggtcaccctcttgctctttggtgatgactggtggggaatgggacaagggtctggtcagcaccacagacctgcttgtggctggggctggggctccccttgggccttcctgtgaggttgaccactggctcctcctgaacagagaggggccatcgggaattttgctgtgctggtggctgtcccaggtcccccacagctgaccctggaacttgtcatgtgtgttagctgtcagctgagcaggaccacccagccccaagagtaggcctctctgaactgacctcgggtcccccagtcatagccttggcttctccctccttttccccagtacccaaggacatccccctcactctctcttcctccttctcagctgcagaggaagagacccccagccccacagaacccagcatggaggccccggagcccgctgaggagccactcctgggggagctaacagtgacaggatcctcccctgactcgctgagcctctcctggaccgtcccccagggccgcttcgactccttcaccgtgcagtacaaggacagggacgggcggccccaggtggtgcgtgttgggggcgaggagagtgaagtcaccgtggggggcctggagcctgggcgcaagtacaagatgcacctgtacggcctccacgaggggcggcgcgtgggcccagtgtctgctgtgggcgtcacgggtgagtgtgcactgcagagccctctgggttgggtcttagcaaagtacagcctccagcatctcctccactagggacccagaaccccaagacctcaaacctgtaatacaccctgttcactaaaggctcaggacaggtgtgatctggggacagagagagcaaatccaggagaagtgtcggagccatatgggaaaggcccccagggactgaggcctcttgggaggtgattcactggctggtttgtggctctccgcttttccttggaactctatacataactctttttgtgagattggaacacatttttgaaatacaaattaattaaattaataagtatttgttaaataaaatttcaaatgtataaacagaaagaatagtacaaagaccctgccatcctccttcaatcaaatatcgacttctggccagtctggctcatctctgccccacccacttcctccactagaatcactagaatgttttctttctttctttctttctttctttctttctttctttctttctttctttctttctttctttctttcttccttcctttctttctttctctttctttctttctttcattcttttcttttctttctttctttttagacaaggtctcactctgtcgcctgggctagagtgtactggcacagtcacaattcactgcactgcagcctcaacctcctgggcttaagggatcctcccacttcagcctcccgaatagctgggactacaagtgcactccaccatgcccagctaattttttgtattttttgtagagacagggtttagccatgttgcccaggccagtctcgaactcctgggctcaagttatcctcccacctcagccaaagtgataggattccaggcgtgagccgccacacccggcctgaatgttttctttattaacacctttatggagatataattcatgtggcataaaatacacttgtttttagtgtacaacttactgattttagtatctttacctacttgtgcagccatcaccacgatctaattttagaacttttccatcacccccaaaagaaatcttgggtccagacccattcctacctcagccctagtttataactaatctacttttttctctgtagattgctgttccagaacatttcgtataaatggactcaaacaatatgtattcttttgtgtctagcttctttcactgagcataatgtttttgaggttcatcaatgtagcatgtagaagtactatacttactacattgctattgattgattgattgattgattgattgattttttttgagacaaattcccactctattgcccaggctatagtgcagtggcatgatcatagctcactgcagccccagactcctgggctcaagccatcctcccatctcagccccccaggtagctggggccacaggtgctcgccaccacactcagctaatttaaaaaaattttttgtagagatggggtctcacagtgttacccaggctgatatcaaactcctggcttcaaggaatcctcctgcctgggccttacaaagtgctgggatagcaggcatgagccacctgctctctctcagccactacactgctttttattgccaaacagtattgcattgtgtggttatactactgcagtattttaaaaacgaaccacagacatcctatgctttcatcactaaatatttaaaggtatatctctttttaaaaaaattatttttaaaaaatccacaatatggccaggtgaggtggttcacgcttgtaatcccagcactttgggaggccaaggcaggtggatcacttgaggtaaagagttcaagaccagcctgaccaacatggtgaaaccctgtctctactaaaaataataataataataataaattttaaaaagtacaaaaaagcggagcgtggtggcacgtgcctgtagtcccagctacttggcgggggttgaggcacaagaaattgcttgcacccaggaggtggaggttgcagtgagccaagatcgcgccactgcactccagcctgggtgacagagtgagactctgtgtcaaaaaataaataaataaataataaaattccacaatacaattagcataccttgataagtgaacaatcatgccttgatatcaagtatccaggtagtgctacagtctcccgagtgtctcataattgttgtttcccaatttgttgctgaaatcaggtctatagaaggaggatacattgcaattgagaaaactgaaattttaaatagagtaatcagggaaggcccacagaagaaggtggcttttgaacaaagacttaaaggaagtgtggggatgagccatgaagatatctggggaaagaacatttaggtagagggaacagtcattgtaaaagtactgaggtaggaggctgcctggcatggttgagggaccataaggaagccacaaaatctgattatgattataatcagaaatcgatcttaagttagggccagactgggcccaccttctgacctgaattcaagacagctggggcctcaacacctccttgcagcaagagaaaagattctgtttctatctcttcctagcccccgaagaggagtcccctgatgctcctcttgcaaagctgcgcctagggcagatgacagtgagagacatcacctccgactccctcagcctctcctggacagtccccgagggccagtttgaccatttcttggtccagtttaagaatggggacgggcagcccaaggcggtgcgggtgccgggacacgaggatggggtcaccatctcgggcctggagccagaccacaagtacaagatgaacctgtacggcttccacggtggccagcgcgtgggccccgtgtctgctgttggtttaactggtgagtgtgcagtagggcactgggccctgccctgaactagactcagtttcccttttattgtcagtatctggtggctttattttactttccctgagaccaagcctcccaagctcctgggaatggttctgctggtgccttcactccgagactttggtattgccccaggtcttctgcccgttacacatgggctttttgggttcccaaagaggtgggggaccaggaaaataacacagactgaggcacacctggggttgaccatagcttcagcccatttgagctgtgtgtcctcaagagactcacacaacctgtctgggcacggtggctcatgcctgtaatcccagcactttgggaggccgaagggggcagatcacttgaggtcaggagttcgagaccagcctggccaacatcatgaaacccccatctctactaaaaatacaaaaattagctgggtgtggtggcacatgcctgtagtcccagctactcgggaggctaaggcgggagaatcgcttgaacccaggaggcggaggttgcagtgagccgagatcgagccactgcactccagcctgtgtgacagagtgagaccctgtctcaaaaaaacaaaacaagcaaacaaaaaacagacacacgacctctctgtacatccttttcctcatctgtaaagaaggaataaccatacctgtcgtgaagggtgggcgggagtgtggcttggctctcacacacaatgagagataactgcagtctttcccttctgaggaaggtaggtagttcctgaaaaccgcttagggcaaattctcataattatcactgatttcagtgggaaaaattgtatgtgttctctaagctcccaaattaatacccatttatttttaaaacaacactgaatcctgttaacatggatactattactttaattgtaaatattggccatgtgcacaacttaataaggcattttcctttcattaccctgtaactcggctctttgatgcttttgtaagctcttttatagctgttaccccctagatgcttaagactcagttctcaaaaagaacagacaaatgaaatgtgatgaatttgtaataccactatcaaggcagaataaaaccctatgaagagcagaaaagattaaagaaatcaatgaaaacaaagcaattgatttcacacgggccaaaagaactggcatcactggaggtgctctctctgccgtaagttagcagagctactgcaggtccagagacaactcagctgcaaagatgccctcatgtggtctcatctctctaccctcagctataaaatctaagttggtttctaaaaatgctcaggattaggtggaatttccaagcccaggtggatgaacctcctgatacaacttgcctgttgtgtttggttggtgttctttgttttcttttttttttttttctttatgttgagatggagtctcactctgtcacccaggctctcaggctggagtgccgtggtgcgatctcagctcattgcaacctctgcctcccaggtccaagcagttctcctgcctcagccttccgagtagctgggattacaggcatgcaccagcacatctggctaatttttgtatttttagtacagacaggatttcgccatgttggccaggctggtctcaagctcctgacctcaggtgatcctcccgcctcggcctcccaaagtgctgggattacaggcctgagccaccacgcctggccctgattgctgttttttgtttgtttgtttgtttttgtttgtttgtttttttcttgagaaggagtctcgctgtctcccaggatggagtgcagtggcgtgatcttggctcaccgcaagctccgcctcctgggttcatgccattctcctgcctcagcctcctgagtagctgggactacaggtgcccgccaacacgcctggctaattttttgtatttttagtaaagacggggtttcacagtgttagccaggatggtctcaatctcctgacctcatgatccgcccgcctcggcctcccaaagtgctgagattacaggcctgagccaccacacccggccctggttggtgttcttataaagcatcaattctgtcctgcaaaacaaatttgcttggcagctcctaagggtcccaggcctgcacactgagcatcacagggatgccacctgagcatcatgacttcaccacaggtgtggtgttaactgaacattcaaagcagaaaaatgatattctaagcttggggcaccagcatccagactgtgggcccttggtgtgtctaagagaatcccagagtcccttggttaaaaggaggcccaccaggcatgcccacccattctattttctgatgcagccccaggaaaggatgaagaaatggccccagcctcgacagaacctcccacccctgaaccccccatcaagcctcgcctggaggagctgaccgtgacagatgcgacccctgactccctcagcctgtcctggacggttcccgagggacagtttgaccacttcctggtccagtacaagaatggggatgggcagcccaaggcaacacgggtgccaggacatgaggacagggtcaccatctccggcctggagccagacaacaagtacaagatgaacctgtacggcttccacggtggccagcgtgtgggccccgtgtctgccatcggggtgacaggtgagtggacgatgggagccccagggtgggagccatgggagggtcaccctcttgctctttggtgatgactggtggggaatgggacgggtctggtcagcaccacagacctacttgtggctggggctggggctcccattgtacctttttgtgtggttgacccctggctccccctgagcagggaggggccattgggagttttgctgtgctggtggctgtgccaggtcccccacagctgaccctggaatttgtcatgtgtgttagctgtcagctgagcaggaccccaagaatgggcctctctgaactgacctcaggtcccctagtcatagccttggctatttcatatgtcccctagtcatagccttctccctccttttccccacgacgtaagcacatcccccagggaccctgccatcctctctgtgtccctttttctcagctgcagaggaagagacccccagccccacagaacccagcatggaggccccggagccccctgaggagccgctcctgggggagctaacagtgacaggatcctcccctgactcgctgagcctctcctggaccgtcccccagggccgcttcgactccttcaccgtgcagtacaaggacagggacgggcggccccaggtggtgcgtgttgggggcgaggagagcgaggtcaccgtggggggcctggagcctgggcgcaaatacaagatgcacctgtacggcctccacgaggggcggcgtgtgggcccggtgtccaccgtgggcgtgactggtgagtagtgcttggagtctcggggtaaccacctttccctcatgggtacctggtttactgctgtgccctttcaccaagccctgtgggtccagacttgtctcctgtgtcctgccctccctctgtgccctgtggctgtggcctatgctagcggtttgcttgttcactttggcgtggcctccctctaatggtcaaccactgataacctccaagagtgaaatatgtcaggcgcacaccaagcctgacttacgagaattttcctttctttccatcttaataacagcattctttgttataaccacatacacaaatgcacacaagaggaacaatccaacgtcaaaccacgttgggatgactaaataatttaggcaacatctataaaaagagctattatgccgccactgaaatgttttaacataagacccttactttataatgttacattgaaaaaagagagcctaggctgggcacagtggcttacgcctgtaatcccagcactttgggaggccgaggcgggctgatcgcctgaggtcaggagttccagaccagtctagccaacatggtgaaaccccatctctactaaaaatacaaaaattagccaagcatggtggcacatgcctgtaatcccagttacttgggaggtggaggcacgagaattgcttgaacccgggaggcagaggttgcagtgagccgagatcaccactgcactccagcctggcagatacagccaaactcagtctcaaaaaagaagaaaaaggagcccaaatttttgtaaggatgctaatcacaaccatttgaaagtaacaggcatggcaagaagactggaaagaaacacatcccacgggttgcctgatttgttagatagaatagaatattccagcacatttttttctgtattattctattctgcatagtccaaattttcttaaatggcaaacatttcttttacaatcagggaaagggaaaagagaaaatatataatgtcttctccttctttacactccatctgtcctactcctctatcgctgttgtggcttatttcatttatttccttcttttttttttttgagatgaagtttcgctcttgtcgcccaggctggagtgcaatggcatgatctcggctcactacaacctctgcctcctggattcaagcgattctcctgcctcagcctcccgagtagctgggattacaggcatgcgccaccacatctggctaattttgtatttttagtagagagggagtttctccatgttggtcaggctgctcaaactcctgacctcaggtgatctgcccgcctcggcctcccaaagtgctgggattacaggcatgagccaccgcgcccagccagacttatttcatttctaattatgaggaagttcaaaatttctagtccataagaaattggaggggtggagatcatgaggttaattgaattccaaatgctcagtcaggctgccttttctaagtcatcctcagccaggttgttatgcctggcttagagtatttttcgagaattcctaccgatggggaagaatcagccctgctgagaggcggtctcttgcagggcaggtcgccacctctgtggcaccaagtgaggtgcgagctcatctcccaaaggccatccagacagaggaagcactctcaatcggcatccccgattcctgggggagaggcctcatttccatatgcatgttcagaggaccatctgagtgttgggaaacagggggaatagggaaattattggaaaatgaacattagaaaaattcacattccgggggtaagctgtcctggtccacgttcagttttgtgttcctgtctccactgtggggaaccacagaactgacagaggacaggctgagggacccacccctgcccctcctgttctatgtgtattgctgccccacccccaccccacactctattattaattgttgtagcccagaatttctttctttctttttcttttttttttttttttttgagactgagtctcactctgttgcccaggctggagtgcagtggtgtgatctcagctcactgcaacctctgcctcccaggttcaagtgattgtcctgcctcagcctcctgagtagctgggattacaggtgcatgccaccacgcctggctaatttttgtattttcagtagagaccgggtttcatgatattggccaagctagactcgaattcccaacctcaggtgatccacccgcctcggcctcccaaaatgctaggattacaggcgtgaaccactgctcccagcccagaatttcttttttagcccacgtttttctagtgaaaataatacagcaacattatgtggaaagcttgaaaaacagaaaacaagaatctcatagtcctactttctcccccagctgccggcattaataacaatgtgtgtagtgcacattcccttcctgtattttgcatgcagagcgtgttttaaagttgcaatcagtgttcataaagttcttggcacttccttttttgtacacaagtacattgtaatcattcacctcacggctacacaaccagcattcatcatcgtttcaatggttatttgatgcgttgcggtgaaagcactataacaaaattaatcatcttctacgggtcatttgtgttcctgacacatctgctgtcatgaataaccccatcgtgagttcttccatgctataactttttcctgctttaataattttcttaggacagatgcccagaactgggattattgggtcaaaggaaatgagaattactttggctcctgacactatgtctcagttgccttctggaggtttctaacagtgcagctctgccagcagtacaggccgggggctcggggatacctcaccggctcttattccaagagtcactgaacggcgaacacaaagctgccccagccctcagcctgctctggaggggcgcatttgatgtatgacctctgttgacagcaccagcaaagcaagttgcccttaaacccttaaactctgtatccccctatattacctttcagccccacaagaggatgtggacgagacccccagccctacagaaccaggcacagaggccccagagccccccgaggagcctctcctgggggagctgacagtgacaggatcctcccctgactcgctgagcctttcctggaccgtcccccagggccgctttgactccttcaccgtgcagtacaaggacagggacgggcggccccaggcggtgcgtgttgggggccaggagagcaaggtcactgtgaggggcctggagcctgggcgcaagtacaagatgcacctgtacggcctccacgaggggcggcgcctaggcccggtgtctgccgtgggcgtcacaggtgagtgagtgtgggtggggcagggttggaagacagccctagaaaatgtgcccttctctaccattttcctatacatatttctgtcttgatggggctcacagtgaaaggaatatagcaacattatggaaagacatgtcatggagagacaggctgcaatccagcaaatgaagcaaaggcgggtgagcatgtgatagggaggcccagggctcaggtcaggaccagacagggacgcctaagtcaccctgcccatgggtacccaggggacagccaggacctgagtccaggcatgccttagcttggtgacagctttagagagaaggtgaagtgtgtcagataatcacagctggtgcaaaggccaggaggctagaaagagcatggcacgtgagaggcactgaggattgagtggggtgtcctttacggtgagtatctcatcctgaagtgtgggagcagaggaggggaccactcaccaggcctggggtctcccagggatgaggatgtggttgcccaggtctgtgctgagatggccccagcagctgtgcctgtgtgaagctcatccgtgggggctgaagatggggatggggtggcagggagcctggaggcagcgaggccagtaggcagttggtggccctggtgagaggtgacagtggctcaaactaggatcggggactggaggtggggtaggaaggtatccaggggaattcagggtaaagatgctctgaggctgctggcagctggtgaggagctggatccaggaacacaccccaggctctggcctcgggaggagtgtgctgagcttgttgcggagcaaagacagaagcccagtgaacaaaagatggcgaagagaccccagtgctgggaggccaggggtgcagaggccgagtggggctgtgctcaaaagagaggcggtgctggagggacagggagaggtggcctgggtgttgggaggtgggggtgaggtgggggctgagggcaggagggtcagggtgagggataggaaaggccacaggagaggagaggatgaagagctgtgctggaggggctgtgggcagcatcgtcctgctcttgggcactttgtgttttgtgacacatcctttctatgctgaactgaggagccagggacctcactgtccccacacgtgtctgtccaactccagaggatgaagccgagaccacccaagcagtgcctaccatgacccctgagccccccatcaagcctcgcctgggggagctgaccatgacagatgccacccctgactccctcagcctgtcctggacggttcccgagggccagtttgaccacttcctggtccagtacaggaatggggatgggcagcccaaggcggtgcgggtgccggggcacgaggacggggtcaccatctcaggcctggagccagaccataaatacaagatgaacctgtacggcttccacggtggccagcgcgtgggccccatctctgtcattggggtgacgggtgagtggatgatggcagccccagggtgggagccgtgggagggtcaccctcttgctctttggtgatgactggtggggaatgggccaggggtccggtcagcaccacagacctgcttgtggctggggctccccttgggccttcctctgaggctgacccctggctcctcctgagcagggaggggccatcaggagttctgctgtgctggtgactgtcccaggtcccccacagctgaccctggaacttgtcatgtgtgttagctgtcagttgagcaggaccacccagccccaagaatgggcttttctgaaatgacctcacatacccagtagtggccatggtttctccctccttcccttgaagacctgagcacatcccccaggcacctggcatcctctctatatctccttttctcagctgcagaggaagagacccccagccccacggaactcagcactgaggccccggagccccctgaggagccgctcctgggggagctgacagtgacaggatcctcccctgactcgctgagcctctcctggaccatcccccagggccacttcgactccttcaccgtgcagtacaaggacagggacgggcggccccaggtgatgcgtgtcaggggcgaggagagcgaggtcaccgtggggggcctggagcccgggcgcaaatacaagatgcacctgtacggcctccacgaggggcggcgtgtgggcccggtgtccaccgtgggtgtgacaggtgagtgtttgtgagtgaggaagatggccctagaagatgttgctttctctgcaacttcatgaaaacaaaaatattctcaccagccgggcttcttttgcacgtttccatgcttggggatcttgctaagaggcagattggggttcaacaggtttgggctagggccagagattctgcatttccaacaagaaatgatgcggatgctgctggcccatgatcacgccccttgagtagcaaagttcttcacgacaaaggaattggaccctcttttgaaatctgttgaagagaatttttctgcgtccctgattcctggtagtgtgctttctctgtggagttgactaggggccgtgaaggaagacagaaggcagtgaggggcagcgcgtcgactgcacactctggaagcccactattggaataggaataggaacagacctttctcaccaatgggccaatttgttcattcagcaaagaattccttgccctgatccggacactgtaattttagggtatcaatgtcctctggccaacgacctccagaaactcacctaaaattgaatggatggaattatgctccatgcagtgcaggaggactgtggggtgacttaggaagaggctttagaaagagattgttaaggaactgggcttgtgtttggtgttttaggaaagcatttaaggaagcaaggttttgctctttattagacgctgtcaggaagaagggataaccctattaccgggcgtctcactaagtcttatctttggggaggtcaactagagcaaggccaaagctgccattggtaaagaagcagctatcactcagattagctggatgggtgatgtttggttatttttgtgctttggaaaatgttagagttcatccttactgagacatgatcacagactggccttgttcttgtcttgatccatcctactgacaaatggcctagtctgatgttgatgttccatgaaattgtctgttcaactggaccacgccaagaccagactgtgccaggccagccccaagcagccgtggcctggcagagggaaagggcagctcacgggtgtcagggctgcctttttctttcataggcggaagctggaaagtgacacacacaagttcatgttttcatggggctcacaattgtgggcacaagcagaaaaccggaaagtaagcaaagaaggatgagcatgtggagcccaggagccaagccaggattgggaagggacagtgaagtcactctgcccacaagtacccaggggacagccaggacctgaggccaggcaggccttagcttgatgacagctttggagaggaagtgaagcatgtcaaatcatcacagctagtgcaaaggccaggaggctagaaagagcatggtgtgtgagagacactgaggattgagtggggtgtcctttgcagttggtggatcatcctgaagtgtgggagcagaggaggggaccactcaccaggcctggggtctcccagggatgaggatgtggttgcccaggtctgtgctgagatggccccagcagctgtgcctgtgtgaagttcatccgtgggagctaaagatggggatggggtggcagggagcctggaggcagggaggccagtaggcagttggtggccctggtgagaggtgacagtggctcaaactaggattggggactggaggtgggggaggaaggtatccagggaaactcgggggagaggtactctgaggctgctggcagctggtgaggggctgggtccaggaacacaccccaagctctggcctcgggaggagtgtgctgagcttgttgcggagcaaagacagaagcccagtgaacaaaagatggcgaggagacaccagtgcagggaggctaagggtgcagaggccgagtggggctgtgctcaaaagagaggcggtgctggagggacagggagaggtggcctgggtgttgggaggtgggggtgaggtgggggctgagggcaggggggtcagggtgagggataggaaaggccgcaggagaggagaggatgaagagctgtgctggaggcgctgtgggcagcatcgtcctgctcttgggcactttgtgttttgtgacacatcctttctatgctgaactgagaacccagggacctcactctccccacacgtgtctgtccagctccagaggatgaagcagagaccacccaagcagtgcccaccacaacccctgagccccccaacaagcctcgcctcggggagctgaccgtgacagatgccacccctgactccctcagcctgtcctggatggtccccgagggccagtttgaccacttcctggtccagtacaggaatggggatgggcagcccaaggtggtgcgggtgccggggcacgaggacggggtcaccatctcaggcctggagccagaccacaagtacaagatgaacctgtacggcttccacggtggccagcgcgtgggccccatctctgtcattggggtgacaggtgagtgtacgatgggagccccagagtggggcctgtgggagggtctccctttctctggtgatgggtgaactggcccaggaagcccctctgctcttggctgagccatggtacttttttgtctttccccacttccctgaggactgacagatcttcctgggtggagaagggccctgtgagctctgttggtggctgtcccaagttccccagcactgacctcagagcttgtcatgtgtgttgactgtaaactgagcaagaccacccagctccaaagatgggcctctccaagctgaccccaggacccccactcatggccacagcttcgctctccttcctcacaagacccaaggacatcccccagggaagctgcctcaccttctctgtcccctcttctcagctgcagaggaagaaactcccgcccccacagaacccagcacggaggccccggagccccctgaggagccgctcctgggggagctgacagtgacaggatcctcccctgactcgctgagcctctcctggaccatcccccagggccgcttcgactccttcactgtgcagtacaaggacagggacgggcggccccaggtggtgcgtgtcaggggcgaggagagcgaggtcaccgtggggggcctggagcccgggtgcaaatacaagatgcacctgtacggcctccacgaggggcagcgcgtgggcccagtgtccgctgtgggtgtgacaggtgagtaagtgtgagtgaggcgaggtggggaagatggccctggaagacactgctgtctctccagtcttcgtgaaaacatactctgaagagtattccttcctttgtgtatccaaatgcctggagatttttgttaaaaagcagatttggattcagcaggcttggcctagggcaagagaccatgcatttctttctttttctttctttctttcttttttttttgagatagagtctcgctttgtcacccaggctggagtacagtggctcaatctcggctcactggaacctccgcctcctgggttcaagtgattctcctacctcagcctcctgagtaactgggactacaggcgtgcgccaccacgcccagctaattttttcatatttttagtagagatgggtttcaccgtgttagccaggatggtctcaatctcctgacctcgtgatctgccctcctcggcctcccaaagtgctgggatcataggcgtgagccacggcgcccagccaaccatccatttctaacaagattctcatctatcttgatgccactggtccaaggaacacactttttttgttgttttttattgtagtaaagtacacttgacataattcgccattctaatcgctttctagtttgcagtccagcatgaagtccactcacattgctgtggactgtcaccctccacttccagaactcctcttcccacactgaaacttcctacccactagacacgaactcccattctccccttgccccagcccctggcaacaccattctactctctgtctctatgaatttgactctaggtacctcatataagtgcaatcatacaatatttgtcttttttgaatggttcatttcattaaatacaatgtctttaaggttcatctatgtcgtagcatcagtcagaatttcctttttattttattttctgtggcaatgggggtctcggtatgttgcccaggctggtctcaaactcctggcctcaagcgagtctcccaccttgacctcccaaagtgctgggattataggcaagagccactgcacctggccagaacttccttccttttcaggctgaataatgtttcgttttacacatacagaccacactttgctcatcctttcatccattgatggacatctgggttgcttccacctcttagctatcaagaataatgctgctatgaatatttgtgtgcaaatcacagaacacctttgtagcaaagctcctcccagtaacagatttggaaactctcttagaatttgttgaagcgaatttttcttgcattcatgaatcctcacagaggttaggctcagagttagggttcctgtcctaatgggaaaagttcctgtcctaatggggctaacgtcatgggggacaggctgtggaccagtaagaaagcaaaggcgggtgagcatgtgacaagaagcccagagccaggcaggaatacctaaaccaccctacctgtggatactcaggggacagtcaggatctgaggccaggcaggccttagcttggtgacagctttagagagaaggtgaagcgtgtcagatcagcacaggtggtgcaaaggccaggaggctagaaagagcatggtgtgtgagaagtactgaggattgagtggggtgtcctttgcagtgaatagatagtcctgaagtgtgggagcagaggaggcctggggtctcccagggatgaggatgtgattgcccaggtctgtgctgagatggccccagcagctgtgcctgtgtgaagctcatctgtgggggctaaagatggggatggggtggcagggagcctagaggcagggaagccaataggcagttggtggccctggtgagaggtgacagtggctcaaactaggatcggggactggaggttggggaggaaggtatccagggaaactcgggggagaggtaactctgaggctgctggcagctggtgaggggctgggtccaggaacacaccccaggctctggcctcgggaggagtgtgctgagcttgttgcagagcaaagacagaagcccagtgaacaaaagatggcgaggagaccccagtgcagggagggtaagggtgcagaggccaagtggagctgtgctcaaaagagaggcggtgctggagggacagggagaggtggcctgggtgttgggaggtgggggtgaggtgggggccgagggcaggggggtcagggtgagggataggaaaggccgcaggggaggagaggatgaagagctgtgctggaggcgctgtgggcagcatcgtcctgttcttgggcactttgtgttttgtgacacatcctttctatgctgaactgagaacccagggtcctcactgtccccacacgtgtctgtccagctccaaaggatgaagccgagaccacccaagcagtgcctaccatgacccctgagccccccatcaagcctcgcctgggggagctgaccgtgacagatgccacccccgactccctcagcctgtcctggatggttcccgagggccagtttgaccacttcctggtccagtacaggaatggggatgggcagcccaaggcggtgcgggtgccggggcacgaggacggggtcaccatctcaggcctggagccagaccataaatacaagatgaacctgtacggcttccacggtggccagcgcgtaggccctgtgtctgccattggggtgacgggtgagtgaatgatgggagccccagggtgggagctgtgggagggccacctcttgctctttggtgatgactggtggggaatgggacaggggtctggtcagcaccacagaactgcttgtggctggggctgggactccccttgggccttcctatgtggttgacccctggctccccctgagcagggaggggccatcaggagttttgctgtgctggtggctgtgccaggtcccccacagctgaccctggaacttgttacgtgtgttagctgtcagctgagcaggaccacccagccccaagaatggacttctctgaaatgacctcaggtcccccagtcatagccttggcttctccctccttttccccaggacccaaggacatccccctcactctctctccctccttctccactgcagaggaagagacccccagccccacagaacccagcactgaggccccggaggcccctgaggagccgctcctgggggagttgacagtgacaggatcctcccctgactcgctgagcctctcctggaccgtcccccagggccgcttcgactccttcaccgtgcagtacaaggacagggacgggcagccccaggtggtgcgtgtcaggggcgaggagagcgaggtcaccgtggggggcctggagcccgggcgcaaatacaagatgcatctgtacggcctccacgaggggcagcgcgtgggcccagtgtccaccgtgggcatcacgggtgagtggggggacaggccctcgtccccaggtttacctctgcagcccccttgtgtttctcctttggatcttggcacctcttttgactgggcctctaggtttctgtcttttctcccatgttgctaatgatcctgcctcatccttggattcatggagactgtgtggagtcagatgggcaggtagtccatgccctgtttgttgtagcttccttctcccattgtgatctggaacctccatgttgctcgtgtgctcatttgttagtcttcaggctcccttaaggagtattttagtggctcagaaagtgcttcagatccagctgcccagatctgcatgtgccttcgaatgtagtgattgtgcgactttgcaggcgtttcctaaccttgtgcttcagattcctgcaaagttggggtgatgataataatggcacccacttcatatgttgtgcgagggttaaatgcaccactgtttgtgagctgcttacagcaatgcagggcacagattctaaaacaagcgttttagaggaggccgctaagaaatgctcactccagtcctgggagagcactgcctcccttgcgcagggtcctgcctcctgacccatgggcctgctctgctcttttcagcgcccctgcccacaccactgccggtggagccccgcctgggggagctggcggtggcggccgtgacctcggactcagtgggcctctcatggacggtggcccagggcccctttgactccttcctggtacagtacagggacgcgcaggggcagccccaggcagtgcctgtgagcggagacctccgagcggtcgccgtctcggggctggacccggcccgcaagtacaagttcctgctctttggactccagaatgggaaacgccacggcccagtccctgtggaggccaggaccggtgagtgagggctggaggcctcccgcggccagagccttcgcccccttgtggcacctgttggaatttcacgttctgtgccccacactccagtcctcagcacccactgatttattgggtccaggaaaacccaggccctgagctctcctctcccactcacactcatccctctccctactttccctgcaccccaggggacacttgctttcttgtctggctcctcttttattcctactcctggcccagtcaccctcccgttcctgggaccggctcacagagccatagcagcccaggaagctccgtggcccctttgcctccatcccactctccatgcacctcactgtcttttccagccccagacaccaaaccgtctccccgcctgggggagctgactgtgacagatgcgacccctgactccgtgggcctctcgtggacggtccctgagggcgaattcgactccttcgtggtccagtacaaggataaggatggtcggctccaggtggtgccggtggcagccaaccagcgggaggtcacagtccagggcctggagcccagtaggaaatacaggttcctgctctatggtctgtcaggcaggaaacgactgggccccatctctgctgacagcaccacaggtgagtcccagtccagcctccaccttttccagagctgcctctcatccgagccctcagagctggccctgcagccttcccgtgagattccctctatcagccctgacacaaccatcttaactccgaaagtgagtccctctgtgtgtcaggcacagttctgaagcatatgcattacttcctttcattcgctgactgctgaggaaataaaagggacacgggctttggggccagcagatctgtgttccagttccagtcctagcctttgccagggtgaccatggacaagccgcttcatccccgggacctcagtgtcctcacctgcataatgctgggaatggcgctggactcagtagtggttcccatcctcctccctcctccctgactcggagccgaggggtggaagaaaagggagggcttggctatggaaagacgatggaaaaacctggtgtcactatgcctatgactcagctccctgaggaaggggtgtggtgggtcaccgaccctcaccccactcccaggaccatgagtcactatgcccagaggaggacagagcagccggccagtctgggcctgggtccctgggactccgtaattctcttcccaaaccctcactgtggggacggggtacagatccccacccatcggccccagccccacccgggcaagcctctgctctgccctctgttttcccagctaatcccctgtcttctccctgccccaccctggctgccccggcccagtggggtcagtgtggggctggggaagcaggaggcacggatgttcaggctgatggccacaaggggacaagggggagatcacagcctggcagtgatgggagccgtgcattggccggctgcccagaccagctctcgatgtttggggtgtctccgtgacaacccagagacctccggggagtctctctcagctctggcctcattcttgctcaggggctgggggtcagggtaaacaaaggccctctctgcacccccagccacccatccctcgggagatgatctgtaatgaatttggcgcatcctcgatcacagcagggaaggggcggggcaggaaggagtttgggcagcagcctccagaggaggagggggctgttctccctcattcctgtggggcatggcgggagcaggcctgtgtgtctcctcaaggagctgtccctggggctacactggagggaccatttcccagaacctcacacctccgggaggctgccagggcttaggcaaaggcagcatgtgactaagagctttccctcctccctctgcacagctcccctggagaaggagctacctccccacctgggggaactgaccgtggctgaggagacctccagctctctgcgcctgtcctggacggtagcccagggcccctttgactccttcgtggtccagtacagggacacggacgggcagcccagggcagtgcctgtggccgcagaccagcgcacagtcaccgtagaggacctggagcctggcaagaaatacaagtttctgctctacgggctccttgggggaaagcgcctgggcccggtctctgccctgggaatgacaggtgaggctgctgtgcctggctatagcaagccagcttgtgtgggtttccttgtgcatttgggctgaagacaaagatgactgcaggagtgggcaggccggagtggggcgccctggcctgtccccaggaaggaggaggagtctgcagccctgtgggcttcaacatccatcaaggagtccagagcaggagccaggccaggcgggagggaaaggccctgggaggggctctctaatctcccagccccgactctgccccgtcactgccactgctcctcattactcgctggggctgctgtcgcctccccgaagggtggccttgtccagatagcggcaaacctccctgccgtggatgagtcaggagcattttcttaagaggaacatcactggaaaacaaaatgagcggggacacagaaaccaacagcagtggctgcatttgtggtacaggctcctcttccagagctcgctgatgcccacctcagacaggcctgaccacggcacggctggtgggatttgccagtcacctcaaccagccagttccaccctcagcttctctcagaagggagcaccacactcctcaagctcagtgaatgtatcccggcatgggtggggccagagcctgtgatatctcgaggtgggctcggcaggacaccggggtgtggaagggggaagcgagcacctgactcagacagcgcgggagctcgcaggagtcacgaggccacagcgacttcattgtctgactgggcctggacctataaacttcccacctcagccttgggccaagcctggaagataaaaatggagcaccccatggcgcccctcactcagattctcccctgggcttctcccacgcagccccagaagaggacacaccagccccagagttagccccagaggcccctgagcctcctgaagagccccgcctaggagtgctgaccgtgaccgacacaaccccagactccatgcgcctctcgtggagcgtggcccagggcccctttgattccttcgtggtccagtatgaggacacgaacgggcagccccaggccttgctcgtggacggcgaccagagcaagatcctcatctcaggcctggagcccagcaccccctacaggttcctcctctatggcctccatgaagggaagcgcctggggcccctctcagctgagggcaccacaggtaccaccaggcgtctccggcctctagcctaggactcagaagggagaaacgggggctcagaaggggtggtcgcagggaaagagcgtgaggcgggtaccagggagagaggatggatgggctggatgcgagtggcctttagctctgccccacaggacccccctgtggctgcaagtccctggttacagatagagaaacgggggcagggaggggggtggaagggacgtgctctgggtcaccaagctggtgtgcttctgtctccaatcccttctcccccacccactccgtgcagggctggctcctgctggtcagacctcagaggagtcaaggccccgcctgtcccagctgtctgtgactgacgtgaccaccagttcactgaggctcaactgggaggccccaccgggggccttcgactccttcctgctccgctttggggttccatcaccaagcactctggagccgcatccgcgtccactgctgcagcgcgagctgatggtgccggggacgcggcactcggccgtgctccgggacctgcgttccgggactctgtacagcctgacactgtatgggctgcgaggaccccacaaggccgacagcatccagggaaccgcccgcaccctcagcccaggtaaggacccacacacactctgccccaaagtgggggtctttgtacttcacgggggggacctagtgcctcagccagcggtgggggtgggcgagttggtggtgggcctggaggaatctgcagagcgacttccattcctggggactagaggaaaaggggtggtgagcctgtgctggagcagaggcgagggggggactcgtagggagaagcctccctgcccctgcctgcgtcattgttccttgacccctctgcagttctggagagcccccgtgacctccaattcagtgaaatcagggagacctcagccaaggtcaactggatgcccccaccatcccgggcggacagcttcaaagtctcctaccagctggcggacggaggtggtgcctttgccatgtgctcatcgcctcgcatttcctctcccccctgcactctgcccaccctccagctgccctggggttccctgggtaaccctcgatccccaatgttttcaggggagcctcagagtgtgcaggtggatggccaggcccggacccagaaactccaggggctgatcccaggcgctcgctatgaggtgaccgtggtctcggtccgaggctttgaggagagtgagcctctcacaggcttcctcaccacgggtgagatggactgggacccggggcaagaggtgggagccaagaaaacggcatgggtgggagttgagagagaacgaggagggtgaaagggaggtggtggaggctccgattgcggacgggaggccagtggagtctggggaggcacggagtagagagagccgcggggacccttctgagcccctccccttcccccagttcctgacggtcccacacagttgcgtgcactgaacttgaccgagggattcgccgtgctgcactggaagcccccccagaatcctgtggacacctatgacgtccaggtcacagcccctgggggtgagcaggcctgaggcctctggaggggacttgttcagggtggggattgcaggggggaggctggactctggccgaggatggagggggcaggccttgatgcccctctctacactcccagccccgcctctgcaggcggagaccccaggcagcgcggtggactaccccctgcatgaccttgtcctccacaccaactacaccgccacagtgcgtggcctgcggggccccaacctcacttccccagccagcatcaccttcaccacaggtagggtctgtggggtgtgtgggacagggagaggaggtagagggagccaggttgggcctcatccccatctcctcttcctgctttccctcctagggctagaggcccctcgggacttggaggccaaggaagtgaccccccgcaccgccctgctcacttggactgagcccccagtccggcccgcaggctacctgctcagcttccacacccctggtggacagaaccaggtgccccggccccactgacccaactcccctccctgggtgattccaggaggtgctgcctctggccctcccggagggtctccacctccctctcccctgacccccccttgtctgtcccacaggagatcctgctcccaggagggatcacatctcaccagctccttggcctctttccctccacctcctacaatgcacggctccaggccatgtggggccagagcctcctgccgcccgtgtccacctctttcaccacgggtacctggacgcacgggcccggggccgggggctgggtgggcagccagggcctaaggcttggaaaaggactggcccctgctctcctctcccaggtgggctgcggatccccttccccagggactgcggggaggagatgcagaacggagccggtgcctccaggaccagcaccatcttcctcaacggcaaccgcgagcggcccctgaacgtgttttgcgacatggagactgatgggggcggctggctggtgggtggcattgggaagcccaggggtctgtgcagggcagggtctgttgccccgggagccagaggctgatggtgcccccacttgcttcccaggtgttccagcgccgcatggatggacagacagacttctggagggactgggaggactatgcccatggttttgggaacatctctggagagttctggctgggtcagtgcctcacagggactggggaactacggatggggatgggggccctgtggacaccaggaccctgatgagggcacgtatcccacccccaggcaatgaggccctgcacagcctgacacaggcaggtgactactccatgcgcgtggacctgcgggctggggacgaggctgtgttcgcccagtacgactccttccacgtagactcggctgcggagtactaccgcctccacttggagggctaccacggcaccgcaggtaagcagaggctgtgaggctgggagggtgaggctgggaggggaggccctcatggctccttcctccaccctgcccaggggactccatgagctaccacagcggcagtgtcttctctgcccgtgatcgggaccccaacagcttgctcatctcctgcgctgtctcctaccgaggggcctggtggtacaggaactgccactacgccaacctcaacgggctctacgggagcacagtggaccatcaggtgaggggtggggaggcggctcagagctggggtggctggggctcggcctgcctaggtttcagccccacagtgtaacaggcaagggactgagtggctgggtgaaatggaacaatcatgccagcctcgcagagggagctggagttgatttattggctggaaagggccagctcagaattaagcctcaatcctctgcagcggagggtcaggaagggagctctgcggggaggttggttgagtgctgggagctacctccttaaggggaacgggaagagcagatgggacatccggctttgactctctcttgacaacccctttcccagggagtgagctggtaccactggaagggcttcgagttctcggtgcccttcacggaaatgaagctgagaccaagaaactttcgctccccagcggggggaggctgagctgctgcccacctctctcgcaccccagtatgactgccgagcactgaggggtcgccccgagagaagagccagggtccttcaccacccagccgctggaggaagccttctctgccagcgatctcgcagcactgtgtttacaggggggaggggaggggttcgtacaggagcaataaaggagaaactgaggtacccggctggcatcggtcctgccccatcactggctctggcccgggctgtgggcccccatcccccggggctgcagccgcacttggaaaggctgcatcttgaggatgacactgcagtggggcaggggctgcagggagggcagggcgtccccggagggcagcagcgtgaaggcctgcagcagtcgggtcagcaccacgaagagctccaggcgcgccagcggctcgcccaggcacacgcgggcaccgcagccgaaggccagagctctggagttcttgcctggctccaggaagcgatctgcgggcgggtggacaggtgggtggggaggcgttcagcggcagcggggaccagcctccaccacattttcacggcaggcccccggccccccacataccaggccagaactcatgtggcctctcccagaccgtctcatccaggtgggcgccttggaggttcggaatgatgactgtgccctcagggatgtcgtagccggagatgctgaagggggctggagttagaggctggccaggacctccctgggctcgggctttcctcactcatccccaaccctcgggagtcacctgctgggccgtgtggtgcggtggggcaaggctaagggcacaacgggccgcaggcgcagcacctcggcgatggtggcattgagcaagggcagccgtgcacggtccttgtaggggacccgggagctggaggcaccagggcccagttcgtggtctagctcctcctgcagtcgctgctgaatctggggaatgatcgggtggagtcctgccccagcagcccacagctgcccagcctccagccgctccctcagcaacccagtgagcctgagtgccggtgaggcaagcacagccccagccgcacagtgctcagagctgagtgagggtgcccaccgccctggccaggttgctgggaaggagccttttgcttgtccccaggacgcacctcagggtggtgaagcaaaaaaaccacggcccaggagagggtgtttgctgtggtctcagtgccaccgatcaggaggtccactgcagccatgtgcacgtgcccttccaggagctgtccagagccctcttccatgctcggctgcgccaccccttggagcatgtagtccatcatgtccctccactggcctgccacgaggctctcctgcagagggtgaaaggagcgggctgagcggctggcctggggagaggagtacagagtggcaacaggcccataactggggtatgcaaaagaacccgcctcatagcaatgctgaggccggtagcatcactggctgtgggccgaggggaggccgtccacgtacagtccccaccttgtgctgcctcagctgcatctccacgatgtgatccctcttctctatggcctgcttcagcctccggagacctggattggggaagaactgcggcaggaagcatgagaatgcagctgtgggaaggagcctctccctccaccccagcctctcccctacaacccaggggtgtctaggctccaggtcctcaccctgagaaagggaatcacgtccacaatttggatggaccagtggctccaggtttttaacacctcctggatacatttgtaataggcaggcattaagttgtcgtcctgccagaaaaggagggagtactttcagttcaggacaaggagaggctcagggaggggctgggggtgggcctgaggggctgtgaggcaccttgatcttgtctccgaaggtgaggtaacagatgatgctgcaggtgaggagagagaattcctcctcaatggccacaggggtgccgggctgggctctcatgcgctgtggagaaacagtgtgagttcagcaggccgctgtgcagcgggcagggcgggggctactgtgagaggcaaggctgacccgaggtggcctcaggagcccagccttacctcacagaactcctgggtcagctgctccaccactggctccatggagtcacggatgcccagcagcagggctgagcgggtgagcttcttgtgggctttccagagcagggagtagtctcccaaggacaggtccgggtagttcctagacaccagcttgtctgcaggaggaggtgggggctggagggtgggaactgatgaaggcagctgagggcctgaccttcttcggcctccccaacccctgctttctccccaccagatatgcccccccaagagcttccagggacctggattggggatgccccaaaggtggctcacacttgaggctgaggtgggaggatcatttgagactaggaatttaagaccagcctgggcagcatagcaagaacccatctcttaaaaaaaaatttttttaagaaagaaaaaatgcccccagcccttacaggtaagtggctcaggtctgccagcaaagtctgcccactttttgaccatggcttcctcaatggtcctcttggagttcagcaccaccacatctgggagacagccaaagcagcgtcagcggagagaggaccctctccgtcacctccgccccctcctatggtgagggccagagcgagatcagcctctcaccttgcagcccaaggtggagcctgtagatgggcccgaatttctgagtcaggccaagcagatagattgggaggtcgggctgcagcaagtgcaagaagcccggggcaagaggcgggaggtggaggctccggagcttccaccagttccacagcaggcgggcgccagccagcaggggcagcagcagcagcaggcccaggagcagcatggcgagacgcccgtcagggccctgaggtgccacttatagctcaagagccccagccatccctcctgctgtgtagactgttttggggcctcccttgaccccaccttcaggtaccctcccaccgacccgcccacagagtggcccttttctggaatgacaccagtctcattggccttgggacgtccgtatttcaaaaaaattgatcacccatcaagaagcaaggaagggaaatgcaaccctgacctttttcctgcatccagagtcagctttctggttccacatcaactgtgcaggcaatagtgtccgcccccacctgggccctctccctctgccaccccaccgtgggccagtttactggcatgatgtttgtctcagagagaaaatggcagtccctgcctaataggccttcctgaatcgcctgaagaacaaaatgtgatttgtgtgggttgtttgttagtttaagctacagatagagtaatacagtttaagcctggtttgcctggggcattccagtatatacaggtatcccagtgtgattgttattagtgcctcctttcactcacaaaagtgcccagaagacaaaggaggaagtggtttcccgctgcggagtaatagcatgtaccagacactgctctaagtgctttgtgggcactcactcaactcttcacagccatgctctatatgcaacacgggtattgttcgcatgttgtggagggcaggattccagcctggaaatctagctgtcgaatatgtacctttagccaccaggagcacctttctttggttgaaaggaaaacagcccaccttgagctggtttgagataaaaaataagaattggggaatttcacagaactcaggaaaaagaagcagaggaggggaccccactggtcttagaaagtcaaggatagggaacagaaaaagccccggagacgggcagtttcctcgctctgttcctctctcctctttcttctctctgcagtcaagtttcttgtgtttccaggcacaggcagaacatgactgccctcaggactacagtccacaggttctactccagccagggaaagtatggattcccagcacaactgggcatgcccccctcaaagtccaaagtccccaggaaggggctggatagccacagctggatcaggatcaagggtccagccctatttggggaactgaagccataaggggtgggggtcccactggactgacactcagagaccacttttgtgggtaaggaggcagtttggggatttgggaagaggccatgccaaagaggagtggccgggttcagtgagaggccagggcctcctggatggtacctgagaggtcagaggcgacccagcctcataccttcccccccatttctggctctgtgccagaccctcggaccagtgggggtctctctcccctcagagcttttccagactgtgctactgcagagccagagtcaagaccctggctgtgccacccactacattggcgagttcgctgctgctgaatccatgatcaggactgagagggagaaaacaggattgggatttctggggttgggcaatgacagctactgccttcttcatggttgacctcccagaccgggccatgtcttgctgcaactgaatccctggctccggaaaatgggcttatgccaccaccatgctgagcagctactgggagaaagatctgatgagcaaccatagggccatgtatgcaagagcctcaggaaacctctgccacagtgggaaaggcccaaacttctcaaagttacatgggataagacagtgctcatcggaaaggagcgcacctggaaggctgacgtgcttactacttgtctcaccatctccatctcttccaccacttccaaatccaaactccgaatgtggtcaattacatgcaatgtccccaaaggtaccctgtcctgcccccggcctctgggcctttgtatattctccttctgccccagatgccctcatctacccctgctctttgcctggctccttctcagtcttcagagccccacttggaggccacctgctccaggaagccttccctgtccctgcctggcaatgcccctgacttggttagatgccccacaggaccacactgctccctgacatcacatctttcacagagggtggggactgcccgtcctcttatctgtctccccagcgatgagccctggagtgagcagctgtatctctggcacctggcacagggcatggcatgaagtgaaagattcccgaatttctgtcgaatgactggatggcaggctgctgaactgtcatgacctctacggaaactgatctcaccaaacttctttggacagacgcggagtcatctctgaagaccccaggtgtgccactaaatgggggaaagttaggcaggtccggtgggaaggggagaccccaggagaacagcggcttcctcagaggattcacaaacacaccaaagtcagacttttggcttgtttgaaaccagtaactggaagaagacactgccggacctgaggattgcacaactccgggaaagtcacctcattccactgataacagaaccaagcgtcagcaggctttcaacagcccggaactcagctaaaatctgcagacctcagaaccgccagcagcacgaggacagagtcggggaggtgtagctggacaacagctcatgaggcagaagagctgtgtcacaggtgtcagctgagcacaagccctgtctgaggccgtggtgactggcgacagccgggcagtggagggccttggaagctgaagggtggtcttggcatggactctggtccttggggtgcaggctcttgggtcccagttctgctcggggtggtcctgtgaagcactagactcctagcgggtcatctgggaggttctagcagagctgaacagcccaagggtcatcagggctcagagagtctaaggttatgtcaacctggcctgcccagaactgcatcgggcaggggcactgctctcagccctagcaacacacactgacacttcgctgccaacactgacactttgctgccaaaagcctttaatatgccctggtcccaggctgtgttcatgaaagcggacacagcagtgcttccagcttcatggttcccaggttcaggttcctcccagcggaggtgggagggcagccctcacacctggcacccctgagtgccatactcctggaggaagtcgttgagctgggcacaggctgcccgctggcgggtgctccggcacaggcgttcagagggcatctcctcgatccagctattcgagtccagcaggtactgggggctgcagggggcaaaggggcagtcagcagggctcgggaggatggcaggtggaaacggagagcacaggcatctggcttctgaggggcaaggcctaggtggcgaggcatggggaggacaagagactgaggggaccagatgactcactgtccctcgaggtcataggtggccccatccagacccatgatcaaatattctttcccaggttccaagcgaaggcggcaggaggctcgaaccaggaagttgcgcatctgattagcagcggccttgacatccttggctgcggggatgacgtgcgcaaaagtggtcagaggggaagagaaggtgcagggtgagcccaggctggggactctgtgtagatcctctcattccaccttcgccacccccatggagaggtgccactgcctccctatttatggccaagcccaaggcttctgacagcccaaggggattttcacacttccagatggtcaggtcctcggccacacctcagcctccctgtctccccccagccctgcccgcctctccggtttgcttcatactgaagtgcaggacttgggtgatcttggtctcaaagaggcggaaagcagctctgctgtcttctcggagaaccttaacctggaagcctaagagggggtgaggagaagggggaaaggtgagttactttgaggctgagagggtaggaagttggtgtcagagcaaacaggctgcgtgcatgacctgtaagaggagcaggctacacccagagagaccaaaacagccggtccccgagggagggtcaggccagggcctcggtgggaagactgaccgtactccacacgggggtagtagcaggcaaacttcatcctgtagccatcctcgtcctgcagaccccgctccagggcgcgacgctggcgagggcacttccctgaagttggggaacccatcagacagtgtggggggggccccggccatcccgcctccactgccccgccccaggccctcagtctcaccctcagcacactggcagacttcagcagaacacaaggtggccaagagtctgctcttacttggtgccccgtaaaacacagaacatctgcgctctggagaacagagaggagttagggcacaggcccctccattctgcctcctcagtcccagggagccccagggctctctgccccctcactaccccggtgtccattgtcccataggagggcacctatgccaaagttctcctgaatttcagggtgtcctgcagtgctcaccggggttgtagtagtcgtacagggttgcgctggccggctgcaccagccccaccggcacttcctgcacagcctcaaagcccacgcactcccgggaggtggggacctggccaagcgtggggaggagagatgagggacccactccctgggccctgcagccccctgtactgggtttccttggcctgtttttgtttgcttcctattggccttctctccagtgtccttcacattctgttaccttcctactcagagaactctcaaagctgctccgcaaggtctctggtgacttcacttcccagagggtgaccttgccccagtcttcactgctccaggccctcagcagagtcttgcatcatggacgtgttctctgtgaaactgtccctaagctaagggttagcttctggaccacccttggttctgacctggtcatttcttacgttccctccttcggaacttccttcctcagagctcccctgtgggggtctcaaccactccctggcttccaccaaaccaatccaggctgatgattcccaaactgaacttgcagctccatccttgcattaggattgtggcaggacctgtaagttctccaaggcactctgcctgcccccaaacccactcgccctcctcgcggcctcatctttgtcatggatacaactgggtcctcctttatttgccacaacctaactgcaggttctgtcatcctgcctgaccccccgactcaggtcccaggcctgacccctcctcgtgcccacgcgggcccagtccacacggtgccgtgccagtgtccctcctgagctaggctgctgcaccgtcagctccctatccgggaatcttgttggctctgtgttttctattgtgttcaacccagatgtgtcagccaggcttccccagctgatgggggctggcccctctgcacacactgggtaggggtctccctgacctacaaacagctggctaatgacagccaccacacctttctcacattttctcccagaggttacagtaaatgttccaaaactttttttgaaggccgggcatggtggctctggcctgtaaatccggtactttgaaaggcctaggccagaggatcgcttgaggccgggagttcaagaccagcctgggcaacagagcgagaccctgtctttactaaataaataaataaaaatgttttgagagccgtaagagggttgataactattttagccaaataaggtcgtgaaaagacaaatacaactatcatctatggccaccatcactttgtaaaggaaaatacgctttaatattaaaaaaaagataggaagttcaacaaaaaaacaaaggcagcccctcaagctgaataaaaccagcattaggaaagactccctctcaaaccctgagggtccctgctgactggcatcggtccctgccgcctgcaggtctgccccttactctgctgtgtctcacgggctcacattcttgtccttctctctgatgacatcacaagttctcaagagcaccagccgctgacacagctgtctcctgagaaacctcctaacgcatactcagtaaacccggtgccatcgagtcccttcctgcctcatctctccccactcaccgagtcaaaatacagcaggacgtggggcccctcggtctcaaagtgactcacgtaacggtcagagagggaggtcagctgtggaaaaggggagttggtcacaggccctgcacatgacagggctcagtacctgggacagagggggttgccctgggtggctgaccacaccttctccaggtcagcacgcagggcgtggaatccactcaggagggtgacgtccgcgatggccatgccagacagccccaccttgccgttccgcctgtggagacgtgtgagctgtcgtccaggttctgcctgcgcgggctccagaagcccagccccagcctgggtcctgccctccctcccctggcccagggcagctcccggcgcccaccagatgcacacggtgtagtgcaccctggactcctgctcctccaccaccttgggcgcctccctcctgcggcggttcctccgaccctcaaacagctgcaggggtgtcacgggctgcagaggggcatctgggtcatccttggctggaagctcatcgtactcatagtcctcatagtcctcgtttgcttccactgcacagggaagcattgtgaggagggctgggatggccacccggctccctgcgccagcccctgcctggccccaaggcctcccaacccccacactcactcgtgtactcgacgtggcctttgactgtcacttctatctgtaggtcctggcaggtcgtgttcttcatgtccaggacattgtaggtacgaaggacctggctcagcaaggggcagggagaggacgtgggacatgtgaggccacagacctctctggtgccatacctaagggcatctccctgggctacaggatttgaggccttcagccccttttcctccccgtcactgcacagtccacacacacgagtggcaccacattcgccacaggcgtcaggcgagacagagaggtaaagaagcaggggcctgcccccagaggccaacactccagactgtgctgggaagaggctggactgaaaagctcaggaaaggcttctggccaaggcttgaaggagaagaaagagcttgtcctgtgggccaagaagcagggaaggacaggaaaggcaaggggatctgtgtagacaaggagagctgtctggccggaggggtgggcagaggcccagccatctgagccgtgggcagcggggagtgacttttccccaaggctgatctggctggggcttttggaaggtcagtgtcactgccgtgtggacagtggatcagacaggggagacaggaggtagagagaagttccaggtagggagaaggccgtctcagcacagaatctaggatgcagcaccaagggccacaggcagcaggggagcagaggaggagtcactagggacataaggacaggcttgggagaggggccactaacacggcctctagagtagtggctgggctcctggctgggaggggctcccaccagccagacaagagacacagaatgaagaagggctttgggacatgcctcgtctgaggtgctgtgggagtgggacgagtggggcccatggttcagggaagaggcctgggctgaggagtgggattcggagccaccagcactgaggcgggtaaaggaaacaacaggtacccagagatggggagagcaagcgaaagcaagcagggggaaaaacacccaggacggaagcacgggacaccaaccctgaggtgtctgcctccttccccggaccatgtgcctctgcccacaggcctctcactccacaccctctcctccaccagtgcctggccccaccccttccctggccctcaccttcagggttcctttgctgtttcctcccaccttcacattgatcttgctgcccaaggaaaacttcagcaacagaaaagggaaggcgatgttagaagggcacaagcaaacctgtttttgcggctccaataacttatctccttcctcaaaacagccccacctcctctccccacctcacatttccacaaagtttataccagcacatgaattatctcacttcagccttctaacgaccctgtagggtgaactctgtgtatgttactctacaagtgagaaaactgaagctcagagctccaggtcacgcagccaggaagtcagtcttcccccgaagaccccaggaagaagtgctgcggggattccacgggtgggagggtggggacggcttctggcctggccacgaggcccaggtgtcctggctacccaggcgagggagtggttcaccagggagtggttcacctgcagctcctcctccaggccgcgaatctggcggttgttcagctgcagcgcgtgggacttgaacccattccggcctgtggagctgagagtcacattgagacccctctcctcagtggtgtgggaggcaatccagtaggcagacagggcatccagggcaatcaccgtgtcctagggaggttgagccaggactcaagcaagcccttggtctgaggactacccacccccgccagagcccggggacggcccctacttgggtactgcggaatcccccttggaagctgccctgacgggtgagccaggccgcagcctggtctgccatctctgctttgccctcgtgaagcaggaggtgcagcagggcgtaggctgtggtttcaatccacagggctggggcctggggcatggggtcggatgggttgcgaggagccggggtgggcgacacggcattgctctgagaaccagtgactgagccccagtacaggttatctgaaagtgaagggagaccacgagtaaacaggaaggcagggagaagagcctggtcccctggcccttagccaccccctgctgggctctcctgagtctcccccaacccacccctgcttataacttcattcctcctctgagtcttcatccagcctctccctctgggcacactcagggatcctaaggtcccctgggcctcaggctcactgccagagcccctcacccctcacctccagtctcctgggccattgccatgaggttgttgtgggcaacaccccgcaggtccgcaggggccttggtcagtgtcagggcataggccgtgatggcagctgcgtgggcacccaggagcccagcacttgctttctcccccaaaaatgagcttgcctttgagatggaggcttcctggaagaaaacgggaggagggtcttgggcctggacccctgggttcctgaggaaaaagggagagagctgggggccagcagagggcagaaacgccactgaacttaccactctctgcttcaatggctctgcaccctcatcctggaagacggccagcccatgatgaagggcgatggtcacaaaggctgtgagtgccacagtctcatcattgcccaccaaacccccctagtaaggggagaaaagatgtcaaacaggagggggaaggggcaaagagagtcctccgacaggcgcttctcgggccagccccagcatgcccgcacctgcatgctcctatgtatcactggagagaggtcctggaacgagccgtcagcctgctgctgggacagaagccagttagatgtctcctgcagtttctcaggcgagcctcctacctgctcctgggccaaactcaggaccttcaacacaaaggctgtgagcctggagggcaggaaaggagggttggggataaggacttgcttctcattatgcccacgcccccaggtgcctggttatccaccctcccatcataccagctctgtcccacccctgccccagccctgaccccctcagaaccctggaaccactctcccaagctcaccaggtgctgctgccccgtgacaaccaagccgcataggaaccatccgccttccgaaactgctggatccgcatgtagccttggagaggagaggtggccgctcaggtgacactcacccttctgctgtttgagcccaaggccatgctccccatcctcatcaggggccccctttctttccctctgtagcctcctgggctgtccatcttccagtaactgtcctttcctggcccccctcctgcttgcccttgcacccagaacctttctggatcagatccacggcgtggtccttggtctcgggaggcagtgtgctccactgctctgtcttgtccaggtagcgggaagcagccagtgtcggagccaagtagatcatggtttgctccccacagcctcgaggaagcctcaagagggaggccacgcctcctggtgacaaggccccctcagagcctaaagtgtccaatggatctgaggctacatgggagggagagggtggaggtctgaggactctgtgtcagaggctcacggggagtgggaccaagcagggatccacaggtcccacatgaatccgaaggtggccactgggaagggactaaagggcactcccacctgtaaccctgacgtagctgttaaagtccccatcagggatcatattgggatcagagttgccaggtatttccaaggtccggcctcggtggtctggggaaatgggggaagttggcagcctgtcctgctgtccacatcccccaccacctgtacccacttaggaaaccaatggctggaggtagagggtcactcacccaaggggttgagttcatagaccagctcctctctatggatggccccttccttctgtctcagggaaaacatggttgtgaggtcacacaggactacagcctgccctgctagcacagactcccccagaactttgagtttcaactccagggacagagttggatcagaattgtagaagatgggaacagaccaaggcattggtttgggtgttgggcccctggcctggccagcagagagagtgctgagggtggaggacaaagctgggggcccggggacttatattcaggggtgctccattcacctcaatctgcagaaccttggacaccgcatctcccacagggaattcgaaggaccctcgagccaccaccttcagagacacagcggtggctgccgtgggcaccacagagaaggcaacaggccgggcagagcccgcaggcaccagcacctgctgggccagccctccgcccccagccaggcacagcccctccactggggacacgtggacgctcacctgagggcaggaaaacgaggatggccagagtcctggcccggttagcctccccacccctcactgggccctggctcccccaactcctgtatgctcaggctcccatggggcctcacagtcaggtttttatccaggtagttatagaggacaggccgcagctccagctgctcaaagcggcggacagacatgggcaggcggaggtgcaggtggaactcgcggaacacccggagctgaactggggtggccacacataggcctgagggaaaggaagcgtgggcacaggggcagagatcagaggggccatcaaagcttcagggccacaggagggaggggtgggggtgacccagctctgtctcagtccgcctctgccctctggcccacgccagctgcacgctggcacagacctccccagatcactggaccctcttcctacactaagagcaaagggaacagggagctggggtacagggaaatggaagcagggtcacctgaggcccagacagggtgacatcacctttggttttggacaggctcaggccatggatctcccacgtggtcagagagtcggggagccacagtgtcaatctgtgtagggaaaggcagagaaggcccgtctaccccggctggccccgagacacagcacagagaaaaggccgggccggcacacactctcacatttgaaagcggtccactgtttccactctccagagccagttctctgggaagaagctgcgcacgggaatgtcatcctcatcaatcaggtcctcctcctgcaggatctccagggctgggggaccacggtggacgggagtgaggaggggaccgttctgcctttccaagcgccgccacctgtgccctagccccacccagcccctcacctcgttggaggcccgcctggcccttgtccctgctcttcttgcgcagactctcagcaaattggcagcaggacaggaagggctcccggcagtccggctgctgcacgcgggctgcccgctgctcgcaggaacgcatcatgggcagacgtgtcaccccatcctggcagcagcgcttggctgtcggggaagcatactgacccactgcagggccaggtgggggtgagcatgagaggacaaaaaggacatacacctcagcccccgccccgaccccttgagaccagcaacataagagaggctgctggagagagctgcccaccttccactcgtaatcccggaattcggatctctggccccaaataccacacgtgggttcagcaaggagccgaggggcagagaggcagacccccaacccggatcccaggtggagagcccaagctactgcctaggcacccgcaactcacatttctcattaatcgccttttggaagttcacgtttctctttttccgggttgtcttctccttgggacagcttagtcctggtagagagaaaggctgcagtccagccgtcaggcactcggcctcctcccctcctccccttcccctgcccagcccttcctgcccggactcttccagctggtcccctcaggcccttcctccttccttatcttcccgccacccactccccttccttctctgttctcactctttctggataaggtccactggtctccatcagaaaaggccaggcccgctgcctggaacacctgaagggcactgtccccacccccaggaccacagccgaggtcatagctgttcatagcttcaaagacctgcaagaaaggcaggaatgctaggagccaagtgtggctgaggggcaggactgagcactcggcacaggtgagagggcagcacatggggggataggaaaggatacagagccaggagatggagaccacagggccaagtggggaagagactgtggggagcctcagtgggatccaggggctgcgcccaaggctcagggaagcagggggatgagccatggaggggtgagagagctgtggagagggtctggacaaaccttgcccatgttgaggggcttgtgggacttgctgcctgcagcatacagagctgtgtccaaggctcccagcgccaccagggctagggagtcggtttctaagtggagcttcacggactccccgttccggtactgcttggcaccgtccacgctgagctccagctggcaggggcggcaggtgggggcggtcagagtgggagagcttccttcagtcccggtatcctcactgcccccaagctaaatccatgccctgttggcaatcaccctgtcctcaaccccctcggcacaagtgccatctctcctgaccccggtcaccttgccctcgcaggccccagcctggacatccactcgcagggagttggccactgggtggtctccatggtagtagaaggccacaaagtagaaggagggtgccaggtgatggtccacaaacaccgagaccgaggtcagggtcctcttgggctctcgattcatgaacacgatctgccctcgggataggatctgggccaagaatgggagggacaagagtggttgcctcttcatgggacagcctcagccttgaacccccccagccccacccagagggctcttccctgcaccccagccctccgtgactccccagctcatgcacaccatgtagtagtaatgagaaaaggtggccccactgcccacggctcgcaagttcaggttcagagtgtccccaacacgaggaggtcgagaatccggccgctcaatagacagaaacccggggcctcctgaaggtggggctgccacagtgagcctggctatcgctggatgtggggagcctgcagatacctggagagggggtcaggtgcgaatagggtagtagctcagagccaagtaccccaccttccccccaagtcaggccatggatccttgggaccccagctcaccctcctccccttcccccaccatctcccaggggtccgaggagtcctactgagagctgcagctctgagatggtctgagggataattattggaatgctgacttggccgctcccgtctgtgttttgctgaatgtcctggacttcaggaacagacccaggagaagacaccgtggcagaaactttgacaggaatgccagaagctggggagcctgacatctcacggaccaaggcctaggcaggtaaaggagggcaggcaaaagagagtggtcagaccctgagccctcctaactaccacatcctccctactcatccttcccctctggaagaaacctgcagcaggaagggggccccaggcacaaggtgtcgcttggtcttgctaagatccaaggagaagggagatgacacaaaataccaggatgtgagctctgcctcctccatctccccacctgcaagacaaaggacagagagaggtgggggacagagcccaagaagagagggacaggaggacaagtagggagtggcttgagtggttccctcccacaagacagtgagctcccagggcgcaggctgctgtattcctgtctgtacatgctgaggcccagcacagggcattgaacaacacatgtccactggaggagtgaaggaatgagcagaacgagcaaagaaataaataaactcagccagggaaaagggccgagtcacagagacagagttggagagaaaccaggtctcctgggtgtttcctggttttgagtctgagatgagatgtgagaagtggggtggtgttggtgccggaggacagagggttagctcagaggtcagaggcaagggtctggggttacaataagggaaagtcacccacctggagactcaatgatggctgcagcaacgtagaggcgcagcccctggaggtcagtaatgcccatattcagcttctccagggcgtcctggaactctgcctttgagagggaaatgtggctctgtccattcaccagctggggcatagaaagaaacaggacatagggtgagactgagtctcccacctcacctcccttgccccttcccctccccagcccctattctccttcctaccttggtctgactctccagcccccgaaagaaagtcttcttaccatcctcatctaggagcccaaagcgcacatatgccaccccctgcactggcttcccatagatgtacctgtcgtggcagagagaagagggtgggccaagggctggggggaataatggcccgagggcagggaagcaggagcccattcatactgagtagggagcaggacccggtgctggtgggcagaggtggggagggaggtattacctggcctggatgtctaactgcatttcatcaagatggcctggcaccgtcaggatgtagggctttccaggggtgatcttcacctcaaagttgggaaggactgacccagggtgaagggataggcaggtcagactccagctcaaagactcccctctgctcagggctgtggcacccatatctccctgccctgagctgctcccagtacctctccttccacccttatttccttcaggaaagcagctgcctgtccctccagtttccagctctcaccatatttcttcacctcaaactgggtgctgctgttggattccaggccatctgagaatcgggctgagatcttccaggtccctggcctgagaatggacaaggaaggggctcagcccatctgtacagtggggcacggagagccagcagcctgcttccctgggaagaggactgtgggggttaaccagaggctcaggaggctgagggtcagggcatctggggacgtgcctctgtgtgggaggtggagagcctaacaggaattggggtggtgtagcttgggggcagcccccacattgggagcgctcactctgagatgtctgggatcacaaagtcatcctggaagatggacgagggcatgtacacctccttcttccgcacgcggaggccgtgagagttctgcaaggggagaagtgctcacaggcaggaggtcacatcagtggccaggatcaggaaggccagaggtcggggactcacctccaccatgactgtgatggtgtcagtgctcgggcgcatcttctgatccagagcaaagacccggtaccgaactgggagtggaggaggagagaggtgagcaggggtccatgtgcaaggggagggtgggtcaaactccacagagggagcaggggacaaatgtttcctaagcaccccttctgtgtggcactttctttcaggttatctcacttagggggcaccaaactcatcctgagagggctcggagggggttaaaggttgaggccctggggctgagactcaccccgctggccagggttgtaaatgggctggtccgtctgcaaaaagaggtgcccccggcgagaggagaagagcaggttgataccctggatgtttgtcgttctggacagagagtcctttagccatggcgaatgggccaccagctggacctcagggcctctgaggagttgatggaggccacagctcttcgcatctttcaagggcacctgtcaggagagggagagggagagggagcgggtcacagagcaagagacagctgaccaaaaaggacagagaccaagggagaaacgtggaaggagaatgccagggtgggaagacaggaggggaggaggccagtgggaagatgatgacacttacaagacagatgggaacagggcaggaggcccccacaagcagcaggagggcatggggtctggttacctggagactgaggagtgcgaagtctctttctgagctaagggtgaagtccacctttggggagcaggggacattattacgagatgggtttctcaggaacactgatcctttcactacctgtcctcggggcacatcctggagctgcacccccaccgatagggggacccccagatgaaccacagaaggagagaacaagagcaacctggggagaacagacaggatcagcagtcagacttcgctctgacacctccacccctgctctccctcactcctgaatcgggtcccgatgccagccctgccccaatccaagcacccagcatcccgcctccaggacctgggcttctgcagagataaggtgaagaagctggatgcccagatcagcccccagagcagcctcatggctggaggatccaagagaggttagatccgtctgtctgtctgctaccttctggccaagctaggcctcggggcagagttgactctggaccttgctcctcccccagcccagctaagctgggaaaccacgtgacagccaagaagtgcaactggcctcaggcccagagttgtgggggcaccccggacacctgggtgtccatgggaaactctgaatcttggcccagaaataaccctgtccttccccgttaactcctctcattccagtgcctgagcacctccccctaccaggtatatctgtatcagggtataggtgcacacaagctcatgtatacctgggcgtacaagggcccaacatggcccacgagtacaggatatttaaaggccctcacaaaacaatgacaggcttctaagacacttgtctcttactttcattccaacacaaattgaactatactaggcttttgcttttttaggccctaacagaaattccgtggtttaggagattaggtacaccctcaccactccacagggagaatggcctgaacgtcagagtgaacccctgacccctttcctctctgaatgaggcaaagctcagacttcacctctacccctaaacaaggcacccaaacacacgtcacagtaaataaaggacatccagaaaatatcacaggcagaggtactttatttggcaattttaacatgacacgtagagaaaagaaccctgccctccttcaccagcctccccagaaatcccaccttcctatttcaagacagagtaataacagcaccattttacacgaaagggaacagccacagccttggcaccatttctggttccactttccatggaagggcagagaagcattgctcaaaccccaccactgggtcagaaaccaggcaaacagcagcagtcacatctgaccttttgcacacacgagagcccgacactcatcctggctcccaagccttcccaaggtgaccctgtctcagccaccatcatgcagctcttctagtcccctcccggcccactctgaggagctgagcaatgatgagcagaatcttcatgtctctggcaggcggaggagggttcctgaagtggtagagatgctgtgcaggagaaagacaaggctggagccagacgcctaggctcaagctgtgaggagaacttagaacttgggaaggggtgctcccgggttccagagaagaatgagagccactggccttcactaggaaactaagcatgagctgggaggaaatcccactttgggtcattgctccataatctgccagaggccagggaaagactcaccagtccactagctgggccccaatgaggtcgtgcacatggtaggtgaggccaagccgcaccacgacaggcgcccgccggcccaggagctctgataggagcagttcccggtactttgccttccggaccatgctaaggacagcctggcgccctagaggagaagtggcacaggaaaggggaaaggtgaataaggcctagaggcctgaggagccaccaaaaggtgaggggctgcaggcttgagctgcagatgggatacctttaacaaagtacttgatgaatctcccagctccaggcacagctagccaccagctcccagcatctcggacggtgaggactccagcattcaccagatgcctgagggcagtgggaagccagcagagatgagggctgggctctgagaaccatctctcctcctcatccattaatgtttacacaagtctccagaaacacgggcaaccatgcaagagagactggataacaaaatcccagcctggggtggttctgtgctcgcaccaactgcctctgttggtgcagttgcttgttccaggccccctacctggactgccctccctccactttttcttttcctgctactattactggttcagttaaatagcttctcttccctgaccacatgtcctgacacacattcggtcttaggaccgaggagaggaatcagagtcttctgcgctcctgccactgcctaggcagactgcgccatggctcccaccacatctctctgagagtgtgtctgcccatgtgagatcagtgctatagtttttcaaatgctttcacatattccatgggttacaaagtaggaggcctgagccagatacagcctctcaaaattagatttttatttagctcctgcccagttgttttttagctttgggttttttttgttttaatgtgaatgtttaggggtatcccagctcctaccattctctatcctcttagtcccagtatgattaacatcaagcttttacacttcctgccaggcccctgtgtgcttttgataagccaccaagaactgaattctatttcagggctctttctaaggcccaggtaagataggcctcctctcttgtggggaggaatacaaacttgggtcattttattaacaagaagagtcagctttttggcagcttttctggcaggttcaccaaaaaaacaggaggacaggctggatggaactggagggaggcagggaagcaccagatgcctgactttggttggttccacaagtctcacgtgatttctgagtccctgaagccaaaggtctgtgtcatttggtcctgctggaaactaaggtccccacaggctggaagtactgaagctagaaatttctgcactgccccagcatacggtcggccatcacaggccttgaggacctacaagcagagatgagagacatggtccatccccaccctcactctctaccaacctccacccccaggacagcatttctcttcctgtcttacctcttgctcagatccttccacctctcatacccttcttcttcctcctcctcttcatcctcctccccctcttcctccccccctcctcctccccctccttccttcctcctcctccccctcctctccccccctctttaccctctcactcctccctctttccctcctgtctctctccctcatattactatttaccagggccctgtgccctctccatgggatgtgggggcagggaaattctttcttttgtttttatttctgtttcccaagttccctgtctcccccaacctgtgccctccccccagcacccctgacgcacacagtcacatactctggtcctgtagtcctcagtgaagataattccatgggcatccaagtcgaagcccagctggacgattctgatctccccctgctcttgaagctccttctgtctccacagagaagagagtgaaaagaggcgtatcagggtaagatgctctgctatactctgggcgctctcaggcagggagattttgtttgccaatatgggggcattttctcttagtaaaggaaaaactgtgtgagaaaataatcaagcaaatgaccaagcagccttttccaactagctacccacattctcatccacctgccttatatatggtctatcaaagagtcaatataatttctaagaccaggcactaagataaaatagtgattaagatgcaggctgtggcttcaaaacattaacagtctaaattctgggtagggtaaggtggggaggagtatgggattcaatgtttaaaacaaataaaaataaaccaggacttctgtttacgagaatacagcaagaactaatccacctgttgaaaattaactaaaatcctggataaaaatgttattttaaaattgtttaagaccaggtacagtggctcatgcctgtaattcagcattttgggaggctgaggtagcaggatcaattgaggacaggagttcgagaccagtctgggcaacacagtgagacccccccacccgccacatctctacaaaaaatgtaaaaacagccaggcgtgggggcagacacctatggtcctagctacttgggagactaaggcaagaggatcacttgacccaggagtttgaggctgcagtaagatatgattgcaactgggcaacacagtgagaccccatctcttaaaaaaaattgtttagacactaaagagctcacaggataacaggaattaccactaatataacatctaagtaggccgggcgagatggctcaagcctgtaatcccggcactttgggaggctgacgtgggtggatcacctgaggtcaggagttcaatatcagcctgaccaatatggtaaaaccccgtctctactaaaactacaaaaattagccgggcgtggtgatgtgtgcctgtagtcccagctactcaggaggctgacacaggagaactgcttgaacccagaaagttgctgtgagccgagatcatgccactgcgctccagcctgggtgacagagtgagactctaactcaaaaaataaaaataaaaataactggggccgggcacggtggctcatgcctgtaatcccagcactttgggacgctaagggtggatcacttgaggtcagaagttcaagttcaagaccagcctggccaacatgatgaaacccggtctccattaaaaatacaaaaataggccagatgcggtggctcatgcctgtaatcccagcactttggcaggctgagacgggtggatcacgaggtccggagatcaagaccatcctggctaacacggtgaaaccccatctctactaaaaatacaaaaaaaaaaacaattagccaggcatagtggcgggcacctgtagtcccagctactcgggaggctgaggcgggagaatgggtgaacccaggaggcagagcttgcagtaagccaagatcatgccactgaactccagcctgggtgacagagcgagactccgtctcaaaaaaaaaaaaaaaaaaaaaattagctgggcgtggtgtcaggtgcctgtaatgccagctacttgggaggctgaggcaggagaatcacttgaactcaggaggcagaggttgcagtgagccaagatcataccactgcactccagcttggtgacagggtaagacactgtctcaaaaaaaaaaaagtaattggaacatggagggcatttattaatctaggcaaatctgcccagaacattttcaaaagtaactgggcgcataaggaaacaaaactcaaagagagaataaaaacaaaccccaaaagacaagtaatagtggaattatcctttccacggtctccctctgatgccgagccgaagctggactgtactgctgccatctcagctcactgcaacctccctgcctgactctcctgcctcagcctgccgagtgcctgcgattgcaggcgcgcgccgccacgcctgactggttttcgtattttgttagtggagacggggtttcgctgtgttggccgggctggtctccagctcctaaccgcgagtgatccgccagcctcggcctccggaggtgccgcgattgcagacggtgtctggttcactcagtgctcaatggtgcccaggctggagtgcagtggcgggatctcggcttgctacaacctccacctcccagccgcctgccttggcctcccaaagtgcccagagtgcagcctctgcccggccgccaccccgtctgggaagtgaggggcgtctctgcctggccgcccatcgtctgggatgtgaggagcccctctgcctggctgcccagtctggaaagtgaggagtgtctctgcccggccgccatcccatctaggaagtgaggagcgtctctgcccggccgctcatcgtctgagatgtggggagcgcctttgccccgccgccccgtctgggatgtgaggagcgcctctgcccggccgcgaccccgtctgggaggtgaggagggtctctgcccagcctccccgtctgagaagggaggagaccctccgcccggcagccgccccgtctgagaagtgaggagcatctccgcccggcagccgccccctccaggagggaggtgggggggtcagccccctgcccggccagccaccccgtccgggaggtgaggggcgcccctgcccagccacccctactgggaagtgaggagcccctctgcccggccagccgccctgtccgggagggaggtgggggggtcagccccccacgcagccagccgccccgtccgggagggaggtggggggtcagccccccacccggccagccgccccgtctgggagggaggtggtggggtcagccccccccgcccggccagccgcctcgtccgggaggtgaggggcgcctctgcccggccgcccctactgggaagtgaggagcccctctgcccggccagccgccccgtccgggagggaggtgggggggtcagccccccgcccggccagccgccctgtccgggaggtgaggggcgcctctgcccggccgcccctgctgggaagtgaggagcccctctgcccggccaccaccccatctgggaggtgtgcccaacagctcattgagaacgggccacgatgacaatggtggttttgtggactagaaagcgggaaaaggtggggaaaagattgagaaatcggatggttgccgtgtctgtgtggaaagaggtagacatgggagacttttcaaaaaaaaaaaaaaatagtggaattatcaaaaagacaattaaaaaaaaaaaaaacagcactttgggaggccgaggcaggcagatcatctgagtcaggagtttgagaccagcctggccaacagggtgaaaccccatccctataaaaatacaaaattaggccgggtgcggtggatcatgcctgtaatcccagcactttgggaggccgaggagggcagatcacgaggtcaggagatcaagaccattatggccaacatgatgaaacccccatctctactaaaaataccaaaattagctgggcatggtggcgcgtgcctgtagtctcagctaatcaggacagtgaggcaggagaattgcttgaacccaggaggcagaggttgcagtgagttgagatcacaccactgcactccagcctgggcaacagagcgacactccacctcaaaaaaaaaaaaaaaaaagggaaaactaaggcaacaatgaccacagcagtcacctcccagggacattctgatcagagacattttgatcagagagggatatatgtgggatactggtcatattctatagtttgacctagggagtggctagataggtatctgctttataaacatcatttaaattatatatgtttatattttcattctgcaacttttaaaggtttttaaaaacaaaagctaacaccaatacattaaaatcaacaaatactccttaaggagtggttccatctggcatgcttcctcacgggagacctagtcagggagactagctcacctcaagtgagtgctagactgccttccttttctttcctcttttcttgaaagatcactattaaccttctacctgctaaatccaatggacagatttcagttctgggtttttttgttgttgttttcatttttttagagacagggtctccctctgttacccagcctggagtgcagtcgtgcaatcatagctcactgcagcctcaaattcctgggctcaagcactccttctgcctcaacttcccaaacagctagaacaataggtgcacaccaccatgcccagctaagaatttttgtgttttaatttatttatttagtagagatgggatctcagttatttagtaaagatggggtctcactttgttgcccaggctggtctcaaacttttggtttcaagctatactcctgcctcagtctcccaaagtggtgggagtacaggcatgagccaccacactcagcctagatttcagtttatattttactttacctcttccctcttcttagaccactgtcttgaatcacaggttctaatactgccaactacttcactttctcaaaaatctctttactttcacagtaggcctcttcctgggttactttttttttttttttttttgagacaaagtctagctctatcacccagggtggggtgcagcggtgctatctcagctcactgcaacctccgcctccccagctcaagcaatcctcccacctcagcctccccagtagctctataggcgcgtaccaccacgcctggctaatttttgtattttttgtagagatggggttatgtcatgttgcccatgctggtatcaaactcatgagctcaagagatccacccacctcggcctcccaaagtgctgggattacaggtgtgagccaccgcgccggcctctgggttcctcttaactcaggcaagtccctctctgcctctgtcacagattcctcttcttctgctttccctttatgtcagtggatctcaaattttaaggcacacttaaaaagcacttgaggcagttcaaaaatgtagagtcccaaatcccgccccaagagagcgtaattcattaaccttggatgagtcccaggaacctgtattttttttaacaagcagcccacgtaattttgacacaggcataataactcagctcatatattcagtaacactgccttaaatgatggtgtttcccagcattgtggatttgaccctattaacttccactctaaacctggagtccttaaccacggacctcgcaggattagtaaaatatttcccccctaactatacatacaccctatgtatatgtggcaaacgtgcatttttctggagagagatagccatagcttttatcaccttctaaagattacaaaaaggttagaaatcactcctctacccactcttcctactggatctcaccacatcacagaattaaccacttgctattcacacctccatgacttgtaattctattatcactggcccagaattctctccaactctcatatccaactgtctaatacctttgtctttggatgctccacatgcaccatcaactcaacttgtataaaattaaacacattatctgtagtccaacaactaaatgtgctcctaataccaccagccacgcagtcatctggaaagtctgagttgtcctggactcctccctcttcctcactctcctctccctccctactgcactgacctaatttaggccttcaccacttctcagatgcagtatcttcttagctgacctccctgcctcatccactatctccaacacaccattccctctctctatgatattctctaccagcccatcgcctcagtgtaagatggaaacaacactgatgtacaaggcctgtcatgatctgacgtctgactgcactcccagcgctgtatgttcgaaccatgccccatgactcggtttccccaaaagcctcgttcttctacctccatgatttgaaatgccctgtactacctgcgggacttttaacagggtctctgtggcaccccagtgcctggcacagtgccctcgcctgaaaggcctaatgcttgctgaacggctggcggagtgactgagtgacagggaattccaggagttaggaaaggggcttccggcggtcgcaccgacgcccctcaccagctgccggtcggccacggtcctgtcaggcacaaggctgtacacctggctcctcagcacgatgggcggcagcgcgtcctcaaacaggcctcgcgggaacagctgcatgagttctgagacagccgcgcgcgccgaccctgggcagataaatcggctcacggacagggaactggggcggggacgcggttctaacaaaactctcggctaccggaagcgaggccccacccccggggttgccatggttacctggctcaccccgaagaggatccgactccacaggccctcgcttccgccgcctcttaactccaaaggtctccgggatcaggtgatgcctcttccagctcatatcccgggattttatggtaccggggaaggggtaggaatggagggaagagaacctgaaaatagggtcttccggcgcagagcagtgacgtacggtctccccgggcgtccctcctagaccaggtgatgacgaaaggagcgtcaacttgtcgtccctcaggcccgtcagtgctgggaggggcggtggcgacgcacataccagcatcacctccgccaggccgggccccacgccggccgcggattggctccctccaagggcacgcacgcccggggactcgttggcggcgtggaggggcgccggtggccacgttggtgtcaacctccttcgtgaagctcacacctcccccgccccgggaggggtttgcccgccactgtcgctgaatgattgcatcatcgaaagcagaaaaccacttttgcatccttcggcctctggcgtgcctgccatgacgtcatagctctgcggaggtggaagttggggagctttgaggtaactggattcttgatctgagcgcagacgtccttcctaacctcactgcatttggaggacctggagggagggtgggtgaagggcaaggaaagaggcaggatgagagcttggccgcggtggcgtctgaggggcctgaatgtttcaaggccagagcctggcgatcaggtggctcgcttagtcctaaaccagtcatccttctccaggcctcctctgtagaatggaaactctgtacccctgcttgtcttaggacctcatggatcccagggggaccaagagaggagctgagaagacagaggtagctgagcctcggaacaaactacctcgtccagcaccttctctgcccacagaccctgccctctactctgggccctttcctttctaccggcgcccttcggaactgggctgcttctccctggatgctcaacgccagtaccatggagatgcccgagccctgcgctactatagcccaccccccactaacggtccaggccccaactttgacctcagagacggatacccggatcgataccagccccgggacgaggaggtccaggaaaggctggaccacctgctgtgctggctcctggaacaccgaggccggttggaggggtgagcaaagcgtggtaggcagtatatctggagacccgtacctaccctctaaaattaggagagccaaagccggggtgagaatcagtccttagaagaaacaagactattcttcgaggggagcatctcactaatgcttgtgtcagaccttcagcctgtaactcctgcctctcaggggtccaggctggctggcagaggccatagtgacgtggcgggggcacctgacaaaactgctgacgacaccgtatgagcggcaggagggctggcagctggcagcctcccggttccagggaacactatacctgagtgaagtggagacaccgaacgctcgggcccagaggcttgctcggccaccgctcctccgggagcttatgtacatgggatacaaatttgagcagtacatgtgtgcaggtgagttgcccctgcttcatagcccccttccccttcccagaggttgagagccccccacgcctgctgctgcttctctccttgtgcagacaaacctggaagctccccagacccctctggggaggttaacaccaacgtggccttctgctctgtgctacgcagccgcctgggaagccaccctctgctcttctcaggggaggtagactgcacagacccccaagccccatccacacagcccccaacctgctatgtggagctcaagacctccaaggagatgcacagccctggccaatggaggagtttctacaggttcaggatcggggtgggcagggcgagagcttaggcttgaaggctgggaaagggacttggggaggagggtgaaggcagaatggagggtgcacgaggggtcccactgatcccttgcttttcctgtcagacacaagctcctgaaatggtgggctcagtcattcctcccaggggtcccgaatgttgttgctggcttccgtaacccagacggttttgtctcttccctcaagacctttcctaccatgaagatgtttgaatatgtcagggtaagggaacgatgttgcagctcccacccgtatccccaaacaccaagaccacaggtctagcatccagggcaacagcctgccttctctcctcccaccacccccactgcccatcttctgcctcctcctctgcctgctccagaatgaccgtgacggctggaatccctctgtgtgcatgaacttctgtgccgccttccttagctttgcccagagcacggttgtccaggatgaccccaggtgaggcattcagctctgtccctcccctctggatcccaggatccagcctctggccctcaactgatgcctccatctgccccccaggctcgttcatctcttctcttgggagcctggcggcccagtcaccgtgtctgtacaccaagatgcaccttacgccttcctgcccatatggtatgtggaagctatgactcaggacctcccatcaccccccaagactccctctcccaaatagtaatgctttagagggaggcagtcatatctctgtgtgcagataataaaagcatatttctaagaggttctctcgctgtcttcttagctgagtcatccctgtccagcaactcaagcacacaacagtgctttgctgttttatcatcatgtttttacatggggcattcactgggtgtagaggctggccgcaaatacgatgtcccgccgtagcaaggtagccgctgtctccatcttggcacccagcacaggctctcctaccaggcgggctgccccccgcagtgagcgacacatctcagccaggcgctgaatgcagcggaccaccaggccctcaggggtccctgagagccctgccaactcggagaagggctgtggggaaagtagggtgaggactggatgcactcagcctgggcaggttctccccagccagccgtctgcaaaatcccaaacctcaggtactcaccatgccccgggcccactcatatacaacctcaaccagcccaaaattcagctcccccacaaattcctccaccgtctggttcaggccacaagccacctggacctcaccaatccgcttggccacagcccggacacgttctattccctgcaggaaagaaggagaggttaaggcctgccttcctgctccaggacagggaaggaccagatcaagaaggcagccattttccatccttggggcacttacagggctggagggggtcacctgggggactacctgaaggtgaaggtcaggaatgccacagccctggcagggagaaaggggtggtgtcccctacctgcttgagggtgtttgggagctgatccccagcgtccccagggctctggcagaccaggccagagagcaaggcagcaatctcctcaggccgcagggtgctcagtgcattgtcaaacatgagctcagtgaggagcaactcatggctgctcatggcacaagccacccgccctgccagcttcacagtgcccgcctcgtccacataacccagggttcggagcacctgcaagaaaaagggtgggcattggacacactgctgtcccctagcccccctgccccaaccactgccccacccacctctactcgctgatggtactcaggaagcagcagcaatgactgatccgacagtaggaagcgcagccgctccatctccttctgtatctgcattcgctcccgcagcttcaggtactgcagagagccacccgtcagccttctccttgccccttagcaggggtgcactgaggacaagggctgagatgggggcggtcagtctacaggggaccacagaggaaaagcccctactcccagcttgggagttaccacccagggtcctacctgggcaggaaaacgggggctgtgtacacactgagccccctggatcagctcctccagcttccgggcccggagcccaccctctacaactgacatatctttgagctgcaggtcattgacagggtcgagggtgggaggtccggctgggtgggcctgagccagacgcagcagttcctggacagcagtggtcacggctgcaaggggaggatccttcctgaagagggagcagatcttaagatctggggtaagatcttctctcccccagaagcctccctcaggctgtggaagccctcttactacaacctccacttcacagtctcccttaggctgggggagccccctcactacaaccccaccacttcatggtctccctcaggctggaggaaactcccagaccactgcccctccctgcctctacgtgcccctctggaggagaagggcctccctagcatctctgacttgaattttggctgctgcctcttgctgaagtcctccaagatcttctccccattcacccggagcaccttggtggtgatggcagccatatctcctggctggagcttgaccacggtgtggtcacaaggccctgtgaaaaggggagagcagggcagacattgccatggacccaggcatcctgcttatactgctggcagaaaacagacatctgccacactctcaccttcaggcaggaacagcttgaatcccacgaggtcatctggatagggcacctctgcagtggctggccccctgtcctgtgggtcctgggacaagggcttatcacacaagaccagggttgtgaatactctgctggtggagttcgaggagacctgggggtggtcagagaggccaggagaggggggtgtgatgagtagacatcaaaggcagagaccagatacccacccttgggcaggaatcaggaagcaaccatgcagagctcaccagtagagaggggcaaccaagtcaagcgatcagagcagacttcttggggtggtgggaggaaggagtgagcatgatgtggtgatgggaagggagagggtgaaaaggagggcaagaggggaaaatgagggccctatgatgacgcaacctgccctggccaagtggggaaaatggagagagggcttgctccctcccaccctctggagtccaaattcccatcaccctcacctgtaggatcactcccaatgcgttgtgatgctcctgattcttcacaaccaccacccttcctgctgagagagacttcagcccgttcacagactccatgatgcgtcgctgaagagcaaaggacagatgggaggaggcatcacagggacagacacttggactaagtttagtagcacctagagtaacacgatcttctcttcccttctcctatcacctcctcagcactcacacttgctcacctggatcatgtgctgggtctctgtcagttcctccccccagctgtaatattcaggcaggtcgaccagttggccagtcatgtcaggctcctccaaagctcccagcctcttggtcagttcagccagggcctgttcatgggccttgggtgggagcaggggaagctgtgaaaggggagtctccaggcccaatctgtcacactccccaccctcaacacactggcctctggatgcctacctattcccagcctgtctttggccaacctcctgctccacacactggttaccccaggctccttaccttgctgtctttgcgggagggaaactcagagaagctcctcttcatcatgtcctccaccctgagggcatccactcgcagcaagttgaggatcatagtgtacgtgaggcggaactgggactgcagctgggacggcttcccctggagtcaggtcacagaagtcactgagatcagggtgggacctactgaaccccagccagtcttctggactgggcctactcccgtcagatccggtcctagctctgcaaccatggggccttggacaaaccacttgctcacctcttctgtaacataagggagcaaactgaaataaatggactcaaaggccccatctagctccatattcacatgggagaaaactggaagagatgggctccaatctcatccttggattcactcactcctacctcagcttctcccaggcaaaacaaaaaagtcggaggaagttgggcgctgtggcccacacctataatcccagtactttgggaagctgaggcagacagactgcttgagcccagaagttcaagaccaacctgtgcaacatagcaaaacctcatctctacaaagcataaaaaaaaaaaaaaaattagccaggcctgtgtggcatgtgcctggaatcccacctacttgggaggctgaggtgggaggatcccttgagcctggaaggcagaggttgcggtgacccgagattgtgccactgcactccagcctaggtaacagagcaagaccctgtctccaaaaaaaaaaggaagaagaaaaagaagagaggagaatcgaagacagaatccagcaaggtcctggagctggggccctgccgagcatgctggcccgctcaccatcatcatgcggtgcaggtctgccatctcgggcactcggcccttgcagagcaggataacggtgcctgtggggtccaggcccctccgccctgcccggcctgccatctgcacatactccccagggagcaggtcccggaaggtggagccatcgtgtttgcgcatggagtcaaacactactgtacgagcaggcatgtttactcccatggcaaaggtctctgtggcaaacaagacctgggacagaggagaacagaaaggatcagcaaaggctctacatacacacacccccagccctggccaagcccaccttactttgtaggcataaggcaccatcccagttgttacttatgggatctcactgaactctccaggcaaatctatagggcaggtattattgttttcctcattttacttatgtagctacttatttctatttcttaacttttaccttcatatcccattcccatccctgactgcaatcattccaatgtatccaacaaatatctttttatataaatatgatcttatagaacatgtcttcttttgtgagcttgtagtttataattcatataaaaagtggttatatatctgatttttttttgcttctttttctccacctagtgtttcaacatctgtccatgttcctgtggccacatctaacccactgcttccaactgctgcagaacactctatgggtgcatcccccacactaaccttccctctctcccagtgaagggcaccctggtactaccaacaccatgccaccacaaacaaaggatgggtgtacatgttctctcacagaccagggtgagaatttctttgtgatatatacccaggaatgaaatataagctcagagtatgatatagtttttgtttgtttctttgtttgtttttgttttgagatggagtctccctctgttgcccaggctggagtgcagcggtgctatcttggctcactgcaatctctgcctcctgggttcaagcaattctcctgcctcagcctcccaagtagctgggactacaggcacctgccaccatgcccagctaatttttgtatttttagtagagacagggtttcaccatgttggccaggatggtctcgatctcttgaccttgtgatccacccacctcagcctcccaaagtgctgggattacaggtgtgagccaccatgcccggccaatatagttattttgtctaaatagtgccagcgtgcattccaaactggctaggcatcccgtaaaggattcccagaaccctacaacctcctatatctctggcaacactcggcatgaactagtttcctaaattttaccagtctaatagctgtaaagtcgtatcttgtgagtacttcaatttgtatatttctgattactaataacttttcgaatgcttgctagcttcctgggtttcttttctgagacctacgtattcatatcttatgcatccccattttaagatgggaaacctaaagttcaggaaggttaaataattggtccaggatgatactgtgaatacatggtgtacctgggattcaaacccaggtagtctgaatccagagcccagattcttaaccacagcactggcctgcctaaacctctgcccctctgccctctgggcagcccctaagtgggcaacaagcaccctgaggagtccctttccaccaccacatgcaccttgaccaggccacggctgaagagcatctccacgatctccttgaggatgggcaggatgccgctatggtgcacacccaggccgcgattcaggagctctgacatgtgcaggacctttggtgggaggaggcccatggtcagggatggagtctcggaacaccctatccccaccagtctgccaaatgtgtgcatgcacgcacacagacgcacacagacgcacctggggcagctggcggtcagagccacggaggcgagcaaggcagcgctgcaggaagaggtggatctcgctcttctccgaactggtggtgaggtcaagggaggtgaggcctgaggcctgctcatcacagcggccccgggagaaggtgaacaccaccacgggcaactgggcacgtgtgcggagggaggccaggagggacaggtacactccgcggtcctggagaaggaaggggaaggggaaggagcagaggttgagttcctgaaccaatgagaggtgagctagtgttaactggggcagtgctcaaagctcaagtcaaaacccctgggggacaaggggaaaaaaaagataggaggaaaaacaggtgctggcaggtacaaaaccctcccagttctcacctgtgcagggcccccctgatgtgtgggctgcttggccccaaaggtctgggcgtgtttgctcattctctccttcttggcctccacagctgcatagtacctggggcacagggaggggtagccacaatgtccagctgggggcccagccctaactctttcccccatctcgaggcttacccttttgtatggaaggctcctcgggagtccagcaacaaaaagagctccccctgggtcttggagctgttccctgtgaaaagatagtgctccaggggcacggggcgggttacagtgctaatcacatagatctgacgacgcttcagccgcctgaagaaaggagagggaagcaggtcaggggtgggaacgtgggaaggaacccacatccccacccccttccctacccctccaactttacccagtcttttctgagacccagaatggaaggctatcccccaacatctcatcccatttcaacatgcaaagtaatctggacccaaaggggatcccacagccaccaggtgggacatgttccccagcatcacccctaaggcctgaccgctctccttgctgtggtagacttagtcccccacccgaatcaaggagtactgtagcccccttcacccaggcaacccgggacacacgtctcacccaatccagtcagcaaactcaagggcgttggggacggtggcactcagaaggatgatagaaacgtggtcaggtagcatgataagcacctcctcccacacgaccccacgctgggcacagagagggaagggaggtcacatgagggcaggggccgcccttctgcccataaagaggcacaggattccatatgggggtaaagaaagcagtaaggggccctgagtgtgtggaataagggagacgctcaactggtcccaaaggagaggactgccgggttctggggagcccatggcccttacctcgacatcgttgatatagtgaacctcatcaaagatgacccactccaggtcccgaataacatctgagccactgtacagcatggagctggggagaagaggccaaggattgactccccagtggctcgtctccaccccctcctcagacagcacactctccacaacggccacatcttcccagccaaaactcccctgtattgagtgtccatctctcaccgaaggatctctgtggtcatgatgaggcaggaggcctccggatgcagctgtacatccccggtgagcagccccacatccccgaatgtgtttcggaagtcccggaacttctggttgctcagggccttgatgggcgaagtgtagatggtgctgggaagagagcatgaagttagccagtccctccgcagactcatggcccgcacttcctctcccacatggagccctcgtggaagcatgccccagaagctcaggtgctcctcttcttcacccaaactgcccttacattctcctgcatgatataaccccagaaaaattctgtccccaaccccttcctaaactaacccaggtcattcttctaaactttctccccaccatgtcttttcatttctctctgggctcttgtctcagtcttagccctgaacctctcacttaaaggatgagctagagaggtgggggaagagatgagattttcaaaggatgcaggagaaaatggggctggctggtgaagggggaggttggcaaaggaactcataccgtgtcatgtgtttctgggccagggcaatggcatattcagccacaactgtttttcctgcagatgtgtgagctgcgacaaagacagagtcatgccgttccaagtgcaggatggcctgtttctgaaacacatctggctcaaatgcccactatgggagagagaaatagacaggagctgaagaaaggagcggggccttgctgcctcctgctcatggagcacgcagggcgggcggatgaaggccggagccagccgaggctgggactgagtaccaagactggcctgggatggatctgacctctggccaatagaggagacaaggggtcggctgggagtgtgacccagaaagaggtagaggagcgtgtgaagatggggccaaagtacctggaaggctggctggggaatgaggcgatagaaatcaccaacaggggaggtggcgtccacagggatggcccactgctcctgagatggaggctctggggcctctggggtggatacagctgtggacgcttcctggaagagtcaggggtagcagtgataaagatacaaccagagggctctcaattagcactcctcccaaaagatgtccctttcttcccctcagacccatcctagccagcccacatcctggtggcaaggctctttcttgcctccactacacagaaccaccaaccttcaacactaggtcttccaagctgcttgctcgggccaggggagcactgcagggagaggctgaaacagtgtcccctctgggacctcctggctgtcccactgcctcattctcatcctcgtcacccccacccaaatccagaggctccaacatacagctaaggcttagtagtccaggagctggagttggacaatctgaggagcaagccaacaaggtcaaccttgtcatgtccatctctgttccttaggagaaggacatgacttctcctacaccccactcaaaaactaaaactaaccttttggtgcaaagtccatgcctttcttgaaaccaggtggaatagtaagaagatctgtaggatagggacatgaaatcaggtcactgcacactggtgaacaaattgtgtacattatataaacctaaaagataccatttacaggacagatgctgtagatagggatgtttgctatgacactttcccaacagatgacagtaaaggttgttgtagaaatttcccagcagatgacagtaaaggttgttatggacagaatatctttttctaattttctcaaaaacatgggagggctagcagtagcccagtgatagcctgggctcttcctcctcaaggctcagactcagagccccaccttacctttctcaaagtctatctcctcctcagcctcctcccgtgtgttcagatctgttatggtgggttcatccatcccccctgggaagagacaggacagacagggattcatgggatgagggtaatacgagataggtggggaacccttccctggagattaaagacaccctcttctaccatcccatctccacaagagtcacctggccagaagggatactgagttggatttccccataaggactgggaggctggccctggaggccggcgaagagacaaggaggttgtagccgagagatttgtgttctccagcaagacctaaggcaagagatcagagccccaatgaggctgagcttgtctctgaccacctccccttctccccaactgtttctcatgacccctgacctcctacctctttgtaacccagtatctggcctgtggttgggtgtctttgggcctgtaggtcggatgggactggggctcccaggacagccaaaagagaccagggatccgtcttcctctgccattttctggagagaaaaatagtaacttttgggtcttctttcttcctctgtcccagcttccttcaggaacccatcaccctagtctaagcccctccagactcctcaccgggctgagtgctccacaccatgcagaggcagccaggctggggatgacagaaacaactgttctgcttcttgctgcagatctggggcacaaggagggaggccatggggaagctgaaacaagggcaagatgagaggcattaggtaaggaaagaggataaaatgcagacaaaagagatgatgggacttgtgttcagatcagaaatggcagatgtgtcaaacagactaggacaatcaggcttggccaaaaactacctgctactgaattacctggggcagattttggatttcagaaacatggaggctggacctaggaatgtgcatttttaaaaagctccctggctaatcatgaagcacactgaaattggagactcactgattttagaaaaaggggtcccagacctaaggatgaaaggttggaggctcaaagcctatcatctcagtcaccaagtgccctggtgcttggatacagaagggagctccacggagaaatgccacatttgaaagagcagctctcaaagcaaaaatatccccagccctttctgctctgtcctcacatgtactgcaggtacactgggctgtaatctgtccagcaccccttcaggctgggatggacaggagtacaggcacagatgaacaaggttaagctagatcctactgtgaggagggtgaaggaggtttggactcaatgcgggtcaaaggttagggtcaaaagtcactcacgctactctctggagctccaggcaagttcagcagctcccagtgccccgtgcatccgagctccacggcccgaaggggtaggtccaggggatctggagggggtagcactacggggaaaggtcaaaagtcaggggtcaaagttcattccatatcggctactccgttccatttccctcccctccccctcaccaagtcgctctgtctccatcatcctggagccacagcagctgcctggcagcccggaagtgcggcaagtagtcgctgcgaagtaagccccgccccggaacgggcggaagtagaggcaacttccggtacagccccgccgagagcgtgaactatcgctgcggaggggcagacctggaccggtggaaggccgggcggaagtgcgcgcctggggccgccttggttaccgcgttttccgctcctcgctacgtcatcgttgtgagcccgctatcagcggccagcgcgggcgcggccggagaccgtggggcccccggttgccgccccctcgggtaaggccctctgcttctcactcttcggccctttttctcatagccgtttctctgttcttcctctttgcgttgctctgcgggcgctacgctggctccaccgccttctctgccgttcaaaccccgcggttgtccttaccctagcgagggtaggggggtcgggtgccatcgtctttccgacggagtggatatttgtccctccttgaaccacatggtacctaaaggtgctggtgtctgtgatccctggagacaggagggaatgctggatgatcccgaccagcgggagcttggacagcagcctggtttaagcaaggggtagggaaagccaaagacaagagtaggcagacctgaaggggtggggttgggtacagtgtggacggcgtgtgaaccccgggtggtaacagtggagaaagatgtcttgggccctgcccctgaactaggagccaccatgttggtgataccccccggactgagcgaggaagaggaggctctgcagaagaaattcaacaagctcaagaaaaaggtgagggactgtgtgtggacatggcctaacctttcacagactctgcactctgagaagatatggggtgagtgtgagcgaatggggaagtttttctggcccatacctagagacatatcacctcacagtgtagcttcgagaggtgggctttcccaagccttggtgtggaccttctgtcttttctatgcaatttgccatggattgtcttcctttcccatggcttttagtaccgcttaagagctgatgatccccaagtttgttttttccagttctatccagtgttatactgaaaaacttcagatactcagtgttgaagctatcatctttctattcttgatcttccaaataagattgactacaccaattctgccacatgtttggactcaaaactctgacttccccactatttgcatagtcaaacctttgccaagtcttattgtttcttcttttgaagtaatttttcctgtttattcttcactgtgcattcccccgagcagggctttattgacattcatgtgggccattgtaatggtctctcaacaaatttctcagtctttttttttgaacagacttcttcactcctgttcaaatgatccattgaaaacacaaaattctgctccctctgtttctcaaaaaccataaatggcttcacattgtctataaaaaagcctcaaaaccttagtttggcagccttgtctagtaaagtagaactattcactacttccaaaagatgcattcccaaagccttcttatctctgcatctttgccaccctgttttctttttctaaaatacccttctcctctctgtgttgtgcagagatacgggagagggcctagtttaatagccattaaacatcagaaaatcttactagctttcagctatgaataatctgcacctcttataattgtattgctaactcaatgtattttatttctcagactgtaagcttcttgagggtaggaacaatgcattagcctcctggatatccctgttacgaagtcatggctgggcctcattcaatatgcaggaaatagatggatgaagcttccaggaaaggcacataaacttatacttacttgcagcttatatcctaggattctagtccatgattgagttatttgtcttcaacttcaaaaatgtaacactctggaaaacctctgggttccgtggtttggttagattaggaatttccagcatcatacatgatctaggggaccagaggcaagaggcagagcacatcagtgtaccactctgagggcatcaagaaagacggtccctggagtgatgtgcccaggggccttaggagaggaaccggctaggggctggccctcacttacctctctcttctcacccttgttcccagaaaaaggcattgctggctctgaagaagcaaagtagcagcagcacaaccagccaaggtggtgtcaaacgctgtgagtgacaggggaaatggggatggactggaagtgggcagcatggagctgaccttcatcatggcttggccaacataatgcctcttccccttgtctctccagcactatcagagcagcctgtcatggacacagccacagcaacagagcaggcaaagcagctggtgaagtcaggagccatcagtgccatcaaggctgagaccaagaactcaggcttcaagcgttctcgaacccttgaggggaagttaaaggtgagcacaagcagaaagattgtttaaagggcatccctccaagttggaatgtagatgggtttggggaaaaatatgcatactcaagcactggcaaattgctgtaccattctgagtttcacctctcatgtataaaatgaaaaaactagacgactcctgaattctccattttacaaattctgtggttctaatccaccttggattggagctcttggaatatgttgccctaagggatggaaagggctgaaaatgttatcaggttcaagagaggttcaaataaactgaatacataatatatcgagtcacttataaaaaataccagctgggcgtggtggctcatgcctgtaatcccagcactttgggaggctgaggtgggcagatcacttgagattaggagtttaagaccaacctggccaacatggtaaaaccccgtctctactaaaaatacaaaaatcagcagggtgtgaggccgggcgcggtggctcacacctgtaatcccagcactttgggaggccgaggcaggcggatc

SEQ ID NO: 59922 - DNA, 465 bp, Homo Sapiens
ttttcagtttagtcacatttattgaataaagttagcaaatggatatctcttgaaaatgagagctccagggaattaaaaaatgtaaagttcccatttcctttctgtgttaacacagctaattatgatctttacttcacatgcaaaagtcaacagaacaactcagtatttcaccaaattataaacaagaattacgctagagaaatgaaaccctaaagagaaacggtcatataactaacctcagtcaagtagttctggcaattatttgaagtctgaggcttgaagtaggaattcttacgggcatttggggaatatattttcgttgagtcctatactagtaagattttcaacacaaggtgactctcgacctcgccttgcaggaagagtgctgagaaaatatttcacctgctctttctccataaagagctgatactgatcattgctattttcttattcgatttagttaat

SEQ ID NO: 59923 - DNA, 507 bp, Homo Sapiens
aataaaagttctacttctaaaaacataaattttaagcagtacccaagcttctgtccataatactcttccaagtcacaaaagaatttgaggctggaaaaaaacccatatataaaaaactttacaatagtacaataaatttttataaatgttgttaggaacaaaaccttttaaagacccataaattataattttaaattattctctgtacatattactataatgtcagaaagcaaacaacaggtatttctcacttaactaaaattcatttccaagcacaaattaacctatgtaacaggacacattaaaatttaggtaagtgagagaatgttatcttatccctacgtaattgctattatcagtaagctatgtttactatggttgctctggctcaactctcccaatgagagctagctctttataaagacactaacctaaatgccagcaaaccattgggttaggtaaagaatctagacacaatccacagttttagctattagccctttaccg

SEQ ID NO: 59924 - DNA, 549 bp, Homo Sapiens
  misc_feature (466)..(466): n is a, c, g, or t
tttctcaaacatatttgatgtttattactgtatcactttgaatatttgcgagagcctatttacttctagcagaggtttacattagcaatataaagtaataaataaataaataaataaataaataaataaatgaagtccgggtttttcttttcagtgtgggagaccccacataaagcaacaatgtatcatagctttgacactggataaatgggatgttaagagtgcacttctattcaataacatgcaaatggtgacataattcactttttgaaagcttccccttggaacaaggggaagagttcagagaaaactaaaggtaaaaagttgaactgacaactagaggtgtatcaaaactgcaaatgacaatcgtttttgctttaacaatcttctgaaataggaatgtaaatccttgagacttcctgaatcagaggtctaaccataagcgttgattcccctaacaacctanatttaacaaaatgaaaattcctccctacagtttttcggcttgctttatcatttttaaatttctgggaaagacttacattctcg

SEQ ID NO: 59925 - DNA, 402 bp, Homo Sapiens
taagaaaaagttggcccagccccagggaataaattttgactgctctaaacagggttggccaactatagaccaagggccaaatctggcctctgactgtataaattaagttttactggaataaaaccaggtccattgatttatccattgtctacataagcttttaggctacgatggcaccactgtgtcactacgacagaggttatctagaccaaaagcctaaaatattaccgtttgcatctttatggaaaaagtttgccattccctagtctaaggtttagattctgagcttatcattttagcctaaccccccttaccagtgactggctaaaaacaagtctgtgattccattctgactgttctactgagggaattccccttcttctcatgcagagctgatgaggg

SEQ ID NO: 59926 - DNA, 520 bp, Homo Sapiens
gtacaggtagggtcttactatgttgcctaggctggtctcaaactcctggactcaagtgatcctcctgtctcagcctcctgaaatgctgggattacaggtgtgagccatcactctgggcctaagagtcatattattaaccatcttttttttttttctccttgaaacagctcctatggaaaaaggtaattaaactccaaggacactctaggtgcctttcagagttgttatgagtatcaaagttagagagcttcataaacagtagcatgttaatcttgccacctctctcctttatccttgctgatcaccgtactgattattcacatgtagcattttataaatattaatgtgtatagatagacgtgctgcttctccattatctccctacttggtatagctcgaacatttggccaaagaacaaggaagtgtatctctggataaaatgatgagatatgatatgatgagatgagatatgatgagataatagatagaaggaagaatctttggaacgtaaaaaaaaaaa

SEQ ID NO: 59927 - DNA, 1136 bp, Homo Sapiens
gggtgttttattctattaacagttcctaattagaatgcaaattacaagtcacataaagctggttgagaatggaagtactgagtactaatctcctaacttgcttatctttggatgtagacgaacaccaatgaactgagcaaattgtatgtgctctgttttttcttttccaaaggaattggttatctgtcttgtatttggggatatgtatgtatacttactatcaaatgaagaagataataaaataattcattgagtttcatgttaagaaagagtgtgagaaaagaagagagcagtaccataaatgtcagattaaaaggattaggtagctacctctccaggagaaaaaaatatggctaaatgctatctctacagcagaaacaaaaattaatttttgtctcagtgatgtttttgttttagatacttttatagcatgtgttgtagaatcacaaaattgagccctcgatatatataggaagtgtattcggtctagaataattaacttctccaaagtcacttagataataagggagctacaaattataacccagaattcaagattcctagaatagtattgtttcttccattttaaataaagttctgcagggacttaatgattctgcaaatgtacctcagaagctgtctttatttgttttaattattggagttccacgtttgaaaaaagaaaggttgaaaactttttgtactatatggatagtctatttttagacatgatttttgttttacgtactttcaggtcccaatcccaccttagagaaccatatctcttgttttattttagtgaggaaagaaatatacttttgctaaaatttactttatttcatgcgtttcttgaacatagtaaatgaggaattgcttttttgtgtgtttttgtagggtctcgtatagtgatatactagatcttagcaaggtaccaaaaatagctgcctcctgctgaaaagctttgtgaccacaaacaaagttgtgaactttgtcagacacagtgccagctacttggaaggctgaggcaggaagatcacttgagcccaggagttcaaggctacagtgaactatgatattgccaccatactccagcctgggcaacagagcatgactcatctcaaaaaaaaaaaaaaaaa

SEQ ID NO: 59928 - DNA, 581 bp, Homo Sapiens
aacacagtattgaaatcttcattatctccaaatattctatctatgtttgctactaaatgtacatgtagtagtgctattgcccaatatgatttctgaatggattaataataatatcaattttatatttccaggtacacaactcacaggattcttaaagtatctcaatagtagaatacgaatatgtaaagaaatcactgtgctatgattcatatctgaaggactgtgatcccacataggaacatgtaaataatcaagggcttaggcaaatgatataaacacatttgcacaagccttgatggtttaaccttatacatgcaaagatataaaaatatacgcattacatgagttatttgcaattatgtcttaaaacactcagggtatttctgagtgttcaagttaatgaagttcttgaaaatatggattaatttaaatatactaaaattatatattacatatatgtatgtgtgtgtgtatgtgtgcatgcacgcactatatatggctaataactggcaaaaaaccatggctaccctagtggcttttgtctttatataatagtcactccaataatgactagtatacat

SEQ ID NO: 59929 - DNA, 567 bp, Homo Sapiens
aaaaaaaaaggaatctgcccaacagctgcctctcccttgggggaaaaaaagagtaaaactgacaaattcttattagcaaaaattaaacaagtgatgagatagtagtatagggatatattacttaaagatagaaaaaataaagatcactgaaatcacattttattggaaaaaaataaaatcagatgacaatatattttatatccacaaaatctggagattagcagcaaaaaatagcatatacatcataaagaactgtgattcttatacgaatttgattccctgtcccctctgaagatctgataaagcagtggttcctaacctttttggcaccagggaccagtctcatggaagacaatttttccacagcaggtagggaaggggaaaggtgatcgtttcaggataaaaattatcccaccatcaggcattagattctcataaggaataaggaacgcacaacctagatcccttgcatgcgcagttcacaatagggttcgcgctcctatgagaatctaatgccgctgctgatctgacaggaggcagactcaggctgcaatgttcactcacaca

SEQ ID NO: 59930 - DNA, 1515 bp, Homo Sapiens
gcaatatcctgccctttcctctttaaatattgaagccctcaaaatcatcttcagagaaaggcatagacctgtttcccggttgtgtgtccttaactctggcaaataaacctccaaaaatgaatgggacttgccctggtcattttccttgattgacaattggcacatccaaaagaaaaatgacagccccctgctaaaagagctaaagataaaaatggaacaaagatttatacttcaaatgtgaacataaagtaatattaggctgagcagaacttaaggcagtaagttttatggttaaaaagtcaatatgtggtcggccccatgtgtgcaagttgctacggtggaagtcaaaggggaaacaacaattcacaggaaagagtacaaaggcatcacaaaaaaataaaactgatttcataaacacggtgattctggttcttcaaagacatttccaagaaaagttgctaaggaaggtgaatctaaagccacatctaagaactttgagaaaagtgtcacaaaaccaggggaaagggtgcgaagcagttgaagaataagcaacaatgggacaaagcaccaaggaacaaattccagccagcaaataaattcaacaagaagagaaaactccagccagatggcaaaagtggtgaatcagcagccaagaaacccaaatgggatgacttcaaaaagaaaaagaaagaactgaagcaaagcaggcaactcagtgataaaagtaactatgacactgttgtgtgggcaaagcagatttggaagactttaagaagaaaagactgacaaagaaaaaagagtaaagttaatgaatgacttgcagaagttgattcaagggaaaattaaaactattgcatttattagctggacatgttggcacattcctgtaatcccagctactcaggaggctgaggcatgagactccttgagcctgggaggcagaggttgcagtgagctgagatggtgccactgcattccagcctaggggacagagcaagactctgtctcaaacaaacaaacaattgcatttgcaaatgattcaactcatgtgatccagtgttacattcagtgtggtaatgaagaacagtcaaaacaggcttttgaagaattgggagataatttggttgaattaagtaaagccaaatactccagaaatattttaaagaaatgtctcacgttgtgaacatgtaccctagaacttaaagtataataaaaaaaaaaaaaaggaaagtatcttgcacaagctcacgtagctggtaagttacatagttgggatctgaattcagttgtggcttcatgcctgagcttttaactactactactaaactgagaaggcacttgcttgagtaaattatgtcatcctcttaatgaagcattatgcagctgttaaagatgatagatgtaaaggttatgaggcaacatgaaaatataactcatttattcaataaatgtttgtttctaaatatattcatttgctgaatgaataaaatgttaagccaaagaaaaaaaaaaaaa

SEQ ID NO: 59931 - DNA, 483 bp, Homo Sapiens
  misc_feature (419)..(419): n is a, c, g, or t
  misc_feature (436)..(436): n is a, c, g, or t
  misc_feature (440)..(440): n is a, c, g, or t
  misc_feature (448)..(448): n is a, c, g, or t
  misc_feature (460)..(460): n is a, c, g, or t
  misc_feature (463)..(463): n is a, c, g, or t
  misc_feature (482)..(482): n is a, c, g, or t
gcggcggggccggggagacagggcctccctctgtcgcccagtctggagtgcagcggcacgatcacaactcactgcagcctcagtctcctggattcaagtgaccttcccacctcattcccacctcagcctcccaaatagcctggaccgtaagtgcgtgccaccacgccagactaattttttaatttttttagagacaaggtctccctatgctggccaggctggtcttgaattcctggactcaagtgatcgtcccgcctcagtctcccaaagtgttgagattacaggcatgggccacgtgcccacaccacagcacttttataataccacctcagtggcaggctagcatgctgcactgtaatcacaagtttaatcttctctccactttcctataaaggtcttaaaaacaaggaccacatatnaccgtatcaccagcatntaangacaatgnggcacgatcatntgnaacgcttaaaaaaaaaaang

SEQ ID NO: 59932 - DNA, 185035 bp, Homo Sapiens
tttggaaaagcagaaccttttttcgtggttcaagaaatcaaagtcttcccgggaggtctttctgtaaatccagagctgcagatgtttgaccgtgttcagagaggggcccttgtgctgggtgaagtggatggggcacagcaggcaatgggtgaaaagcaggacaacctggggccctgggaggaccagggagggcccatgtctttgactgttcatcagccggctgacttcctgtccgcctgtcgtctgctctgcccatccatccgtagtccttccgcctgtctctgctggttgccgctgtgctactcagctgtgtctgtctgtccgcctgactgtctgctctccttcaggatgccttccgtgccttccatcaagatctcaattttgtgcgcaagttcctacagcccctgttgattggagagctggctccggaagaacccagccaggatggacccctgaatgtgagccagagccctaggagaggctcagcccctgagggagggggatggctggagggctgggagacattgccacatggccaggagccgctccctcggcattcgcccaaggggatgcagagccaggggtgagcctgccctcccctcccagggggcaggcagttgaaagtgaagctgtagggatgccctgagaagtccagggctccagatctggtttagccaggcactcgtttggatcccgaggcaagctccctccctgttgtcgcccagtgtccccatcaaaaggaggattttgatgaactgatttctctcctggctgtagcgtcttacccaccccataccttttgggagggagaggaggcttcaccaccagccagtgctccagctcacaccccgggctgggtactcttgtcacttcattcctctttgcccacaccccttgggcctggcgatgggaggagcggctggggctccaggagaatgggggtggggaggaatttcttccttggctgatcggcccctctgctatggcaggcgcagctggtcgaggacttccgagccctgcaccaggcagccgaggacatgaagctgtttgatgccagtcccaccttctttgctttcctactgggccacatcctggccatggaggtgctggcctggctccttatctacctcctgggtcctggctgggtgcccagtgccctggccgccttcatcctggccatctctcaggtgaccccagttctgtgttgcagccaccttaactgcccaacagacgtgggcccccatgcatctgggcattgtgaacatatttgctaaatgaatgaatggacctatgaaaggatgaatggatgaataaacagatgaatgagtgaacagtctgaaggcccatcaggcatgtctgtgggtcaagctgcattccagatgagccaagaagttccttcttgaacagattccgatcaagcacagggccactgagccagaggctgctgccctgcagcttcatgacacttacgagcccctccacctccctgggactcagttctcatctgtaaaaagaggacactggcccacaagggtcttgaaatggagcattagcacgggggtaccctgcaagctgaaaggattcactggggccccaggccctggcgggctccgtccttcccaacagcttctgaccctgcctctctccccaggctcagtcctggtgtctgcagcatgacctgggccatgcctccatcttcaagaagtcctggtggaaccacgtggcccagaagttcgtgatggggcagctaaaggtgagggtggggtgggtggtcagccaggtgctgggtggcgctgggtctgcccaagtgtgtgggcacagtcgggggcacagcctgccctgagagccccctcctcctccacagggcttctccgcccactggtggaacttccgccacttccagcaccacgccaagcccaacatcttccacaaagacccagacgtgacggtggcgcccgtcttcctcctgggggagtcatccgtcgaggtgggtggggagggacgtggacaacctctggctgggcctgcagctgagggggagctaatgcactgggtccccactctgcccctgacctagcccctgatctggcctccactctggctgggccaagctctgcccccgtgtctttccttcccacctcccaacctgctggggacgaccagcccgcttgctagaatctagagttgcctttgacccttggccccagccagccccgtgaccttgcccgggagaaggaggtggcctggagagctgctgtctccagccgccgcctgtctccacagtatggcaagaagaaacgcagatacctaccctacaaccagcagcacctgtacttcttcctgagtgagtgtccatctgtccttctggggtgggggagtgcctgggcctgcactgtcctccctgctgtcctggaccactcccagccacttcctggggcggggcacgtctgtcaggtctccctggtcatggcatcctcccagcctctgcagtctgtacacactctcccagcagcatgcctttgccccagctgtctcccgtgcctgggacaccttgcagccacgggccatcacagccctgctgggagcttccccaagccccacgtagaatttcttcttgccctcactagagtggtccggagccctagagtctttgggcagttgttggggcggacagagtgaggactcaagtctggccctgacttgcggtgaagggtggtgggaggtggtggggtaagggcagcctggggaggcttggacacagaattgggggtgatatggggtcattcagctggatgtgaccagcaccaacgtcccaggggcattcctggagtaacagagcccctcactctggcgcccactcaccttggcagcccagccccactcctgaacactctcatgccccttcttgcagtcggcccgccgctgctcaccctggtgaactttgaagtggaaaatctggcgtacatgctggtgtgcatgcagtgggcggtgagtggggttgcccaggaccccgggcatacggctgccgtggcaggaggtggtgcctcgggggacagtacctgcccatgaaggcaaacagggtgcacatgtgcgtgcaacagtgtggctcacatgtatgcgtgcaacagtgtggctcacatgtgtgcgcgcagcaggagagcgagtgtgcccgtgactgtacgtgtggtgggggggggttgaggaacagggggggtgtgggtctctctcggtgagggtgtcttcccaggaggagttgctgggccgactctgccaggcatctgtgtccctggcagggtcttccccaacacaccctgcatgacaccttcgtcactaaaatcagcctcgtgagctggcagggcaaggaccctgttcctttactcagctgagaaaaccagagagggtggtggcctgtcctgggctctgaggcaaatcaggcagaagggttggatgcctgaggtcctcctcccacccaccaggcctccagacctccgggcacctggagacctctcggtatcgcctctgccctcctctgcaggatttgctctgggccgccagcttctatgcccgcttcttcttatcctacctccccttctacggcgtccctggggtgctgctcttctttgttgctgtcaggtatggcagggagtggcgaggtcacacacaggcgacaggtgacccccactgcagccccccaccagagcttcccttttcccgtctgcagaatggggccagtggtactgcctccctggcttgctggtggaatcacataaacacaagcgtggcaggagcccagggtcggtgggtttagggagcgtggcctggcttgtaagtggcccggtgggtgtcggagctgctctggactcagcctcacagtggacactgctccattcagattctttaaacactggcaagggggcgatggccacaatcctattgtacagataaggaagtcaaggccacttggggacagctgctctccagcctccactcagggtgcctaagtggtgagctggacctagggcagtgcccgagcctccccacagggtcctggaaagccactggttcgtgtggatcacacagatgaaccacatccccaaggagatcggccacgagaagcaccgggactgggtcagctctcaggtgggcagcaggggtggggcccatcctgggtggggtggggggtcccagctaggagccagatggcaaagcagggatgaggccctgacggggctgccaggtgggggatggtgccgtggggtcagggatctgcaacggcctcctcacatgtgccccgccggcttccggcagctggcagccacctgcaacgtggagccctcacttttcaccaactggttcagcgggcacctcaacttccagatcgagcaccagtgagtgtgggtgctgggggccagtgggaggtggggagggggtcctgggaggggatcctgggaggggacccgtgggtggggcctctctctggaatctcccacttcaggtgccagcatacgctccccacccccagcctcttccccaggatgccgagacacaactacagccgggtggccccgctggtcaagtcgctgtgtgccaagcacggcctcagctacgaagtgaagcccttcctcaccgcgctggtggacatcgtcaggtgaggctgcagcccggcccctctgttctggtggcttccccagggcctatgcctacccttgtccaggtcagcctcatgctgagcccccagggtccctgagcctttctgtccacgtcccatgcccttcctcccttccccagccttcacgcacacagtgagaatttctggagcacctactgcagactcacaaacagcagtgcctgcggtgagcaggtctatgcaaacctacccccaaaggctgagggaaaaaagctaacagatccagtttctcagaaggaaacacttaacagggactcataaacagaagccatgtctcagggccgggtgcggtggctcacgcctgtaattccagcacttggggaggctgaggtgggcggatcacttgaggtcaggagttcgagaccagcctggccaacatggtgaaaccccgtctctactaaaaaaaaaaaaaaaaaaaacaaaacaaaaattagctgggtgtggtggcaggtgcccataatcccagctacttgggaggctgagggaggagaatcacttgaactcgcaggggcggaggttgcagtgagctgagattgtgcctttgcagtccagcctgggcaacagagcaagactctctcaaaaacaaacaaaaaaaccatgtctcaggcagccaagagttgggacatcccctcacacgccctctagaaagaaccctctatatagcaagcttttagggtgaaccccatgcaggtggttcttatgaacctggtgaccactggaggttagataagcgtctacaagaggaggttatctatgccatgagcttggcattcagggtcaagcatcggtcatcagacagttttgcttgaagatggcattgcccttgtagcaatgcaggctctagagagcttcctgccctcttggagctgatgttccttccagcaaaggaaacagcaagcaattaaaataacaaataagtacattacagaagatgggcaaaagaacaatgaaaagcccctcagggtggggacaggggaggggaggggggcggccaggcaggggcggcagtttctaaataggtggtagggtgggcagtattgacaggctgacgtgtgagcagggacagggaggaggggagaggtctcgccacagggacatctggcaaagagcgttcaggcagagggcacttgaccctgaatgccaagctcatggcatagatagccgaggcaggcatgcaggcactcagagaagggacacgcccggcttgcatcttggaaagctgcccctactgggaatgactggcgggcaggagtcgaagtggaaaaggagagcagaggacactgcagccatccaggcgaggggtgatggggctcagcccttgtggtcaccttggaggtggggaacagaggccagattccaggtcttatacctctgcgcctttgtacacgctgttccccttacttggttgcccttccttcctgtgctggtgttcagatgcccacttctccttcatgatctctcccagcctgatgctctgagcccctgccatttggcacagccctttagagcgcctggcacagggcttcctagcagattgttgacatttctggctccactgcccaatatcaggcccaagatcgggtgggcaggttccacgtcctctctgtccttgggttgcagcgcccagcaggaggcagcaatggagaactgggtgcaggagggacaggcccacccaggctcatgcctggacttggccttggctgccctccagctcccctacccgacacccgtcaacccggtctagattccattccagagaatgagcattcagctgttctcccaacccaccctccagcccgcatcgctgcctgcccccagggaagggaacccacagggaatggggatctccgctcacacttaccatgggggatacaggggtgttaggatcttgcaactgagctcctaacacccacccccactgccacccccacctcccaggtccctgaagaagtctggtgacatctggctggacgcctacctccatcagtgaaggcaacacccaggcgggcagagaagggctcagggcaccagcaaccaagccagcccccggcgggatcgatacccccacccctccactggccagcctgggggtgccctgcctgccctcctggtactgttgtcttcccctcggccccctcacatgtgtattcagcagccctatggccttggctctgggcctgatgggacaggggtagagggaaggtgagcatagcacattttcctagagcgagaattgggggaaagctgttatttttatattaaaatacattcagatgtattatggagtggagtggtgaatttgcatgagttttgaagctggggtctgcccagactccccaacagcattcaggccctcggccatcaatgtgtgtgttggggccggcggcggggttgagggggagcgctaaggagctccctttagctctagatgccctgggcctgggagcccagggatgcctggactcggacctgcccgagggcctattcacttcctattcatgctgggcttcaagtcacttgacgcttctgcatggtgggatgagcgggcccagcagatgaggacccagggctgggggccatgtctgcggacgcttctggacatggactgggaaagacggttgtgcctcttgacctgcactggcctcccacagccctccatgatggggggcctgaaagggccccgcgcagcgggccacctgctgatcttagcgccacatctggcatcacaccagtggtggtggtgcagcctgtgcctggtggcccaaggaggcaacgtcgatctccctcaagcccacctgggaccaggtgcttgtctgtagttactgcagtgaataggctggacccccgaggcatggccattcctgtccctgagtccctggagtcaggtcttaggctctttgtctggcagtgggctggactgtgcctgtgggtttcggacagttctggggagggctttgagttgcctcttggggcacccagaattgggaagaagatctggctggaccaatcagtccccagcatccacacagcctgacagctccaagctgagctgagggtttcatctgaagtgtcggcagtttgaaaaagaaagctgagtgaggatttctatgaggcctttctggagtgggagctggggtcgccctaccagctgcaggggttgccccctactttttgggcttccattggcctggactgggttctctttgggaggtggaaaaggcgcaaattctgccaatttttgttcagcccctccaaggcccatcctccgtgggacggagctggaggggaagccccactgccccatcaacccgccccctactccacacacatacaaggtggcgctgagtgttgctgcccatgaacttctcttccgagacagccagaaagctcctcagtgctaaagctgatcaccgtagtctcacacctgcttcctctctgtgaggaggggccgtctgcacattcccatggactcttgcggctcttcccaggggctccccttctagaaagttctctctgacccgcagggctcctccccttccctgcccagcctgtgactagggtctctgtgacagcacctggaatactgacatcatttgctgctggaggctggtggcagcccagagcctggcccgggagaccctggggtgtgttttctgagaggatgacagacagggtgtttgggtcctgcttccctcaccctgatttctggggcaggagagcactgggggaggtcctgttcggctcacataatctcccagacccaggagcagacagcccaaagctccctgtggcctcccggcccagggcagtgccagcagaggcctcctggtagggccagggaagcagagggtggcagccccttcagcttggttgtgagtgagatgcctgccctcctccgggtgccacccagccccaccagatccactcaagtcagacagacttgggggtggggtggggtgggggcaagtcctgtttctgccaggacgcaggctgtgtgaccttgggggagttccttgaccccgagcagcagtacctagggtgatggaagaaaggctcttagcaaagggcacagcagcaggctcagtttattcacaaattttgtgcacacaacccaattccccaggatgaccatttgctctgtcacctagggcaagttcttttttgccttccctgagcctcagttttcagccgagggtaagattggatgctccttgaaaggtacttcctgcctcagacacacgcttctcatggccagggcgtgccttgcattcagggtctctgcacaggctggtccctctgcagggactcccccttcctgtcaccgcctgtttaaatcctgttggctcctagtgccacgcgggcgccctgagccagcgcaggctccgaatggcattccctccgtccacaccctggtagagatcgctgtgcgctggctccgaggcgctcgccagggagatgctaacaccgaggatccacgacagctgagcctgcagcgccacccaggggcgcccggagcatctgcgccagtgtggggcgggccgtgctccctactgtccctggtaacttgctttgcggacccctgggaggccccgccttcagcagccactcctagatttctccagaccacctgggacccatcactggcaggggaatctttgctcttgtcccactgtcccccatgctagatcccctgggaacaggtcaccctcagtcctgagctgagctcccccttctccatctgtaggtctcctagtctcagaacaaaggcttagggcacaggggccaggtttgtaaaaggaaagaggctttggtggaacctctgaacctctgagaaaccgtgttccttttttattgtctgtacaagaggcgtgggcccggaggaaaaacagctcccgagggaaaccataaccgcagtgttggtttgttcctttgatcatcaacatttgctacgggtctcccagcccaggcagatgttggaaatgatgatgcccaagagccagcccctgcctggtgtgttgggagtagctggaggggagcagggggtcaacaaactcttttgtgacgggacaggccatgggtttctcaaggttcctccccccaccacactatgtcctcaggcaatgagccaccacaactactgggagcttggcctattccaagctcttggctgctgtcactctttctcttggacacttgctcttgaatgggacgatttagaagaaagacctgaatgcctttaaaatccaaagcaaagtgtttgtgatggtggaggacgatggggacgtgatcctgaaatctcagcacgctggggggctgcttgttccgtgtatgcactggccacatgaagccagtctgctgagaaaaggaaaaccagtcccgagggcagtggcgtttcagcctggggcaagccatccccacggcgccccatttccctctcagatgttggaacagggactctttgagaggcagcttctttggccagaggggcacacctctcgggggagggtgcagcctggctcgctgaggagtcccgatgggcccaaggcactgtgtcacataagcaatggccagccactcctgatggcagcccaagcccagccccagtggctgccagctctgccctggtccagcttggtaaaggcttcctctcccctccgagtaggcacgagggcttcggagtgtccagccagacaccccgaggatccgcctgtggtgccacagcaccctcccccgccccacacacacacagcttagacttggggcgctgcagatgtccccgctacccacaaagctgatacccttttatctgcgtagctacactgcccttatctcctcctcagagactaactgccctccactgcccccactcctccagccagccgctgggcctcctgggagctgtctgacatttgacgtgatgggggcaaggtctgggaaccagccctttctgtgcaggagaggtggccaggagcctgcgggttaggagcagggtcctgctgctgtgtggcctgcgcagtcctgtcctctctctgggctcagcctcttcgcccatgatggtggtgttggggtttgattgctcagggccttgaatattggggcaccatgactttggcaggggatagggattagaaactcacaattctgggtgtgttggcaagggggtcagctgagtacagggacaggagggggcggttaagcagagagcagatatgaatgtcttcagcttcttgacccagggaagtattcaagggcaaggcggggctgggtggggctggggaagtcagagaagctccaagtgcccggtgaggctaggccaagatttatctggtgccctcatagccccagcgtccatctggcctccagtatccccaattccaagccccctggttgttatgggtgatggacccatggatttccaactggtagggttgggaggcctgggctggtcgccatcctggaggcgggtcacaggcacagggcagagggtgggagccgtgcctgccagggtcttgtaaccttgaaggccactgccagcgggtccaccaggagggcaaggcctagggtaagcgggtgttgagataatggcatccttggggcccctctagcctgcccctgtggactatggcccacagggccagggagggcaaaggactccccagagccacttggtgaatctggggtgagtcggccacctcgctcagggcttctgtaatgccaggccctactcaggacaccctgtggccactggggagccatacgtaccccagccagtctgctggctgtccctacctggctggatttcggccaggcaaagcgggggtcaggggaagcaggcgggggctgaggtctactcaggagccctccccagccctgctgggagcagctacaaagccaaggggaggccccaaggtgttaactagccagtgcctcttggcccttccttggcactttcccaggatcagccctgccaggaaagccagcccagagacgatgacggagcagcatgggggtccatgggagacggactgtacaagtgcccctggcatgttgctttagactcttcccagcctctggggtcagacagacctaggatccaatctctgtgcctatgaactggtgaccctgggctaggatgatatcagcccccccgacagcctgtgggttctgaatgagccattgcatatatgggcacgggagccacaaaaagaatcatcagcctccagagccttcttcagcccccttttaatttaatttaattaattaatttatttatttatttgagatggagtctcactctgtcgctaggctggagtgagcgatcttggctcactgcaacctctgcctcccaggttcaagcgattctcccgtctcagcctcctgagtagctgggactgcaggcacgcaccaccatgcccagctaattttttttttttttttttttgagacggagtctcgctgtcgcccaggctggagtacagtggtgtgatctcagctctctgcaggctctgccccgccggggttcacgccattctcttgcctcagcctcccacgtagctgggactacaggcacccgccacctcgcccagctaattttttgtatttttagtagagacggggtttcaccgtgttagccaggatggtcttgatctcctgacctcgtgatctgcccgcctcggcctcccaaagtgctgggattacaggcgtgagccaccgcacccggcctaatttttgtatttttagtagagacggggtttcaccatgttggccaggatggtctcaatctcttgactttgtgatctgcccgcctcagcctcccaaagtgctgggattacaggcgtgagccactgctcccggccttctccagccccttccaaggaggccaggaattctgtttggcctggcgctctgtggaagctggctggcccagggatgggagggcagattgcacttggggagacagctggggggggaggatgttaggaagagtctctgcaagcccctccatgccaccctccttgggtaggggtcagctgctgagaggtggctctcagccctgttttagaattgggctggggtcggctgctgagaggaggaagatgggccaatgtttttgggtcatttccaccaagttccgggccccagaatgaatttcagaggcagcagggagaggcgggtgggatggccacaggggagggaggggatacagagagatgcaagcatggggacccctcctggtgcccaggcccagctagaagggcctcatctatcacccaataccatggcctggcattggcgtgcaggaaacacaggaagtgagaataaaattccttattttatttcaaaaaatgtaggggtggggaagtaacatgataaacattacgatcagctccctatgggttcattctgcctctgcgggggtcgggggcatacagtagctggggggcatgccattgccatggcaacccagatgcttagatgcaggtccctcctggctgcttagagctggggggactaggcgccctccccgaaagcccccattctgagttgttggtgcctgcccttcccctgaatctaagaactgattagtgggttagactgcaacagcagctcaggatcctcccaggacttccctccctcccctctcacttgcccgtcccctcagctaccagcacctccagcccccacctcctcctcttctcagctccaccctggtcctcatgaggtaccccctccccagcccctcagggcagcctcctcctgagactccctcccgctctgcctccctggccctccctgacagtcagggccaccgaggcaaggccatgtggtgaaaggcagattgtcacaaggcccagccctgccgccccctcctatcagaatgcatcctggagcaacaggttaaacacagtaagggcaggttcagacaggagagtgcctgaggcagcgccgtccacacagcagccccgagatggggagggctgggacgagacctcccagctccagtgccctcctgcagcctgcagggcccacgtcccctggggccaaatggccagggattggctggcactgcccagctgataacagagcctttggagaagggtcagattgctccagaatcttggacctcaggacaccctgaggaaaagctggagggtgggctgagcctccaggccagccggcccctccctgaacgtggccactgcctctgctgagtcacaagagacgagggactccccctttggtcccaaggtcacaggctcaagttggggaggcggtggaatggggcccgtgaaagcccagggtcagagcactctagtgatggggtggaggactcttccagggcccaaggtttgggctggctgtgcccgcgggcctggggccctggacatcttaagagaggcctcgggtacttaaccgagctgcaggagggagacccgagctttgtaacaaagcaggcctctctatgaaagggtggaccaatggcagccgtcagggagagtgaagccaggccgggagggtcaggggccctgcccgactaggacctgcccctatgaaccccaagagcatctgaagaaccaaagcgggggtgatgcctagtgaccaggctgcaaggggagactcacaggccagacccatggaccgctggtctcctcccatctttaggggcagagagtggaggtaggacagagccacccccggtggccacctctctgctccttggaagaaggggctaggaggcactgggagggccatggctgatggctgacggctgagggagggcaggtcccatgagggcagggtgctatgggggagatgtgaagagaaaaaggagaggagaaagggagaaagatccaacatggggtccgtgagcagtgcatacaccagcctctcggacacccctcagaacaaaagcccatcattcctctggccatcaccccacctgcaccccttccccacggtgtcccgggggctgtggcttcatttgtgaaggtaggcgtccagccacagcttcccagacttcttcagggacctgcaaagttggggatggaccagggtcagggaccaggacgggagtggccccagggagtgcaagggctgaggaggccatcattaaggtggcatgtatgtccccttggccctaaccagggcttaccactgccactgggcctgtggggctgtcagctcagagcccaccaggaaccccacacagaaagggatggtcttctcgcagcccagggagaaaagcccaacagctcctaacacaggctcgggagtaaggcaggtgccctggtgggtgactgtgccaggagggcccagcccctcttgtgatcccactgtctgcaccacgggtgatcccagggcccagcgcctgtggacctccacccctcacctgatgatgtccagcagggccctcagtagcggcttctcctggtattcaatgccatgcttggcacatagagacttcaccagcggggcgatcttgtgtaagttgtgccggggcatggtggggaagaggctgaggagtgtgtagggtgggcagagcgtgaggactcagagggccatgctgctcccgcttcctcccaccacctgggcagaggctggctggggccctcagagaccctgtccacagccaggaccagtctcaaagtgtggctcctcgtgtgtgcccagtggggtgccacgtgtgtggaggggagggtgcagccctccgtgagcaggagggcgtttgtgctctatggagctgggaagatattgggtggccagagacaaagtgtcatgtttttcaaaaaagaaatgaaatagctggggaatgctaggaaaagaggcagtgaggtgaggcacggtggctcacgcctgtaatcccagcattttgggaggccgaggcaggcagatcacttgaggccagaagtttgagatcagcctgggcgacacggcaagacctcttctctacaaaaaataaaaataaaaaattaggccaggtgcagtggctcacacctgtaatcccagcactttgggaggccaacgcaggtggatcacttgaggctaggagtttgagaccagcctggccaacatggtgaaaccccgtctccactaaaaaatacaaaaattagctgggcgtggtggcacacgcctgtaatcccagctacgtgggaggctgaggcctgagaattgcttgaacctggtaggtggaggatgcagtgagccgagattgcgccactgccctccagtctgggcaacagagtgagattctgtctcaaaataaataaataaataaaagtaaaaaaaaaaagaaaaaattagttgggcatggtggcacgcacctgcagtcccagctactcaggaggctgaggtgggaggatgactttagctcaggcgttcgaggctgcagtgagccaagaaagcaccactgcactccagcccaggaaacagggtgagactctgtctctacattttttattttttaataaaaaaaaaaaaaaacagtgacaagaggtgaagcaaggacaaggggcagcagggcagtccctcggccgatgttccaggcaagctacgtagccctgccctgctagcctcacagggtcatgaggtgcgtgtgcaggctccataactacaaagtcccaggcccacatggagggaggtggtaaccactatgaccaagtggcacagcatgaggggcacaggatgaccctcagggagatggaataggggagcccctctcctgacctcagcggggctggctgggagccttgctctatattgggcagagaccttgtcagagagacaaagaggtggcccccacattctgcattctgcccagtgggatagcggccacttccctcccgctgtgggtctccccgcctccccgcagccccgcgctcactggtgctcaatctggaagttaaggtgtccactgaaccagtcgttgaagaaggactgctccacgttgcaggtggctgtcagctgtcagtggaggggatgagtgtcagggaacaaaggaaggcccaagggcccggcctcattcccagggggcccagccttacccagggtctccaggccacccgtccacatcataccgtcctgcctgatggcctcagcccacccagatgccccacctgtccctctgggggattcctgctgccctttcttgctcagccctgaagctcccagcaaaaggacacaggcagccccgggaggcccagcacagccctgtgttagcaggtgcagatcatctggggccaggacatggacattgggaccaggctctggtgaccggccctgacttccctacctggctactgaaccagtcacggtaggcctcctggtcaatctccatgacgatgtgattcatctgtgtgacccacacaaaccagtggctctccaggaacctgcaagagaacacagctcagcgcaggggcctccgggggcccagccacagtgggaacagatccactctcccaaccagcccaggacagcccctgccaaggggccaggatgggaggtccccaggcaaagtggagccgtccgagcctcttctcatgccaaagccatcatcagtgccagtggagggcccagggatgaatcagcaaagcccaggcacctgatgaagttgaggaaaaggagggctcccaggatgccgtagaaagggatgtaggtgatgaagaaccggatgtagtagctgacggcccaggccaggtcctgcggggaaagatgaagttaggtgcaacctgccctctcctctgccctggcaccaagtgcgtgccccagatgtgcacacacctcacactcaggcctctagaagctggaccgcagcccactgaaatgcaatgggcaactacacgccacctgcttgctcggggtttgcatggctgcctttgtttctagggaaatgctgagtgttttagcatcaggaagtgactgtgccctgtttttcgggagagaaacggaccctcctgctgaggggcagccatggggtaggggtgggggtcagcagccctctcgtggggcaagggcgattctgaaggtgcgcccccaacccggggccaggtccccaaccgtcccccagtcctgtccctcctcctcagcacctgggtctcctcctggcatctccttccagcaggacagagggcttggaggggtagggaaggtcagaggtaccatcgtccctatctcagagctctcacagcagaggctggcctccccacgccccactgtcatcctgtgtccctccactctgctctcctccctgcctctggctggactggtgtcagggactgggcttggacgtcttctctcatgtactgggagggtgacttcacggctccaccctgtccactgtctctctgccacccaagtcttgtctcaactggaccacagcatcagcttcccacagtctcctgcttgtcctcgtggccatggcaaccagagtggccttcgctccaagcaggtcccaactctcccctgctaaagcccccaccccacccagtcacccacggagcctcatggggttaagaacctgtctttactcagccccctgacctagcttactccctccccggggcctctgcatggcctgttcccactgccagggcgctcatcctgccatgagtttaggtatggtgacatgccacaggctcagcacaggtgtccgaggtggaaggtgaggccaagggactgccctgtctcacttcaaacgactgaagaacaaggtcacatttgtgtcttaaaatagatccccacccactggagagggggagactaggaagttattccagcggctcagacatgaaatgacagaggcctaaaccagaacccacggcactgacaaggaggtgacagattccagaactgtcagaggcaacggtggctgcatttgtgcctgcttggctgtggggaatctaggctggtcctaggtgatcaggggtcgggtgccagcagctgaacaggaaaggaggaagggagcgctcaggagaggctggagatggccttggggccaacattggccgagggcaggacctcacgttccaataaggtggccttcaaggtgaggagggaggcagatgtagccagttctgctcccactttccatcacattccttctattctgtgtgtgtggtgcaatagtgtgcagtgtatctacacatatatggaaacaaaatgaggatggggttacggattatttttttttggagatgggatcttgctttattgcccaggctggagtgcaatggtgtgatcatgactctgtcccaggctcaagccatacttctacctcagcctcccgagtagctaatttctgttttttttttttttttttttttttttttgagagggagtctcgctctgtcgcccaggctagagtgcagtggtgtgatcttggctcactgcaagctccacctcctgggttcataccattctcctgcctcagcctcccaagtagctgggtctacaggtgcccgccaccacgcccggataattttttgtatttttagtggagatggggtttcaccgtgttcgccaggatggtctcgatctcctgaccttgtgatccgcctgcctcaggctcccaaagtgctggtattacaggcatgagccactgtgtctggccttacctggataattttttttaagtttttatagagatgggggggtctcacttacttgcccaggctggtctcgaatgcctgtgctcaagtgatcctccagccttggcctcccaaagtactaggattacaggtgtgaaccattgccctggcccaacttttatttttaagagacagggtctcactctgttgcccaggcttgagtgcagtggtgtgatcacagctcactgcagcctcaaactcctgggctcaagccatcctcctacctcagcctccaaagtaggtagattacaggcgcgcatcaccacgcccagctttttgtagagacagggtttcgcccatgttgctcaggctggtctcaaaactcctggcttcaggtgatccctcccacctcagcctcccaaagtgctgagatcacaggcgtgagccaccatgcctggcctggacttcttttgagtgtagagagcaacacatacacagagatcgctggtttcaggggcagagagcccaagagatcagaagcagccaaagaggcggagcgagggggttgggaagaagccagcagaggtggggacctggaagccaacaggaagaactgcaagagggagtggccagtggtgtcagatacagcaaaattccaggagggtgaagcgtgggagcatctcaggatccaggacgtggccccgggaacagggaaccttgccagagcatgtaaatctccccgggaagcctccttcaaagatcttagggtttgtcacctctttcctctaagccagggtcccccaacctccacactattggcacctgggacaggctgcttgttgtcatgggcggttctccagggcatggcagggtgctaagcaccatcctggctagacgcccaccagatgccagtagcaccctcctctcctgaagttgtgacaattaaaagtgtctccggatactgccaaagggcagaacagctcccctgagaaccagtgccccaggtcataggtgcgctcctggctctgaaagccccatgggctcatcacattgtccccactctgccatccccttttaggaacatagggtgatttcttttcctgtttaatactttgttccttagggaacaagcacagtcaaaaacaaacaaaaaaaaagaagttgctcactgcaagctccgcctcccgggttcaagcaattctcctgcctcagcctcctgagtagctgggactacaggtgcacaccaccatgccaggctaattttttgtatttttagtagagacggggtttcaccatgctggccaggctggtctcgaactcctgacctcatgatctgcccgcctcggcctctcaaagtgctgggataacaagcatgagtgactgcgcccggcaataggccacttatgagttagaacgggattggatgctagaggcaaggagagggtgtaacatgtataaggagggaaaaaacataatggtgctagtctctaacttgagccactgggtggatgatggagccattcattaacatggagaccatcaggattaggttgtgggagaagaggagaggacttacattgaatatgttggatttgcaatggctgggacacctccaaatggagttagattggatatatgggtccaagacttggagataaaatttgacttggctgctcttaaattcacagtcagggtgaaaaggacaacttcagttagcaagcgataaaacagtaatcaacaggccgggcgcggtggctcacgcctgtaatcccagcactttgggaggctgaggtgggcagatcacctcaggttgggagtttgagaccagcctgaccaacatggtgaaaccctgtctctgctaaaaatacaaaattagctgggcatggtggcgcatgcctgtaatcccagctacttcggaggctgaggcaggagaattactcgaacccaggaggcagaggtttcggtgagccgagatcacgccattgtactccagcctgggcaacaagagcgaaactccacctcaaaaacaaacaaacaaacaaaaaacagtaatcaataaacaagtccacatttggttaagagaggaaaaacttccccatggctattggttggagcatgagggacaaatagactgctgagaaagactggattttaagcaagcatttcagaaagtgacaatttagtctttgataattttcagataaacaatttatctgccgggtgcagtggctcacgcctgtaatcccagcactttgggaggccaaggcgggtggatcacgagtcaagagttcgagaccagcctggccaacatggtgaaaccccatcactactaaaaatacaaaaattagccaggcatggtggccggcgcctgtactcccagctactcaggaggttgaggcaggagaatcgcttgaacccaggaggcggaggttgcagtgagccgagatcgcaccactgcactccagcctgggcgacagagcgaaacaccatctcaaaaaaaaaagatgacgtaattacaatgggccctaatgcaatatgaccaatgtccctattttaaaaaaaaggaaaaattttcaagaatccacttttggtgaagaaaaaaagaaaattaaaaaataggccaggcgtggtggctcatgcctgtaatctcagcactttgtgaggctgaggcgggcagatcacttgaggccaggagttcgagaccagcctcgccaacatggaaaaaccccatctctactaaaaatacaaaaattagctgggcatggtggccggtgcctgtaatcccaggtacttgggaggctgagtcacaagaattgcttgcacccaggaggtagaggttgcagtgagtcgagatcacaccactgcactccagcctatgtgactctgtctcaataaataaacaaataaacaaaataatttttttaaagagggatatttggacacagatacagatacaaatatgcagagagatgatgtaccgagagggaggacgaaagccatcaaccagccgatgagaggcccagaacagagccttccagagccctaaggaatccaccctgctaacacctcagttttggacttccggtctccagaaccgggagaaaacacatcgctgctgcttatgccactcagttcgtggtgctttgtcatacggtcttcgcaaacgaccacacctgtcatctcagccaacgcccagctgctccaacttcaaaccagggtgtggggcaacccagttcatgggactcagggcccacagggagcggggaagggagatggccacacttgcctctcatcctgctgcctttgagaactttctcgggggctctgcaaaagcaggggctgccccagtggactccctatgtctgagggagagtagagatctttaggactaggtcctggtggccccagagggagtcctttcctgagaggcagctaccccagggaggagatgcctggggccccacaggctccactggggcacacgaggaggcagcgtaggacccccgggtccccctgtcccagtcaccctcctccccatgccaagccagctgtgtccccaactcaccacccagttcttatggacgatcatggtcatgatgatctggtactggaaatacatggggatgagcagcggcggcccaactgcaggagagagacaggcgcttagaggcatccattccacgctgcctgtgccggaaggtcaggggaacccaggcccagcactgagtgcaggggccagccctgcagacgtgggcagaagcagccagggaccccggggcctgcagagaaggctgggagcccttgaggacgtgtgtcacccctgggactctctgagcctctgtgtccccatcaggcctgtaacacaggctgaggggtctgcacagcaaggctgctgtggcccccgcttctaacaagtttagtgtcactttctggatctgaaaaagatgtcaggtaggagggagagacacgccactctggggggaggggagggtcccagagtgatttcggggcgccgagcactcactcaggaagaagtattcgtgctggtgattgtagggcaggtatttcagcttcttcttgccgtactgaggagagaggagagatcatgagcacccagtagcctcagctcccagcctcccatgttccccaacccatcctgcagccaccatcccttctatctgctcagggcacaccactgtccctttcctgtcaatctgcaccctgggcccaccaagcctggggcccctccagccctctgggctccccatgctacagccagcagcggccaacgcttcctcagccctagccgagcactggcccgatggcatcgatcctctacaaggccggcacttctgaggctgaggctcagcgttaagccatggcccagggccacaggaagtggccctgactgggatcagaacccaaaaagctgactctgagcccatgtgacaggcactaaacaaatgtttgttgaatgaatgtgcaacagagcaactctcggcggagcataagcacccaggggagttcctaggtcaccatggagagctcccggagcccgcagtggcagggagaacctaggtaagggccccagaattgctgccagtcatcaggctgggagcatctgcctccctggagcctccctgtaatttacaagagtgaatcactcctccccagctggagcctaaccttgaggacagaggaggccacagcacagactcctcaggccacatctggctacctgaggtccccatgacggcaccggtttcttccccatcagagcctgcaccttgggcagcctgatgcccagaggctctaatggaggagggctgggctgggtcctgggcatcgtcattgtccaatgccaggcataggaaccacggccccaggggatccctggagcccttaattccatggtccagcccctagggaccagcccaccctgcacttccaggactgagaccaaaagatgccgctcactgagtgacacctgctcctctcccttgcagtgtggggaggctgggcttgcagccagcagatgcgcttgagccgactctgcctctcaccagtgctgagactatgtgagtcgcttagccttgctgagccttgtctggcatttgaatcagtggttggtaagaggagccaatgagaacatgggcataatgccaagtgctgaccccaggacactgcccgtcaccctccctatacccctggatccgaaggccagagatgcctcctcctatagtgtccagtcatacttattgcagtcaggaggtcaaagtgagttacagagggaagggaccttggatgatgcctaggccagtgcccctctcatccaggtgagtaaaatgattgtccaaatcacagggagagcatggattcctgagggaagaggctgtgggtgggaaccaggtccaccctgtccccaaggcttgcatcttggcgccaatggccatggtcacggcacaaccagctgaagaacccccagaaacagtccctttgttctgtgtggcctcctgagccttggcaaggatctcactcattcccagaaaggacggccacttgcaggaagactattattaaggccagggctgaggccggccatggagaggtccgagccagggaggcctcacaggagcctttcatgagtctccagtggacggaggtgctggaggagccagcactgcagacgttgctctcgaggtggccagtctcggggcctgcagtggcccacagaacaggcccctgagtcctgctctaagcttctcccagaggccagggagcaggctcatagccccagccttggcatgcagtgtctccagctctgctcaagagctcctccccaccgcatctctgtcccacagagcatcccatccctctcgggctgggccggctgtactcggaagtgagcacagagggcaacccaggcaggtcagcaggggccagggcatcctatggagggactgagggctggccacgctgttgtgggggcctgggaggcacctggggagtctgtttggagctgcatgtgcacagtaggcaccctgttctcatgggtgatggtggcctgtgggtggacaacacaggttacaggggctgcctctgctggtaagcactgctggctttagtgtgcgtcccttcaatgccccagaatgaccctcgggagccagggggtcctgcttgccaggcagcagcaggcctcagagtgggcctctgtgggacggtgagcaaaatgctcatcacagtcacgcacgtgtatgtacatgcgtatggtgacataccactacacatctgtgcccatctcgatggcctcagctgcagcggctctgctgggggatggccaatactcccctcccaaaccagaaagtacaactgtgggtttgggatacgaagccctgccctgtggctaactctctgctctcatctttcccacgctcagttctttgccagagctttgccgtttaagtcatgggaccagggaagggagggagaggtattttagaatgtagcaagctaggggggtgagtgcctggctgtttaattgatcagaaagctggggctacccaacaaacatatttcacaagggcccccaggactccgaagctgtggtttgcagccagatggtttgggttcggacagtggtgttgccttttccttgctgttaccttgaacaagtcacttcatgtctcttggccttagctgttccatccatgaaatgggtcgatgacagctcccgcctcacgggttaagcaaggattaagtgacgttgtgcacgcacactgcccatcacagtgcccggtccacagactcactcaacaagagtcaggcttcttcccaactgggggctcagagccccaagtgtggggagtggaggaccccacacatctcctcctccagaggagtccccgtcacacacacagagaaagcccaagaggcaaggaagacacatgactttcacctggctgggctgcggccaagggtgtgggtggcacacatggacctccccctgatcagcaacagtgccttcccaggctgcggttgacaggcagagacgcaggccaggggcaagggagggagtgcagccagccctggcggcggggctgactctcctgtcctcggcctctccatgcacctcaaggccaggcttggatgagggcctgggggatgccgggccatgtggaggggacctttcagctttggaacaaaatgtctgaggaatgacaagggccctccttgtccatcgagggttgggggaggggagctgtcgcaaagcccagtctctgcctctgggaacctgcaaactcacacacagagagaaacaggcggcacgacctccccagcaggagcagaatggcaaggtcccagtccaaggtccccgagagggcggcatgtgtgtcccaaggcgggatgggtggcttaagcctgttcatgaaggtctgcctcaagcaggaagcccaggaggttagcttcagacagtcagagcagcagaggtggtttcccggatgggaggaggaggaggatctcaggcaccgcacggcttctgaggcccctttacactgctaccgggataatggtctcaccagccccctcagaaaacggggatatggcaaaagaagaacaaaacaaggctgctgccaatatcaccgctattaaactcagctctgaaatttcccgtcaatgcaataaaacccaaagcagaaaacagagtggagctattagaaagaaagagactacttcaacatccagattagaaagaaagaaggaaaggaaggaaggaaggaaggaaggaaggaaggaaggaaggaaggaagggagggagggagggaagggagggagggagagaaagaaagagagagagaaagaaagaaagagaagaaagaaagagtgactacactttttttctgtttgttttgttttgttttgttgttgttgttgttgttgttgttttgagacggagtctcactctgtcgcccaggctggagtgcagtggtgctatctcagctcactgcaacctccgcctcccaggttcaagcgattctcttgcctcagcctccagagtagccgagactacaggcgtgtgccaccatgcccagctaattttttgtatttttagtagagacggtggtttcattgtgttagccaagatggtctcgatctcctgacctcgtgatccgccagcctcggcctcccaaagtgctgggattacagatgtgagccaccacgctgggccgagagactacgttttcattattttctaggatatgatcatctacccaggaaactcaaaagaatcaaccgaaacacaactagaattacgaagagacgtaagtggacactagcgggacaaaagataactatcccattcattggaaggccatgcaaacaaaaatttagaaaaaaaagaaaattaagataactaccccaatatccactgctttcccgagtactggagaacctccaatcataatgacaaaatataaaacatataaggattgcgttttaaaagaaacatccatgagacatataaagaagtacagaccttggccgggcacagtggctcatgcctgtaatcccagcactttgggaagctgaggtaggcggatcacttgaggtcaggagttcgagaccagcctggccaacatggtgaaaccccatctctactaaaaatacaagaattagccgggcatggtggcgggtgcctgtagtcccagctactcgggaggctgaggcagaacgatggcttgatcccaggaggttgaggctgcagtgaaccgagattgcgccactacgctctagccaaggtgacagagcatgaccttgtctcaaaaacaaaaacaaaaacaaaaagagagagaaagagaaggggaaaggcaccccactacgagcttccaatgagttaagtgccaaggatgaatgagtgtgagtgtggcccccaagtcatccagacggtggcctgggagaggacagacagcccagcccaggccaagcccgggctcaggagcactcactgcctcatatgaagaagcaatgccacctcatgggggtgccgggaaaactggccgactctggagaaaagtgaaggccgaacatcatcctacccatatcccatttggcagaagttaaagattgaaacacaaaaccttaaagaactgaaaataatatgtatgaagaactttctaagcacacaagaaatgaatctctgggtaaagtgaatatactttgctacatatgacaaaaagaatcctcctggacagcatcaataagaccaaaatgcagaaaacgaggaaaagggctttactgcggagcccgcgctattcacagttccacgtgctgggagccgcttggcagggctgctttgcttatctgtccccagagatagaagccctggccggcatccttgctctggagactgggatggtggcttgaggccctgggacctggccgccccacctggccctgctgtggtgtgtgggactggcatgtgacaagtcccatcagacccactgtcacttcagtcaagagaccagggttccttccagggcggccgggtcctgcgagagccagagcacaggtcaaaacaccaggaacccaggaagcaccaatcctttccccatgagtgtgagagcggggatttccacagaacaccgcggcactggctggggacttccaaacgccgctggtaactgaacaaccagatcctcacagcctcccacccctatctcctgccccaaagccagcgttccagaagtgtcgggggtgagaagatgtcgggaaaggagaggcttctctggccaccacgcacaagaaagacgccttcttgccagtgcagctggtgggactagactttctttgttggagacacagagaacatctgtcaggacagccaacggctctacattacaaagcctcgccgagaaaatgaagcctttgtccccacttatcagagggcctcaagttcatcagttctgttttctagacacctctaattaaagctggcaaactgtttcctagaagaataacaatagcctgtactttggcagaaaatggaatccctggcagcttagagaggcttccaaagtacagaactgtggctgatttcctgcgaattggccatgttacagaaaaatccacgttcctgctcagatagtctcacgggtggaaatgaaataagaagagggtgtacaaaccagaactggggagccaggctgtctcctcgccttgttccaagccttaggcgccaaggctgtcgggaatactacttcactcacggtgccactccttagtgagggaaaattggcctcacttggcagatgctgattgaaccctactctatgcatggctttgtggctcctaagatctgcataaaagcaacaaggatcttctaaactttcattttaatcattaatgtatttccaaaaagcagcgcatatatttatttttttcttctaaattaggtcccgacatagaggctctacataaaaaaaaagaatgtattaaataagaacatttttttgtggaacgcattggtggggcttttattcaaaagaaattatgggccaggcgcggtggcttacacccgtaatcccagcactttgggagggcgaggtgggcggatcacgaagtcaggagttcaagaccagcctggccaacatggtgaaaccccgtctctactaaaaatgagaaaattagccaggcgtggtggtgtgcacctgtaatcccatctactcgggaggctgaggcaggagaatcacttgaacctgggaggtggaggttgcagtgagccaagatcgtgccactgcactctagactgggcaagagagtaagactctgtctcaaaaaaaaaagaaaagaaaagaaaagaaagaaattatgaactactgacactcaatttgtctaccatataaaataatgtaggtcctgttatggttcagaagtacaacagaataccatatggctagagggagacgagacctgtctacatgaactgggggggaagggcatccacattcgcagaggtggcaagttgcaggatacaaggtagaatttttttgttttttatttttttatttttgagacagagtctccctcttctgtccccgctggagtgcagtggtgcaatcatagctcattgcagccttgaggctcccaggctcaagtgattcccccacctcagcctcccctgcacctgggaccacagacgcacaccactacacctggctaatcttttgtatttttcgcagagatggggtctcactatgtagcccaggctggtcttgaactcctgggctcaagcacttctcccacttcagcctcccaaagcgctgggattacaggtgtgagccaccacagctggcctaaaatttttgtttgtaaagaaacagatatatgcatgtttatacacatataaaaatatctagaagactgtatagcatcttgttaacagtggttaccctcaagggcataaaatttggggcaaaggggaggtttgagagactcactttttttttcttttttgagacatagctttgctctgttacccaggctggagtgcagtggtgtgatcatagctcactgtagcctcaacctcctgggctcagctcaagggatccacccacctcagcctccccaataactgagactaggcacgtgctaccatgcctggctaactaaaaaaatatgtatttttttagagacagggtcttgctatattgcccaggctgagactcgtgttttaattctggatatttctgtactgtttagaagtttataccaagtgtgttctatatttgtagtaataaaatgaactaatatgaaaataaaatggtatagtaaatggaaggcaatggcctagcagtccaaaggtctggggcctcaccctagactggccactaaattacgtgactctctcggctgggcacgttggctcatgcctgtaataccagcactttgggaagccgaggcaggcagatcatgaggtcaggagtttgagaccagcctggccatggtgaaaccctgtctctactaaaaatacaaaaattagttggcatggtggcacatgcctgtaatcccagctacgtgggaggcggaggcaggagaattgcttgaacccaggaggcggaggttgcagtgagccaagattgtgccactgcactccagctctgggcaacagagcaagactccgtctcagaaaaaaaactaaataaattatgtgaccctgaacgtgttccatcctctcgctgaccttcaatttcttatccactggtgaagcagattggaccaagccacgttgaggctcctcccagtgtacaggatgatgattctccaaataaggttttctcaacatgagctagtcggttggcgaccaagcttgagcccctgaaatcttgccttcctgctgaactggaacaagatttccctctaccctgggaaaaaacaagccagaaaatgcccttcctggcctaagggtaggagggagacatctaccattctaatgaggagctgtgtctgtatttacaggtgaggccattccacatacattccagccagaacaattcagggtacctaggagaggtatctgtgtagcaggagatgtggacctgcctggctgaatgtcagctctctaggcttccttccctgctccctgctcaggccaaacacttcctaggtcaacaccaaccccttagtcgtacctcgatggctgccattcgcccaggccaaacacttcctaggtcaacaccatctccttagttgtacctcgatggtctgccattcgcccaggacaaacacttcctaggtcaacaccatcctcttagtcgtacctcgatgggctgccattcgcccagaacaaacacgtgcagcatgttcacatcgggatccttgtggaagatgttaggcttggcgtggtgctggaagtggcgatgattccaccagttggcagaggcaccctgtggggagagaggggtggggatgagccatgcaagccaccagggaaccgagctcgcttgtaacaggcccttcttaggagcagttcccggaaccttcaaccctcggggatagcacttcaggcccccacaaggccagaatccagccctgccatgactgagctcagagcatgcgccagccccagatggagtgaagtcactttatctctctaggcttcagtttccctgatcataagacgatggtggcagatgaggcgtgctgctgagggaccacacggtgagcgctccagcaggtgtggcagccagtctctgcctctccgtcaccaggtgtggaaccagagctgtgcaaggtaaagccgaggtttcagggacagtgagaagtggtccctactatgtggcccagaaatctccctcctgagcgtatatccaagagaaatgaaaacatgtccacacaccaactcatagagcagtgttcacagcagcattcttcaaaagaaccagaagagcaaaagcaacacaaatgttcatcaacagatgagtgggtgaatgaaatgcagattatccacacagtggaatatcatttggctgtgccgtaaaacagaacgaatcactgacccttgctacaacacggatgagcctggagaacatgctaagggaaggaaggagccacaaaagaccacatatcacatgattccaccgacatgaaacgcccagaatagggaaatctatagagacagaaagctgagcagttgtgtagggctaggattggggtaggggagggagtgagggggttgggatgtgatggctaagaaacgtggggtttcttttgagcatcatgaagatgctctaaaatcgactatgatgatggttgcataaatctgtgaatataccaaaagtcattgatttgtctactttaaatgggaaaactggctgggcgtggtggctcacacctgtaattccagcactttgggagacagaagcgggtggatcacttgaggtcaggagtttgagaccagcctgggcaacatggtgaaaccccgcctctactaaaaatacaaaaattagccgggcgtggttgtgggcgcctgtaatcccagctactcgggaggctgaggcaggaaaatcacttgaacccgggaggcagagatcacaccactgcactccagcctgggagacagagcaagactctgtttaaaaaaaaaaaaaagtgagaactgtatctcaataaacgatttggagagcgcagttgtgctgctatgctgagggtgggtcctgagattcgtgtcacaccaggaaggctggagggagggctcaacaaacaactgctaacatgaacaagaagaactttcctgtttctaacactcaaataggatcccatgagacaagacacataacatggatatttcttttgaggccacaggtgtccgtctcctcagctcagagttatggccctcgacagttgcccagcgacagatgaaagaaaacacactttcctgaccctttggcatcacgactatcctggtgaactgttgccggatcaatgctttggctaagggtttgcaaaaaatgcctatttgctaaacaaacattttacttgggagatgcttttggcacacacagtctatggacactaatagccatgggtgggaacagcaacggacagctgtggcctttgcagtaacctcagggccctggaaactggcaggcctcaaaacccatgagagagagagagagagagaaaaaaaaaaaaaaagtcagagagtgaaagctcagaggcttcactttgggaggctgaagcgtgtggatcacttgaggtcaggcgttcaaggccagcctggccaacacggagaaaccccgtctctactaaaactacaaaaattatctgggcgtggtggcgggcacctgtaatcccaactactcaggagtctgaggcaggagaatcctgtgaacccaggaggccaagatcataccaacttcactttagcctgagcaacagagcaagagtctgtctcaaaaaaaaaaaaaaaaaagaaaagaaagaaagaaagcttagaggctcgaggaatcaaatgacacatttgcgtttgttgtcaaaaggaacaaaattcctgggaagaatcaaatggaaaaatctctggcacaaagaaactgaggagcaaggcatgaaacaagtaagcgtgatgtttggaggataccaacccagagatgtttattgaacaaacagatggaggaaagcaagacgggctgacaacaaggaggcagtgaggtgggcagtcccggttctccctggactcgggatgagatgtaatgaaagcattttttgttcatgctacttcctctgctgtgattctcttccattttttttttttttttttttgagacagagttttgctcttgtcgcccaggctggagtgcagtggtgcaatctcagctcactgcaacctccgcctcccaggttctcctacctcagccttccgagtagctgagattataggcgcccgccaccatgcccggctaatttttatattttcagtagagatggggtttcaccatgttggccaggctggtctcaaactcctgaacccaggtgatccgcccacctccgcctcccaaagtgctgggattacaggcataacccaccgcaccgggcctctcttccattcttctttgccaggtgaagccctgcttgtccttcaagagcccctccttccgggcaccgggaagcccgccttgcccaggaacaatggccagctccgtgttcccagaatgtggtgcagatgttgcctaccctaagccagctgccgtgctctgcctgggaggtgaaccaagagacaaagcccttgtcctcacggagctgcgagggagggtctggcctcatcacaccaaacccaaactgagctggggccaggaaagctaagtgtccacgcagctggagaagttggccaggcagagtgaggggtgctttcctgacagaggcaagagcctacgggaggccctgggagaggaagggggagtgtagagtgctccagaagccagaggaaagctcctcggtataactgtgaccagcagtgctgggtggcgccatatcagagcctgaggcaaaaaaaaaaaaaaaaaaaaaaaaaaaaaagtgcacttctggctttaatggaaacaaactcatcgataacattttcaaagcctactttttgcctcatttcattttctttcttttttcttttttcttttttttttttgagacggagtcttcctctgtcgcccaggctggagggcagtgatgcagtctcggctcactgcaacctctacctcccgggttcaagtgattctcctgtctcagcctcccgagcagctgggactgcaggcgtgtgccaccacgcccggctaattttttgtatttttagtggagatggggtttcaccgtgttagccaggatggtctcgatcttctgaccttgtgatctgccctcctcaacctcccaaagtgctgggattacaggcgtgagccaccgcgcctggcctcatttcattttcaatggaaagaattgctgagtttgatggtttctgtcaaccaagcgattagcttaaataatttttatgtttattttttatttttgagatggagcctcactctgtcacccaggctggagggctgtggcacgatctcggctcactgcaacctccacctccctggttcaagtgattctcctgtcttagcctcccgagcaccctcgcctggctaatttttgtttttttagtagagacagggtttcaccatgttggccaggctggtcttgaactcctgaccttaagtgatctacctgcgtcaccctcccaaagtgctgggattacaggcatgagccaccacacccggccaagccacctcgcccggtcttaactaatttctaattacattcaactgaagcaaaagtataataagttctgttttggtataaataaagcatttacacttagaatgttatgacttttaatacatcaacttcttcattgttaaatatttttttaactactttaatcctctggaaaaaaaatcaaccattaaaaaatgacacacgaacatgtttagagggttgcatgtttttccatttccctcagttcatcctgatctttatttaaaattttgatattttgttcattgtggatttttttgcattaattttgatttttttaaaaacatattgcaggccgggcgtggtggctcatgcctgtaatctcagcactttgggaggccaaggcaggtggatcaccttaggtcaggagttcaagaccagcctggacaacatggagaaaccccatctctactaaaaatacaaaaaaattagctgggcatagtggcgcacacctgtaatcccagctactcgggaggctgaggcaggagaatcgcttgaacccgggagacggaggtttcagtgagttgagatcacgccattgcactccagcctgggcgacaagagtgaaactccatctcaaaaaacaaaacaaaaccacattgcattaaaacatcatttatcttgataactgaatttgtctggtgtccccttagaatttgtctggtgtccccttagattttataccctaagcgagtgccttacttgtttcaccctaatcccagccctggtggcctgagatgaggctgcagaaagtctggtgatgtccatttccagatgcagcgcccagatggcactgggcctttcagcttgcatttatttatttagagacagtgtctcactctgtcacccatgctggaatgtagtggcaccatcacagctcaccgcagccttcaaatcccaggctcaagccatcctccggcctcagcctccccagtagctgggactacaagcatgcaccaccatccccggctaattcttttatttttagtagagacagggtcttgctatgtggcccaggctggtctcaaactcttggcttcaagcaatcctcctgccttgacctcccaaagcgctgaggttataggcgtgagccactgtgcctggctgaagtttgcatttcatcctaagtacagtgctgaactacgaaagagttttaacctcagaatcgtctttgtaaaagatcacactttggaagaaatgtccactgggcatgacacgggctgaaggcaaacaggtcaggatgtgaagaactcccattaaatcccattagcagtgcagccaacaggaagaagggggtcccagcctctcacagcacctggtaacctactcacaggtctttccagcctgtgctaagacatctgagttggcgaggcccttgaggacctccctgtagccagtcccctttttcccagtgatgggaagagacacagacctacaagatttgtccccatggctgtgcacctgccgagtgctagagccaatttcaggcaagcttgacctccgtgctctggggcacccctgagtgagccacatgtccatgtccttggcctgtctctgtgacacagcaccaaggacacagccagtgggggctggtgggccatgagtggagcccacatccccaagcccaaggaccctgtttgctgtcatccacgttctacatggagaccagtcctctgtcctggccccgtctcccgcctgacgcaacagccgtgctctggggcccctcaaagactgagggcaattggacaggaacaatcccccctgcccggcccctgcccagaatctggaagcaggacacagcccatctttgttaagtgtgtgggggctaacatgggtcaggagttaaatgttactttgccatactgaggagggtttgatccaacagagaagagtataaaatgaaacaaagcactccactatgtgcaccctctccctttgcccctgagattctggacagagaccaggttctcaggccgcttcaggctcagggccaggcaagctgctcgctgcgaaactggtgaccagctcaggggtggttggccaccagtgagatctgcagccggcaagccaagggccccgttgcggtctgggtggaagaggggataagctacaccccacatgtagctcgtcccttgccagggtgtggagggatggattctttaggacccagcttttctcaggaagcaggtactgttgggtcaggctgggatggggatagtctatttcagagagcaagttggcaaagactcattttcaaaactgaggagataacgcctgtcagatcagaacaaggcagttggcaattccagcttgtctttctacaaacatgctgagactctgtggtctgcttccttatctagggggaggtgagagtggaacttccttaactcctgcacttctaatgacttttgtcctttgggccagctgatcattccgtagtttggtgtcccctatctgaggccttataggatgacttttactttttgtaccccgcttatttccaaagagtatttgaagtggcttgagataaaagactcatatataacggaaggctaaaataaagataaaagcataaatgccagatgaggaaggagagaatgggggcaccaaaaacacagactaaagatagttgctgtttcaaatgctgctttgtacctcttggcttctgaggggaagagaggagcacaatgtgtttctttttcttttttttttttgagagatgggggggggtctcactatgttgcccaggctggtctcgaactcctgggctcaagcaattctcctgcctcagcctcccaggtggctgggattacaggtgcatgccaccacacccagcacaacgtattaaagagctcacatccccagtgaaaggaagcataccaactcatcaaaaaagatgctacaggccggatgcggtggctcacacctgtaatcccagcactttgggaggccaaggcaggtagatcacaaggtcagaagtttgataccggcctgaccaacatagcaaaaccccatctctactaaaaatacaaaaattagtcaggcatggtggcgagtgcctgtaatcccagctactcgggaggctgaggcaggagaattgcttgaacccggaggtggaggttgcagtgacccaagatcacaccattgcttccagcttgggtgacaagagcaggactctgtctcaaaaaaaaaaaaaaatactgctactttactgtccccaaacaaaaacagatttgttagatgagtccttagctaaggaacatcaaaaaatacaatccgctgagccaaaagacaagaaaggtgtgtgcctgtcttcataatgagtagtacaccatggctttgtggttcggacctgatccagagacagggctcaggaagtcagcagaatggagagtcaccatggccctcagcataggcacacctgccttgtcaccctgtagcctcagagcactgagcagagaggaatcctggtccctctgtctcaactgctgtccaacaggacagatgcccagggctgctgacacttacctttaagtggccaatgacgaatttgtggacaaggtggttccacttgggttttctgtagacagacaggtggccataatcatgttgcagccatccagcttgggcctggggagagagggtcacacgtgctgtcacagcctcagcaaacaggcaccaggcctctgtcagctaggggaagtgagggtgtcacgcctcacctgagaggtagcaaggacaaaggccgtgatgagggtaggaatccagccattgccaaagtaaaagacagtgaaccatgcaatgctctccagggcgatgatgtgggccaggaggaggaggaagaacacgtggttggtcttgaacaggttcatgtcctcagccgtcttcctcagggcccggaagtcctcagtgatctttgactgttgaccaagagcacagggaaaggagtcagccaccagccactctggagggaacatatgtctcgagctgccatttcaacagccaatgcacaacccagagaagctgtggcaagagggggccaagccacaagcctcgaccctccaggagtccctacaatagctgctgttaccacatgccccacacagccctggggcctgtatatttgtcacagctaggtaagagtgacagagaaaggctttgactcaaaagcttgcattttatacaccctgtgttcatagctctattcacatcaggaaaaaggtagaaacaacacaaagatctcgtgatggatgaatggatcagcaacacgtggtctatccatgcaatggaatattactcagccttgaaaagggaggaaattctgacacatgctacaatgtgagtgaactttgaagacatcatgctaagggaaacaggccagtcaccaaaggacaaatattgtatgattccatatacaggaggtccttggagaggccaaattcagagacagaaagtagaatggtgcctgccaggggctgagaggtgggagaatgaggagtgagtgcttaatggatgtggaatttcaatttggggaagatgagaactggatggtggtgatggttacataacaatgtaaatgtgcttatttgatgccactgaactgtacacgtcaaatgaccaaaatggttgaccacacttttttaaaaaagaaaactttaatcccagcactttgggtggccgaggcaggcagatcacctgaggtcaggagttcgagaccagcctggccaacatagtgaaactccatctctactaaaaatacaaaaattagccaggcatgatgatgggcacctgtaatcccagctacatgggaggctgaggcaggagaactgcttgaacctggaggcggaggttgcagtgagccgagatggtgtcactgcactccagcctgggtaacaagagcaaaactccatctcaaaaaaaaaaagaaagaaagaaaagaaaagaaaaataaaacttgcattttccaccaccaaacagagcaccacttgctctgcgcacactgttgggtcttgaggggttgagttgggggcgacacaaactagcgcaggagggcgagctgaggcaggcaggagggggctgtgagtcccgggcacatggagccagggaggcaaagcggagtcaaggagggccctgggaacacaatggcattgcgaggaagaaggaacttgggacaagaggcaggggcagggccggacggggaggagagtggatacaaggagaggagcggtacccacagggcatgaccaaggtgctatgaagggtggttctggtggtgcctggtgggagcttggatgctaaatggtgcaggatctgcagcagaaagggagagcagtggagagagccaaggagcaaggccatggacaagggagctacagggcaggacgagcagagctggggaagccgcaggccaggaggtgctggaggtgagagtgggagatggacccacttgcgaaggaggcaggaggggacaagcatgggctggcatgggtacagggcaggtgatctcatgtgccatggagggcaaggtgagaggaggggcattggcctttgaaggacctgcagggtggcccgcagctcatcaggaaagccagaggcaatgggggtggtgggggactggccaagagtccaggccgggagagaccctggtcctgccctggctctgctaaacagaggggtctggcccaggctggcaacaagaggaggaagagcttgctgaggccagggtgggacttccatgaccaccctggtcacagcctgtgggtaccactcctctccttgtaacaactctcctccccgtcctgccctgcccctgcctcctgtcccaactttcttctataaacggctccgccatttacatggagacttcattgttgaacaaaacaacagcccatgagacctcaggggttgctattttcacacatggctgtcctggaagcccagcacccaggggggcgtctgacctgcagacaatgaacagatgaccagggaatggtcattctttctcaaagaggtgccccggaccacacaccccaaagccactcttgtcatcaaatgacatttttcggtgtttctgtcctgtctttcccctagattgtcatctggcaccttcctggaaagggatggaggagaaggaaaatgaaactggccaggagagaggagacgccactagttgttgtcaaaccccggctcccagggaggctctgaggccctccctgaacacaggtgaaccacagtggctcctccaggacaaaagcacccctgcctcagccccagttactggtcatggggcaaggggagcctctctcagactcccagccacccccagcctcgtctccacccccacccaggttgcaagccagacttacgttcttgccgtggtcctggctgggctcctccggggccagttcaccaatcagcaggggtttcaagaacttgcccacgaattccaggtcagggtggaaggcgcggaaggcatcctggagagcagagggcagtgatgaggctaagacctgaactctgtctgctcttgggccccaaggaggacagtgctcaccagcaacagctccatgtgtgcacccagacaccaaacggggtctcctgtgatctggccccaaatgccgtctccagcatttttccaggacagagccctcagtgcccaacgccaatggcaacagccacctgggcttctgtgctggtgcaggcatgctacactccccaggggtttgtgaatagatgcataggctgcctttgggcaggtcgggaaatggtgaccctccaggaaggcgcaccaggcagacacggggctcagggaggacttgagcctcgactgctcgtgagctgagtgccttgcatggtgcacaaaccacaccacccaccatctcttactagttcctcacctacatgtccagggtggtcaatgaaaaggacaagaccgaatactaccttggcactggaaatgtgctgtgatgaagtaaataaaaaaataaacacagaattatgtaaaaagcgttcctgaaaaaaagcctaggaggatctaggctattattgcacatgttaaggtagctggattatgccttgctttattttcattactttccaaactctaacactgctataatgatacacattttaatctttttttcccaattataaagtaaaaacgtgctgagttttggccaagttagaaaaggcacagcagaataaagaggaaaataaatatcacccagaaagtggtcattattgctaatattttagcatttttccttccagcttttttctatacatattatgcatattacatgaattatctcataaaaaatctagtatttctattagagatgagccagcaccaggctcccctgaggggatgcaatagaatgtcccagtggtgaacactgtgtaatctgcatcaaatcaagcttccagacattggtaggattggcaaaccagtcaaactccaccatgagaaacaatcagaaaaatcaatatagctggggaaaaacatacaagtttgtggaaaaaacaaaagtacggaagcatggtctagattaaaagagactaaaatgatataaaaactgcaactcttgactggtcgcaggggctcatgcctgtaatcccagcactttgggaggcagaggcaggaggatcacttgaggccaggagttcaagaccagcctgagtaacatagcaagacccctgtctctactaagaataaacaaaattagccaggcatggtggcctgcaccaataactccagttactcgggaggctgaggcaggaagatacaataagcaatgatggtgccactgcactccagcctgggcaagagagtgagaccctgtctcaaaaaacaaacaggccgggcacagtggctcatgcctgtaatcccagcactttgggaagccgaggcagggcgatcacctgaagttaggagtttgagatcggcctgggcaacatggtgaaatcccacctctactgaaaatacaaaaattagccaggtgtagcggcgcacgcctgtaatcccagctgctcaggaggctgaggcatgagaatcctttgaaaccaggaggtggaggttgcagtgagccaagattgcaccactgcactccagcctgggcgacagagtgagactttgactcaaaaaacaaacaaacaaacaaacaaaacaacatcctgcaattctttaatgtgacaggctctcacttgaaggaaaaaagaagttataccaggtttttcgggagttgaatgagaaaaaatgaatatggaccagatatttgatcatatcaaggaattactattaattttcttaaatgtgacaaaggtactgtgatgatgttagagcatctcttccttttttctccggaaatgttgaagaccttagggatgtgatcacacaatgacgcagcttattttcaaaaggcaactgcacacatataaagaggaaaaacgcaaatgtggcaaaatgttaagactagtgaatcttggttgaggatacacaggtgtttgcttgttccttcaacatttaaggatgttgggaaaatttcaaaattaaaaagaagagggggccgggtgcggtaatcccagcactttgggaggccgaggcggcggattgcctgaggccagaagtttgagatcagactggccaacatggtgaaaccccgtctctactaaaaatacaaaaaaaaaaaaaaaaattagccaggtgtggtggcacacgcccgtaatcccagctacttgggaggttgaggcagggaattgctttagccagggaggtggaaggttgcagtgagctgagatcgtgccactgcattccagcctggcgacagagcgagactccatctcaaaaaaaaaaaaaaagggtcgggggaaggtggagaaagtgctaaccactcctggaaatcttttcagccccacacgtaaggatctcccaagggtaactgccagtctcccatcatctccttactgcattgctggcatcaagtcctttgcttggtctttgttctatttgtgtctagaacagactgacaaagcaacacttcgtgcaggagaaaactgggcccacggtttcttaaaaaatgcctgtgacccactagccgagccgaaaagggatggtagcagaggatcaggtcaagagtattttcagggaaaagagacgtgctattccagggccctggggaggcagggagaagtccctggggaggcagggaggaggccctgggggcaggcagggaggagggctggggtgggggggcaggcagggaggaggcccagggtgcgggcagggaggagcccagggttgcagtggtgaccagctttgctggctctgggtggggtgatcagtccccaccagagcctcagccgcctatgcaaaatgagcaaggccctgggagaggcccggaggagctgccaaagtcagggcccagggctgggcctgaaaaagccccttcattggtcctcctcacatcacaccacggcctttgagaaatgaacaggaagtccctggtaaggcagtttcctgagaagcagctgcagtggctgataactaatggattcctcttgtctcattgaaaggcaagactcaatggcttgcaaatagactcatctccactcctgctgcctccccaacacccgaaccctgcagtcgaggttccaactccaagggagcagacagatgacgagccctgccttgaccttggttgctgctcagccatttccagagggctctcgggcagcctcacctccctgagcccaggggtaatgggcatgcgccaggcagggagccaggagtgttgctcatgttactcccttaggcctcaagccccaacttctgaggtgaagatgcaggagctcaggaagcaaagtcctgggctccaggtggcagagccaggatcaaatccaggtccatctgcctctaaggactcttttctcacgtgccacacgcttcctgccgttttagaaaaccgagcagtctgttggatcagctccttgcccatggtcagtgtggcagctttccgagcaggcctggtgcggaccgcccttgaacataccacgctcctttccacaccagggctgcctccattcgggactcagcctcaacatcacctccaagaggcttttcccaacatcacatccaaaagagctctcccagccctgggccttccctgggtcattgccctgttagatcttcatagcagtcatcaaggttcgtcatcagactgcgtgacgtacccacttgtttatggcctgcgtcccccgctggagcataaaccccagttgggaaggcctgcacctgtcttgttcgctgcaataaacacagtgcctgtaacggggcctaataagatggctcacgagggaataaatggacccaggaccccacagctgcacacactctgatctcatactttcccactgtgcagtcatgaccagacacttgtcctcttccgcgtttcacacaacttggcttctgcctctggaacaccaaaagccttctccggcatccccacgctggtggttgctacagctgccacctgctgaggtgacgcaggcgagccacggggccatgggagtggcttgcatacatcagccaggcatctttaccaaacttcgtgaggcaggtccttttttagagataagaaatcaggcgtaggttggcagagccacctgcccactatcacactcgggaatgagctgagtagagtttgagtcacatgtggctaccttgagcattgcccgctgttcatacaaaggcttccctcaacatgagtgtcctcctccctgagagttgattatattttgtgtctctcccttcacattgccataaatgtgtctcaaacgctggcagaaggtttccagcacctgccgggttacagaaatatctggcaggtataaggcagaccaggattcaaggcaagggagggccaacccaaactttgtctttggaccaagaattggaaccaggctctatcctagtgtaacgggagagaagccagagactttccaggaagaggacccgggacatggggaagagaaaggattggtaaacaggtggagaaagcagagatgcacccgcctcggcagggcaggtgtgtgaggtggggaggtcagaacaccctgattctgaagcgcttgtcacacttcgctctttgccagttcctgcttctgccatcacccaggtctgatgccagtcaacttctccacagggacattttccctgcccctgccccactctgggtacaactcacagttgctcgccatccactgagcacctggtgccaggatttgtttatggccgtgcccatgtcctctggggagcaaggctaatctctgatcgaatgctgcacaactgggcactttgcctaggatgtgggaagtgcagcacgggcaagcacagggcacacagtgcagtaggtggcagccctgcggaccagaactttatggaacaagtgatctaagagtgtggagatgcacaggagggatcctcgcattctccagtggaaatgaagagcaagacagggatgctgacttcctttctgcagcagagagaggcaggcagggcaggaagcccctatgccatgtcccctccaaggaaagaagcaatggaggctggtggggcagtgctctgtggccaaagagccccgcagtgagagcctcccccataacacagggtccatgcactaccctgagggcagaaaggcagggctgcacaggagacaggcccctacaaaggcaacctgggcatgaagaaattgatgccattctccactttcatctcagaactgcttcctggggatgctgaggctacagccacagaaattggacagctcccacccagatctcagctggggagatggagctgccctccaggcctgggaattcataaagctggggctggaacccaggtctcctgcctctaaatactacaaccctcctgccccgtgcaaaggaggccagagttccactttcgatctgttgcgttttcacaagaataacataggagcaggttgaaaggtggaacaaacctctggtctcttctcaccttcccttgattctaagaggtcaccaatgcagaccgggcaggaacagttgctgagacaagggctaggggtagggggctgatgtctagaggcagagggtccagatccaagccccagcttgagagagagcagggggagcacatcccacagcttcaggtctctgtctgtgaataattcatctctgtgtctgggcccagctcagagccatggagacactcaattaatgtttgatgaattgtcgctgaagatgaacagttctgcagtggtgggactgctgtgaaaagagcagacacgctcttagggcgcgggtgagggttccttttgcccacagcaaggaaaaggcgagagaagcaccgcagtaccaaagggaagagatcagaggtagcaacaggaagggaaggaagctgggaggggaggacttgaggtcagattctgagtttaagtctgagcactgccacttaagccaggtttgatacctcagagcagtgagagatgcctacggggctgatccgagtatgaaatgaagtgatacatatgaatgtgttttgtaagttgcaaaaatcaagcaacttgcattattataggcaaggtcagggtttagcttctgtggaaggaccacgtaacagttgccccatccttctagggagatggatcttgactacctggatcttttgctcttcaaaaaaaagaaaatgccctattgaggcccctgattgtcccgagaatggcttccctgacttcgaggattgtcccaagaatggctaccttgacttccgacctgtttccagccttgtgttaggaatgactgcactgtgatgggctcagaacattgcctgggaatgttgcagggaatccaaactgtcttctgatcagtccctccccagactgtgcctggtccataaattgtcactccccatgctctgggggacaaaccatcaccccaaggggcaaagccacttgctcaacagcctaggcaagggtctctggatttcagtagcctgttcctgcttctctctttaggtcccctttccacatgccccacccaccccacgctgctcaaggcctttttccaacctggtcctggacagtttaaaaaaacaaaacaaaacaaagagaacccagctgctcactccatcatcaccatcattcaaatctgtatccccagttcgtgtatttcatgccccaaaagtcttattttagaagacaggaagctctggggacagggattgcttttacgtgttgctacaccaaataaagctagcatagatttaaattttttcttcaaattcctctttgcatactttccattctagctgtttcataatacttgttcttattcccgtttgcctgataacaccccattgcattcatctagtggttacagttgctgggtgctttgccacaaatcagtctcattgaaacaggtacaggtgtaccttatagatgaggagatggggctcagtcaagtgacaacacttagtggatgagcccagtaatgacatctttcttcaattctagatctgtttgcagccccggttggctcccaccctagcttatgaaagtaacaaagcaaccaacatccaagataccagatttatagtccatgaaagttatacagaaagcgctggagcaggaccagaaatgacgagactattacatttttatgagacagagaaaaggtcagggaagagtaggtcattctagtcctctgttaggagagatgtgagcactgatttttggagggaactcagtgttaaggtcaggtaagcactgagaacatccagaacaaggaagaaataaatcaatctgatatggtaattaaaccagaaaggtcaaggcaattgccagactaagcgttcacataagaaaatatgtttaacaatgtggaataatcagaccaaattcatcgtatttgacttttccttctggaaactttttggtgagggcctggacaggacaggaaccttctacaatttacctatgaaatcagaaacagaccagcccaagtccagcaacatatagtggaaagatcccagccaggatccagaaggtcctttacttaggagttacattaacccaacctcctcactgggccgcgtaaaggtccaggtgagatagcactgaaggtatgtgaaacatacccacctaagttctaaatagcatcacaaacccactgggcttaagcaatgtccacaagcaagtaaaacaggatgggactgaaagctgtagggaatttcagtatcgctgaccttcccaatcttagataagccctggccctgctggcccacaccacctgtccattgtccagcttgggttatggtggcctggtctggccttcccctaggcctgtctccatgagatgcaagaggtggggaagttaagggtcgggcctacacagcttagagagcaaaagcccaccaacagttgggcatcctagacctccaggtggaatgatctacgtcaagttcatccctcctttctgcctctctcctattcactttccccaatttctgtatcccatcagaccttttttctctgcatccaattcactaccaccaccaaaagccgccctttcttccctccttgcctctgttcttttccttctggcccattcgaatccatgggataccagctgcatccttaaataaatgccaggatttcagactggggtccccggtgcgggtagctggtgcggggtaatcactgagccacgcatttggtgggggtaaggtgggcagcaatggctccagagaggcccacaacctttaggagtgcaagatgagggaagggtgttcttggcaggatttaaaaagagagagccattgagttgaacgcccgagagtaacctcgagtgcagacggacctgttgccaagccagtctagtgctgctaaatccaccggctcaaggcctcactcgacctgggctttgcaaaccccaggccgttctccttccaccaatcccggacgccggtccccaagaaggccggctcgagcttggggtgagtctagataatccctggagcgtgggaacccgagctgctgggcggtttttcccaggtggccattgaggaacttcttagacaagagtcccagcaggagcgatctccggccggggacgagctttccttctcgccacccagtctggatggagagtgcgggacaagcgcggagtcccacacctggctgcctgcgctcccgctcctttcagcggcgcgcaggggcggccatcttccccgctgggggcgccaaagccgtctggcccgagcgcccctcttggggagtccctgcctccagacaaaccccgaggaaggggaggacgcgtgggtcccggcgcgcgcggtagatgcttgccctgttctccaccgctgggactttcaccgcagcgccgcctccccgggtcccagatccggtctccaccccagtcggcccagaggaggaggaggattggggagggggtacgagtgcaatagatgcactttccttccctacaggacgtcccaagctccattcagcgccggaggtctgtttggcccacggggagccagggatcctgactccgcctgcagcagagaagggtggctggggcgcccccagacccttaccgttgcatcttctccagcgtagtgcccgatgacccgctggccccccgggtgctggatggaccatttggtgatgttgtaaaccttgcggtcaatgaccagccacctgtcggtgcgcaggttatgcttctgaatctcctcccagctgaaggtgggcaccgacacctcgcgctcggcggccccctcgccctggttccctcccttccccatgctgcctgccgactgtgacgccccgtgcactgcggcctccccgcgccggctgctcgctgcacagacggctgcctcccagccggtgtgtgcagcccgggccctcttcgctttcggcttttgtcttctcctactcctcccaccgcgccccctcccccagccttctcgcctgcgctcgggagtgtccctgccttcctggcggaggatccctggcttcccagtgcccccaagcggtccccttcctccgcccctccctcagccctcccgctatggacttttgcctccagtaaaaactccccgggagctcagggcctcgacacctcctctgcccgcccctccggctccccccgcctcgggttccacatcctcccgcgttccccgccgcccgagtttccacagcgatcagcagagcgcctgcaccaatccggtcgcgtcgccccgcctgccattggcccaggaggatctttcgaaggccagcgggctggagcggcgggtccccggctcccccgccctcccgcgtggagtcgagccctgctgcgaggcaggctacgtgtccgacctcctccctcccccactctccggccccgggcgccggaggagatcctagaggagatcccggtgggggcaacgaatgggctccgcgcgctccggggcgcgtgcgcgcacgcccggcgctctgggggtttgcacctgatgccgacacaaagccggcgcggccaccagggtgccagcaagcggccgggcgggtggaccggcgggctgcggggcactcaactccagggccggcttggctaggtgacgcccttccttggcgcgcggcagtcgagactccagtatcccacattgtccgcgccatccacattctggcgcctttctgcaacctccctagagacacaagccggccttggattagagggctttgaaccctctagtcagacaatcttagaaaagaattgcggaacctctgctctgctttcttggtctgggcgccatggctgcggtgagggggaagggaggggaaggcagaggaagggggcgatgaggaactggcgcggtccttgccctggtctcagtaagctcagtctctttgggaatcgtggaagcagacacatcattgggcagtgatgttgtgcagactccagcaaataaagactgccgtatcgaagggataggaggagggttaggtcttttaggcgtggggcaagagacaggcccctcagaccccagctggatggggcggcttagtgccgggcgtcctgggggaaatgggcctgactgcatccggagggctaacgggacacgtgggaagtaaggatgaacagagagggtggggtgcacgaggcttgggaatcactagaggagttatagggccctcagatttcaatgggatttacaggtgcctgtgtgctagcacaccctaatcattagattctcatcacaggctgagaggtaaacaggacgcatattattacatctcacttgaaaatggagagcctgagattgagagagatggtcaaacgggccctgcccaatctaaatttcacagcaatgcaggggtggtggggggatcactctgcccaactggtggggttgtacttgggggggcagatgggctccctttcctcacattcacacagtccccaacctctcccatcacatttcatgctggtgtcagccctgagcatccttcattcactccacagactgcagacataaagacagtaaggcctctctgtctttgagtgtgagcagacatcccaaacaaaagccttctgtacaaaataagaggatgaagcaagacctccagagagtatggtggccttgaggactgtcaaacgttgacggaaatggaaccaagaaaattattttctcagaaatggattaacataccatatagataactttaatgaacatttgtaaagggtgtggagctcggagcagggagtgatagctgaaaggcagaaccagggagtatctcacagaggctttgaaggttcaggccctaaaagggagcacgtatgggtggcctgtgtagggtggctgagaagcgtggaccggccagggcctggggtccccagcggctcccagcacagtaccagccagggtaggtcctgaaaaaacataaaaacatgtgttgaagacacaaatgaatgaatgaagttcaaagaatggctccaatgaggccggcggtagatggggctcaaattgagaaaagccccagcagcctcagtaaggggtaggaagggaggactttaccatggaggaggcttggacatccgtaaagcaggtgtactgtgatcagatccatggtgtagaaagataactccagaggctggggctggactgggatgtacgggagaaactggggaacagtgatgagttcaaagatgagggcagtgctcgaggagaggggaggggaggcctgaattaagagagaactttagggggctgaccccacactggacactgccatgtgcctccctgccctctaatttttttttgagatgcagtctcactctgttgcccaggctagagtgcagtggtgcgatctctactcactgcaagctccacctcccaggttcacgccattctcctgcctcagcctcccgagtagctgggactacaggcgcctgccaccacacccggctaatttttttgtatttttagtagagacggggtttcaccgtgttagccaggatggtctcgatctcctgacctcgtgatccacctgcctcggcctcccaaagggctttttctttcttttttttttttttttgagacagggtctcactctgtcgcccaggctggagtgcagtggtgcgatctcagctcactgcaacctccacctcatgggttcaaatggttctactgcctcagcctcctgagtagctgggattacaagcacccgccaccatgcccggctaatttttatatttttagtagagacagggtttcaccatgttggccaggctggtctcaaactcctgacctcaggtgatctgcccacctcagcctcccagagtgctgggattacaggcgtgagccaccctgcccagcctagaatatcctttggaggtagaatcaagaccgcattagttggaggtacaggggcaggggtgatggtagagatgaaggaataagagaaataagtctgattctagcatttgagttgagcaaatgaatagataatgggaccatttaccaagatgagggaacagagttagtacaggggtgaaaaattaaaaattctattttaacgttatgtttgaaacacctaggctgggagcagtggcttatgcctataatcccagcactttaggaggccgtggtgggtggcaccatgcccagataatttttgtatttttagtagagatggggtttcaccatgttggccatgatggtctcgatcttctgacctcgtgatctgcccacctcagcctcccaaagtgctgggattacaggcgtgagccactgcacccggccaacacctgattctctcttactgcagaagggtctcctccatgtgacaaaaaaatatggctgtatttgctaagctacgctagcagaaataattctcccccattccctgctcccaaggattaattccagtttaatgggctctgcatcagatgctaaccattgggccactgttatcagacggctgagttactctattaggtgtaggtcataagccaagcagcagacctgggctttggggaacagggtctgttcctttttgtgggaagtcacaaaccaaaagcaattacagaccgctacagtattcctttcccatacctaccatgtgatgttagacctctgtctctgaccttcagtttcctcatgataaaaaggagacagtgatttttctttctttctttctttctttctttctttctttctttctttctttctttctttctttctttctctctctctctctctctctctctctctctctctctctctctctttttttttcccccaagatggagtctcactctatcccccaggctggagtgcagtggtgcaatcttggctcactgcaacctctgcctcccgggttcaagcgattctcctgcctcagcctcccgagtagctgggattacatggcatgtgccaccacacccagctaattttgtatttttagtagagacagggtttctccatgttggtgaggttggtctcgaactcccgacctcaggtgatctgcccacctcggcctcccaaagtgctgggattacaggcataagccaccgcacccagcggagatagtgatttctaacctatctcatctattttaataacgaggctcaaaggacacaaggtatgtgaaagtgccatacatgtattttcttaactagcaatattggtgaggtcaaactttaaccaagctcactagataatgatttattaatatgtggtgaaagtcataactatttttaaaaaatgaataattttcaacaacaaaaatggcatcaacttagtaagtgcatcaaatttagatgccttaaatgacaggctggggaccctatctaagaaactgggttaggccaggcgtggtggctcacacctgtaatcccaacactttgggaggccaaggtgggaggatcacttgagcccaggagtttgagaccagcctgggcaacacagtgagaccctgtctgtacaaaaatataaaaaattagttggatgtggtggtgcatgcctatagtcccagctactcgggaggctgaggtgggaggaatgcttgaaccgcagaggtggagacttcagtgatccatgatcgtgccactgcactccagctggagtgcaagacagagcaagaccctgtctcaaaactcaaataaaataagctgggttattatctctaggtggacattgataaaaggtatggtatgttaggtaaaactttaaagcacagattgctagtgctggaaagcatctggacaatctcttcactttacagataagggatccgaaacccatagaggtggacataatgtccaagattacacagcagtaggtggactagcaggtccaggttgcaggtgtctcaactacaatccttattctttccattctaccacattgcctcccttccttggtacattctactgaaacttgatggatccttctccaactctgaagtgcacagagaatagaatttgagatcttcacatcccagagtctagtgcttcgttgctgcatctttagtgctcatagtattggtggagaggtacttggtcaaggagctgtaggacaccattcctttcctgttctggtgataagaagtgcagtaaaactaaggaatgcatactaagtgctcgaggaatacctgtgaaataattcagcagtaaattggtaatttggcaacaaatgacaagagactaaaaatgttattacctgatccactaattacacatgtagaatttatcctaagaaaatgttcagaaatagaaaccaatatctatatacaaaaatatccatcgcaacatttatacaagcgaaacttctacacaaatgtccaacaatagggaaaaagttaagtatattgggagtatatatatgtgtgtttatagatatatgatgacttactatagtgaagtaaatattctcattataaaattttaagcttagcttttttgttttattttaaagagagatcatttgtactggaaagttacattaaaggcccagcaaaatgcttacaacaacgcctagaggactccagacccattccccgggcaatctgaagatctgggacctacctacccaggcctcccttctcccacttaatagaggcaggtctgagggcctgggaggaagaaggcaccgcagagaagcaaggacaacagccttctcctctttgaaccagggtggccttataccaaaacatttattgaactcactgctaaggaactcatgtagagaggaactaaaagttataaataagttctggggtaaattctagccccaaatatactaaatttcatgtgtggcttcagctctttggatctgtcaccttgtctataaaacagtgggtttaatatatctgtccctaaggcatctatattctatacaatgataagaagactgggccgggcgcggtggctcacgcctgtaatcccagcactttgggagtctgaggcgggtggatcaccaagtcaggagatggagaccatcctggctaacatggtgaaactttgtctctactgaaaatacaaaaaattagccaggcgtggtggcagacgcctgtagtcccagctactcaggaggctgaggcaggagaatggcgtgagccctggaggcggaggttgcagtgagccaagacagcaccactgcactccagcctgggtgacagagcgagactctgtctcaaaaaaaaaaaaaagactgcattaaggaaatcccgtgaattcctccatgagcctgcctctgccccatcccaatctcccacactcttagaatgcagcaaaatgagagtcctgtttctagctctcgctctgcctctaatagaggtatgattgggattctccctttagtttaagcactatatgtcataaattatttttaatattacttaacattaatctgcagaattattacagatgacttttcttaaaacaaagactgattctgtcaactttattagtgcctactgtgttgtagtcactgcacccccataagttatccaatttcacagaaatccagatttttcaaaaatggttttggtctttaatggcctgaagggctgctactgaggggaggctgcagcagaggctgagcacaaccggtattgcttctcctatatgtgttgactttgtaaaggatccaggctattggccaactattatgtttaggatcttttgttaaaatggatcaaaatttgaactcacaattcaggttattccaacagccactggcagttaggttattcaattatggcttcattacaatcggcattaaggtctttttttttcttttctttagagagaaaatggtgggacagttaggaaggggtctcactatgttgtctaggctggtctccaactcctgagctcaagtaatcctcccacctcagcctcccaaagcactgggattataggcacgagtcactgtgcctggcctggcattagggtcttaagctcatttcgttctgttccttgaggattaatttggccagaacagttagtattcacaagtggcaacctaaaattaagtatgtgattcatatccaggatgaggcaagttcccttaggatcaacagggcctgcaaggcaaaggtttcctttagttgacctggatatgggtttattgcagtctgtgtgaccacctgtgtaggtgggtaaggagatgagagggcaacacgacatttgcctagtggcctataggcttactcacctgtattttttcaggttgaaatcatcagttgattcagcaaattttttatttatttatttatttagagacagagtctggctctgtcacccaggctggagtgcagtggtgcaatctcggctcactgcaacctttgcctcctgggttcaagcgattctcctgcctcacccccacaaagtagctgggattacaggcaccccccaccacacccggctaatttttgtattttagtagagacagggtttcaccgtgttggccaagtgggtctggagctcctgacctcaggtgatccgccctcctcaccctcccaaagtgcagggattacaggcatgagctgccacgcccggccaattcagcaaatttatgtgggattccacctagaactccaaaccaaggtgctctgaatatgtattggtagtataaacagaatccacagccctatcctggattataagctcgttagggaggtagcaaaatacatgacactgacctaagaacacatgaaaagcaaagaaacatgaatgcaaagtcatgtcatataagctgtttaaatcctgagtaagatgaatttaatttgcatctatcctactgacctataatccgtgactcacttgtctctctcctccagtagacatgactaggcatgacccatatagtactgaactttgtattcccagcaccttaccaaagtaggtgctgggaatacaaagaggagacaccccacaaatgttaaataaaacacttaatgaatggttctaggtaggtggggttgatcaaggaattatcttacaagtggtatgggttttttggttttttctgaggtgcagtctcaccatgttgcccaggtgattctcctgactcagcctcccaagtagctgggattacaggcactaatttttgtattttagtagagacagagtttcaccatgttggccaggtgggtctcgagctcctggcctcaggtggtccacctgcctctgcctcccaaagtgctgggattacaggtgtgagccaccgcgcccaacctagtctttttatagaacagttatctctgtagccaaacttacatcatattatttaattttccttgattcgggggaggggggagggatagcattaggagatatacctaatgctaaatgacgagttaatgggtgcagcacaccaacatggcacatgtatacatatgtaacaaacctccatgttgtgcatatgtaccttaaaacttaaagtataataaaataaaagatttacataaaacatttttccttgattctgtattaaaggaaagatgacattattttcaatgtctgcaaaatatttcactgatgggcatttagagtgtttccatttcccgctatcatagatactgctttaatgaatattttttgtttataaatagttttctttttttgtgtgtggatatagaatcttgctttgttgcccaggctggagtgcagtggcacaatctcggctcactgcaacctctgcctcccggattcaagcaattctcctgcctcagcctcccgagtagctgggactacaggcgcacgccgccacgcccagccgatttcttttgttcaggctggtcttgaactcctgagctcaggcaatccgcctgcctcgacctcccaaagtgctaggattataggcgtgaggcaccccgcctgacctataaatatttttctaagaacatttccttaggctatattcctaaacatggaattattgggaacatttttatttttctattttttttcatctcttcagtattcaaaacattcctaaattctggccgggtgcggtggctcacgcctgtaatcccagcactttgggaggccgaggcgggcagatcacgaggtcaggagatcaaagccatcctggctaacatggtgaaaccccaactctactaaaaatacaaaaacaaaattagctgggcgtggtggcgggcacctgtagtcccagctacttgggaggctaaggcaggagaatgccatgaacctgggaggtggagcttgcagcaagctgagatcaggccactgcactccagcctgggcgacagagcgagactccatctcaaaaaaaaaaaaaatcttaaatttctatataagttgtcaaactattttttccagtttaatcaacttacacttctaccagcagtatgagagcttttatcccactgcacagtcacataggaaaaatggtttatgtaaaggacctctcttctgttatttaatacccatgaatttcttatatagttgtaatcagcgaacccatactactttgggttctgcttatttcacggggaaggattctatatctatcaatatagttcacattctagccatttaaaatcattctttaattcttcattgtgttaacagatcccaataagcttggcgattttcttattgtcaggactcgggtttatttccagtttttgctattaaattggctatttctgcatctttgcacagtctcccctactttaccaagagtgaaactgcttgatcaaagaatagaaaatgttttgtagctcgcattagacactgccaagttgttgggcaaggtttttaaaaaaggaatattggctgtacagaggtgcagctgtgtggaccatcattcctgagcagggtccaatagcctggcatcttacctggaagtcaggacatctaaacttccctatgggaacttggtaagccccttccccatttcgaacctcaattttcttatctataaaatgaagaatttggatggaatgaattaatccttttctaccagaaatctagccatatttcacctagtctattctgtatcaccctctcctgactcctacgtgctcagaatctagctcagtgcttgggacagttatgtttcctttccctttgaagtgcccaaataccagtgtaatgagaaatatggcagagcctgagagttcagagcacaggccagggtcaaatctcagccctccacttacaagctgtgtgacaaaataacctcccccgggctcagtttcttcactgtaaattaggttaattgttccaacctcatagggttgttaggagaattaaatgagttaaggtttgcaaaacgctaagaacagtgcctggcacacagtaagtgctttataaagtgtttgttgaataaataaaattttggacctaaactctgggtctcttcaggactgcaacagctttgtaactggcaaccccacttttaggtgcgttcccactcctctaaaacccagagatctaaatgccaaatctctctgcttaaaaagtctcccagggctcctaggcgcctccaggctagaacagaaatgcctcagcttgaagacccaggcttttcaggtgaaacacctaagggtcaggagacgctaggatcatcactcaaggatcccagtgaatttttccaaaatacaataaaaataaaaacaaaaagaggcaaacagggttataaaaattgtggggcattttaaatgtttcattgaacaaattaaagcattaacagccctcccccaaccaccaccaagcccaagagaccgtaaatatgctgttcacaagataactgcaactttcaagggctctcaggctgctacttcgggcagcacaattggcggcacgacgtggcaagcaggcagtagtttccaaccctggagggtcagcgtctggagaccccggccaaggcatccacagcctaaagatgatgtccgcgaccgcccgggcagcctcgtgcacggaaaaacctcaaccccggccccgcccacccttcctgcggccaccccgcagccctggcccctcagtccatccactcctgcagcgcggccccgcacccagggcctgcactagaaccgctgttcctaccgcggcgccccctgggagccaacgccgcgatgcccgcctgacgtcaggaagtcgaatccggcggcgacgcctttagggagcccgcgagggggcgcgtgttggcagcccagctgtgagttgcccaagacccaccgggggacgggatctcgctccccgcgccacgaggctcggccaatgggaacgcgcgctgcgaggcccgccggtctgccctgcggtgctgaaaacccggcgcgcaggcggctggctctgggcgcgcgccagcaaatccactcctggagcccgcggaccccgagcacgcgcctgacagcccctgctggcccggcgcgcggcgtcgccaggccagctatggcccccgacccggtggccgccgagaccgcggctcagggacctaccccgcgctacttcacctgggacgaggtggcccagcgctcagggtgcgaggagcggtggctagtgatcgaccgtaaggtgtacaacatcagcgagttcacccgccggcatccagggggctcccgggtcatcagccactacgccgggcaggatgccacggtgagcgcagccaggcgggggcacaggagagggcgggaccggaggctgagtgcaggggagacagagttacgcactccgagccaaacaccgactaattcggaggaaagcccggaggcgcctgatcatacctgttgcccggtgattgggtgtcctgcggatgcgggatgaaaaggcgggagagaggcctggagaagtggagtctggggagtggggatggaggccaacaacacgcacacacaaacaaagggtcccgcctccctgccgtgcattccatctgcagccccgagcctcaggtctctgggcggggacagaaccccgagctgggtaggctaggagggaggagagcaaggatgcaggccgcctggggagggagggggtcagtggccaggggagggagtcacatcctgtctcgatggctaggagaggcagcgcagccgcgtctggacctaggtgccggtctccactcgccagcaggagcggagagggagcaggaaaggagcccattctcgaggatggggctgaaacgggaagcttggggagaccgctgccttggggacccctgcgtcgtgtgaagactggaggacgcggaagggacagcgctggccggggagggcaagcggccgctggcgtacataagggattgggaatggcatacacttagcgaggacccccagagctgttctcgaatcgccggggaggccactgagccgcaggccagcgaggtcttcagctattccgcggagcggaccgctgtttacgctctggggcggtaggcccttcgcggggtcctgtcccttcttcccttggtctcactgcggggtcggcgcgcgccccagccccaggcctgctgcttccctttctagaccacagccctcagagctaaggccccggcgcctctctgctgggttggagtcctggggactcagtcctagggactcgaaagtcggggcgttcccttcaccgcgtttcccccttggcggccagaatggcgtcccctccccttgcatccccctctgatcccgtgccctgcagcgtgatgccctccactgtccctatccactaccctggcgtcccagagtgtgccgcgggtcaccaggttcccataacgtcgcagcagagcttagacgctgcggggcgaagacccgccccaccctctgacgcgaccagcctagtgggcgaggccagagcttgcgcgggtcaaccagagtgaccactcgggagccctgactgcggccaagggcgcaggcgtgtcccggcgcatgcgcagacgaaacaggcaccaacgctggagcttcccgcagtgtgatttggggccgggaatgccgcggcggggacggcgattggtccgtatgtgtggtgccaccggccgccggctccgccccggcccccgccccacacgccgcatcacttacagggcccggggctgccggacctgccaacgtgaatcttatcgccatggaccttaccttgcacaacccaaagtagctgccttggggcagggggtggccagagtgcttagggaaatgtggagccctacccagaacaacggtggagggaaagggaagaaacgcagaagtgccccagttcggacgtagggaagtcttcctcttcgtggtttttggagaaccctagctaagagaggaaagggacttattgaaagacccgcaagaagggacggaagtctcatagccctgagaggtgaagccagctggagttgatgggtcgaatggggacctagagaacttttctgtatctagaggtttgtaaaatgcaccaatcagtgctctgtaaaaacgcaccaattggcgctctgtagctagctagaggtttgtaaaatgagccaatcagcaggacgtgggcagggacaactaagacaataaaagctggccaccccagccagctgctgcaacccgctccagttcccttacaggctgtggaagcattgttcttttgctcgtcacactaaaccttgctgctgctcattctttgggtctgcaaagagtgttattcctttaagagctataacagcgggaaggtccacggctccattcttgaagtcagtgagaccatacccgccggaaggaaccaacgcccgacacagccccacccatctctcctgtttctcacctatactgaaattcttgggcaaaagctgtctgtggacacacccaggggaaaggccagcccaggcaggtgtttcttagtggttcccctcagccaatgcttcccattccttgatgcatccttctaactagagcagatactcggtgatcttaaactgtggacacctgggagcaccctcaaaaggcagctgggcctagggagatggcctgtgcttctgtgtcaggagttggttccttcaggtgggctcgtggtctcgctgacgtcaagaatgaagccatgaaccttcgcggtgagtgttacagctcttacaggtggcgtggacccaaagagtgagcagcagcaagatttattgtgaagagcaaagaacaaagcttccacagcgtggaagggtacccgagcaggttgccgctgctggacgttggggggtgtgagggggagcagccttttttttttttttttttttttgagacggagtctccctgtcgcccaggctggagtgcagtggcgcgatctcggctcactgcaggctccgccctcccccggggttcacgccattctcctgcctcagcctcccgagtagctgggactacaggcgcccgctacctcgcccggctaattttttgtatttttagtagagacggggtttcactgtgttagccaggatggtctcgatctcctgacctcgtgatccacccgccttggcctcccaaagtgctgggattacaggcgtgagccaccgcgcccggccgggagcagcttttattcccttatttgtccctgcccatgtcctgctgatttgtccattttatagagcactgattggtccattttacagggtgctgattggtccattttacctctagctagctaaagagcacggattggtgcattttacaaacctctagctacagaaaagttctccaagtctgcactcgacccaggaagtccatctggcttcacctctcacttcaacttgggtacagccttctggcgggcaggaggatggcctttggtgcgaacactgccggagtccagggggctggctccctcacctttcatcttctcccggcacttgcaggatccctttgtggccttccacatcaacaagggccttgtgaagaagtatatgaactctctcctgattggagaactgtctccagagcagcccagctttgagcccaccaagaatgtaagaccctgtgtttgctatgtcgcaactattggttgttgagggggacagagagggggtggaaggagagtctagatgggatcacagtcatagtaatcacagtcagtagtagctctggggagtcttgaggtccctgcttctcttgcatagtcatgaggtcacaggcccaagggagcatggctttgcaacctatggctcccccaaggctgccactaccatggctgccatcattgttatcatcattgttatcatatgagcacttactatgcaccaagcataaactcataactcttacacatttacagatgagataacaggctcagggaggttaagcaacacagccaaggatcacacagttagtaaatggcagagcaaggacttagtcccctgaactcttaggcactatcccatggcacctcctcctgtcatcctcattgtcgtggtatctttgcctaggactgtggacttcccacagctacctcagtgggaggtccttgagcctgagagggcccttgtctccagtagcattggggtgcagatgagaagaataacagctcctcttcctcttctgcagaaagagctgacagatgagttccgggagctgcgggccacagtggagcggatggggctcatgaaggccaaccatgtcttcttcctgctgtacctgctgcacatcttgctgctggatggtgcagcctggctcaccctttgggtctttgggacgtcctttttgcccttcctcctctgtgcggtgctgctcagtgcagttcaggtgagagcctttggcttgtcaagtgcacagcaatgctcagcatccctggggaaagctccttgggtgtttgaggaaggccaagagtgcctgccctccaagcagggcagatctgaaggtatgcaggagtgagtgcaggaacatgcattctgctgtcttgacctgtctgctctttagccacatggacatcttcatttctctcactgcctttttagctgcttctccaagggttctcttcttcctatgcggtttgttctctgccacagcccacctgtgccaggagccaagtttctggtttcttagcaaagcttggctccctccccaccactgacattgcccaatatgttaataatgattgagcgctaattcttgactgtcaggacccatttggcaagccttctgctcatgtttcagtcctttctgtattctagatgtcagtccatcataagtcatgagcttcaggccaggtgtggtgactcatgtctgtaatcctagcactttgggaggccaaggtggccggatcacttgatctcagttcaagaccagcctggccaacgtggtgaaacctctactaaaaatacaaaaaggccaggcacagtggctcacgcctgtaataccagtaccttgggaggccaagatgggcagatcatttgaggtgaggagttcaagaccacctggccaacatggtgaaaccccgtctctattaaaatacaacagttagctgggagtggtggtgggtgcctgtaatcccagctacatgggaggctgaggcaggagaattgcttgaacctgggaagcgaaggttgcagtgagccgagttggcaccattgcactccagcctgggcaacagagcgacactctcaaaacaggccaggtatggtggctcacgcctgttatcccagcagtttgggaggccaaggtgggcagatcacctgaggtcaggagttcgagaccagcctggctaacatggtgaaacctcgactcttactaaaaatacaaaaaaatcagccaggcttggtggcgggcacctgtaatcccagctacttgggaggctgaggcaggagaattacttgaacccaggaggcggaggttgcagtgatctgaaaccgcaccattgcactccagcctgggcaacaagaacaaaactgtctcaaaaaaaaaaagtcatgagcttcggagctggcgaaacagaagaacagagaagggatggtgatttgccccaactcacgtgtgagtcagtggcagaggcagaactaggacccatgtttcctgactcctgaggtgcatcacaggccttggcagatgaaggaagtgggagaggctgaaggaggcatcgaggtcagtgaaggcgacactggggctggtgggctgctctcagtgttgactcttctcacctaggcccaggctggctggctgcagcatgactttgggcacctgtcggtcttcagcacctcaaagtggaaccatctgctacatcattttgtgattggccacctgaaggtcagtgggatggggaggagctctctaaaactccaggcaatgaagggctgccttgggggaagcttttcatactcgtgtccctgcttttctgtagggggcccccgccagttggtggaaccacatgcacttccagcaccatgccaagcccaactgcttccgcaaagacccagacatcaacatgcatcccttcttctttgccttggggaagatcctctctgtggaggtgcgtggaggtatcagtggaaaggtcttggggaataggaggcagccaacataggggagttggggaagatgcccacgatgttgtcagtgtgggcaagacactggggctgggctggctggggcttttgccattttggaagttctggaaggcaacaggcaatagatgggggctgcccaggagggagtcaccatcctccctagagagttcagtcagcaaaccgttactgcataaaaggcacctcattttgcaaaggatccagcggatgaccagaaggatccaaatgatgagatagcctatccttgaaggtgctgatggcacctcctggaggtgcttttttgacactcttgccccaggcaagtattccccttgcactttgtatttctctcccacacttaggtatccttcttgtcacagtcttctctgtccagggctggactgtcttactcttctttcatgtccaatatctggaacattcattcactgagtacttcttcccaccctgctgatccccagcctgatttcctgggtggtcagcgttgggtttgagatgtcgtctgaagttgtaagcagaaataatgtagctgctgaaggaataatgcctgggggtggagatctggtgagcttttagtgagcattaggcaatggaaggttctaaaaggccagcagaattctttgaaaagttcatttaaagccctttgtcccaaggctgtaggctgcagagttcttccaggtccacctcctccactttgtgacatttcagcttgcgaggaattaaattgtcgttaaaacacatttcagttctaggcatgagttcaaggtagcctggcgttcctctcgcccctggccatgagaactttgaaagggctttggcagcactggttggcctggcatgaggagctcatagcttgaggctcatgccccacctgtccataatgttcttattttcccatcatgagcatggacttgggtttgttacatgtccgataccattatggtcagtactatgcagatgacgaagcagccctgtcccccgtctgactcccatggctgcttcaagggcagtgtggttatttgctgggcagtggcatggggcttgtgcatttctactgtcactacagagggtttaaaaaaaagacatgggcaggttaagtggaagggaacagtctcacaccactacctttattgcttcttggtacttgggttttcaggaaattcctatcagcagacatcaaaaacagagaatgaagggacgcagttggcatgtgcctgtggtcccagctacttgggaggctgaggtgggagcatcgcttgagcccaggaggtgaaggctgcagtgagtatgatcacgccactgcactccagcctgggtaacagcgcaaccctgtgtgtaaaaataataattttttaaaaagattaaaaccaaaaaaaaattgtaaacagagttcaacgtaacttacagattaaaaacagtaaaatatgacagaaactgagaggtagtcatgatcagatatggcctccttcgggtgccgacatctgaactgagacctgaatgatgaaaagggccaacactgcaaaaattcagggaaggaacatttggaacagagagaacagtcaagtacagaggctcccggatgttcagggacagtaagcaatgagagaatgagaagaccagaaaactagggaggggccagatcatgtagggccttagaaagccatggtaagggtgtggtaagaagtttgggttttattccaatagcaatggggagtcacaggagggtttctggtgggtacagcaatctgctttgcactttaaaaggcttgctctggctggaggtggagaggatgaattatagagggtaggtataatcacagatataacctcagtgaggcggctggagcgagtccagaccagaccacggaggagcaggtgaagccaatggatttgggatatgttttggaggcagtgtaagcaacgcttgctgaggacctggatgtggtggtgagaatcaccccatctcgagcaacattaactgaggaaaaaattgaaaaaggggcgcccttgcttgggggcttcctattgtggaactgttatggaaaggagccccatccattgcttcctccttgaatggcaaatgcctttatgatccctataacttgtcccattatgtttagacccttggtggtcagaagggttctatttagggcagtgtcccctgcccctccttgtcctccaaaaattttgggaggcactgacgtggatgtcatggggtcagcacaggcatcaacatccccagagggatggaaccaagcagcctattgcccaggcattcactaacaggcagcccatcctcagcctcatagctggccggggagaagaaaggctattttgggtcccagatctttttttttttttttgagacagagtctcgctctgtcacccaggctgaagtgcaatggtgcggtctcagctcactacaacctccgcctcccgagttcaagagattctcctgcctcagcctcctgagtagctgggactacaggtgcgtaccaccaagcctggctaatttttgtgcttttagtagggacgtggtttcaccatgttgcccaggttggtctcaaactcctgggctcatgcagtccgcctacctcagcctcccaaagtgctgggattacaggcatgagccactgcacccggtctctgtttacaaatttatcaccagcttcatcccctaaggttataagctccatgagggtgggaagtctgtattgttcacctctgtatcctaagcatctagaacatagcccggcacacagtaggtgctgaagaacttgaatctgttaatgtagaaaggatgtttcatctagctgaagtgtcttgtacagaataaactctcaataaatgaactgtggacacatggaagggtgagctagagctctgctcaggggttgagtgctcctcttgtgcccttgtggttgtctggttacctgaactaattggagtgcgatgcagacatagtcatggagtgagacagcagaactttgctgtcttgtttgtgagcccacatcaggggttctagactggctggttgacatggtggccccagcctgtctcttcagcagctcggcttataaaaaataaccaccacctactggggaaaactgctggaaccttcagattgccaaattgttcttggtgtcttttccagaaatatttgccaaactcgaattagccttcaggagatttgataaagctcatgtttaagtcaagagaccaaaagattttgatggggagaattaggggctggatatagagggaatacttaacctgtataggggcagatatggttgtccatggagattctggtgtgaaaaagtacgatggcggccgggcgcactgcctcacacctgtaatcccagcactctgggaggctgaggtgggtggatcacctgaggttgggagttcaagaccagcctgaacaacatggagaaaccccatctctactaaaaatacaaaattagctgggcgtggaggcacatgcctgtaatcctagctacttgggaggctgaggcaggagaatcgcttgaacccagggaggcagaagttgtggtaagccaagatcgtgccattgcactccagcctgggcaacaagagcgagactccgtctaaaaaataaacaaaaaagtacgatgggagaaaggggagagggcagtggggcctggaaacctcatgacaaagagaatgaacacaagagggcctgtggtcctgtagactctgtgctgtgcacatccctcatgtgagcatgggccatccagctgcaggccatggtgtgacacactctgcagattacagtctagggcttcatgttccatgtgctggaggtaaggctgggcctcttggagctttccaatagcaccaacaagctgtcagccctggaggaggcctaaacctccaagcaaggaaaggtcaagtcacagagggaggaatcactggtctccgaatgctcatgtgtttgcttttcttcacagcttgggaaacagaagaaaaaatatatgccgtacaaccaccagcacaaatacttcttcctaagtgagtgtccccatccaacacaggggagctgcctcaggagggaatgctgagggaatgaggaggatgtggctgtccaagggattatggtattttaaggaaaggggctagaggaagtaccccactcccacccccagttactccctgcatgacagcagtttgccatctcagctgagcgaagtgaagttaggctgatgattggttgaaggcaaactagttcttcccatccaaccccagtttccactgggaagctgggtgtttggggtgtagaggggcctcttgctttatcctcaaccttatctttttttttttttttttgagacggagtcttgctctgtcgcccaggccggactgcggactgcagtggcgcaatctcggctcactgcaagctctccgcttcccgggttcacgccattctcctgcctcagcctcccgagtagctgggattacaggcacccgccaccgcgcccggctaattttttgtatttttagtagagacggggtttcaccttgttagccaggatggtctcgatctcctgacctcatgatccacccgcctcggcctcccaaagtgctgggattacaggcgtgagccaccgcgcccggcccctcaaccttatcttaaactttgtcaagatgggccaaggtaacctggtagagcccagtccaacccccagaggaacaaaggtacagatagttctggaaggatgggtcctgaggagagaatggaagagctgttagaacgaagaagatctttctgatgactgccacatattcccagctttaaaagtctgtcccagctactaaggaaactgaggtgggaccatcctttgagcccaggaatttggggctgcagtaagctccgattgtgccactgcactccagcctgggcaacagagtgagatcttgtttcttaaaacaacaacaactctgctccataatgcctaaaatgagctttaaacgcctttaaattttcaaattttttaaagaaggaagggaaggagtccactgatcttattttagtttgaaggaattcatcctaactgcctatcaccaactatcacgaatagagaaaggcgatggggcagaagggtagagcagagacctctggaagaaatagttttagaatccatggcacatcaagatggaggagccatgggtgagcattgtcatgctaggagttatgggtagcatcaggtgccacagagaagggctacagaaaaggaaatgaggaagcatgtagaatgcaacacttcttcaactcccagttttctttcaagagaggcccctctgttccgtcccacagctgacctccagggcttcagattggggtggcacaagcccatctccctagtttaaggaagtgagcttcacagcctgtgaaggatccacagggtccctcccaacacacacacactttcctgctcctgccccttcacctgcatggtggagctgccaggaacaaagggcagatgactgtagggacagggctgtggccaaggtaagtaagagagtattagcacccttttaaaagtgtgggatccttggagtgtgtatgtagaaaagagaagaaaaatgaaaaataataaaggtgtgggagcagagcaagtcccatgcgtggggcctgagttcccaagcacctgtcactgaagagtgccactcgcacccctcaccttccctggcatcctcttgggagtttttgccttccccagacttggatttatgcccaccttcagtgcctgctggttccagtggattgcagagcactcaagcacctggaggggagacagaagggatggttggaagaggcagccccctgctagaggccatctctcccaacatcaactggccctttcatgaccttcctgtgctcatgcctcctctttgtctcggtttcctccccagttgggcccccagccttgctgcctctctacttccagtggtatattttctattttgttatccagcgaaagaagtgggtggtgagtatccatggcccaagaagcccacatccttgtctccagcacccagagtgggggataggggttccccaggggaaacttgagactgactctaggcctaatttagaacaaaataatagaaccagacacagatcctccttatctctaagtgggacgaaatgatttgagcttagcaggcagcctgattcccaatgtgtaatttcatgcggtcagtgtctccagaggttcttgtactgggcataatgccagggggctgagttgggaatggggaagatgaatgagagacaatacctactttcaaggaaacttctgatgaagcagaatgtggttattaatcagaaaagaggtacaggcaataggttctggggactccaaaaggggcctgactgcacctggctttgtgaagtcacttttctagctggccttgaggctgggcagggtttctgacaggcagaggtggagcaggggggatgaactctgagcagagaagctggaaatgaggggtaagtttgaccaccagacatattgtggaggactagtgtcaggggaagagtatggtgcttggttcagtgatgagagatttgatcagggcactggcatggactgagccatggtcctggcagattcatttggcggcatgctgaaggatttagattggctaggaagagctagaggcaaagagaccttgtaggccttggtacttttgaaggggacatgcaagaagggctggggggtgccaatgggaatggaagaaaggagcagtggcactagatactgcaggattggacccctgagaagctgaagatgagtgagtctggataaccaggagaatggctgcaccatgcaaacaaagagctgctgagaggaagaggaagagttgttcgtgactgttatgctcgctgcttttctcactataggacttggcctggatgattaccttctacgtccgcttcttcctcacttatgtgccactattggggctgaaagccttcctgggccttttcttcatagtcaggtagtattcggtgggggcggatagggactggtgaaggaaatgttggggagtgaccagtctggtctaggggccgtgctggggctttgggtaacagtgggtgtttcaggagttggcttgggaaagtagacaggctggagcagttatctgaggggggaatcagaattctgggctctgtgtgtactgtttttgtctgtgtaatacatctaacaggttcctggaaagcaactggtttgtgtgggtgacacagatgaaccatattcccatgcacattgatcatgaccggaacatggactgggtttccacccaggtaagggacagtcactcagaagactggagcataacacaactattgaaaaggatgcgtaggtgaaaacagcaaaaacaaaaagtcccccaaacagcattttctcattagcctgaggctcttgttctgcaaccatgtgaagggagtgaccaagacagtctcatgtcccttcctcagccagctttacctggagaatgctgggctggcctttccatctgatattcaacatgctctcccctgaccttttccgccagctccaggccacatgcaatgtccacaagtctgccttcaatgactggttcagtggacacctcaacttccagattgagcaccagtgagtagggagcctggggaagcagggtcctggggagggtgtaagtgttgggtacaggtgggagcagagaagcaggaaccactgactcccccgttctccctaaagtctttttcccacgatgcctcgacacaattaccacaaagtggctcccctggtgcagtccttgtgtgccaagcatggcatagagtaccagtccaagcccctgctgtcagccttcgccgacatcatccagtgagtatctgagaccaggaagatggctagtagggagggaagagggcagggcaatggaaatgatgacatgtagggtggggagtgaacagaaggtgttcccagtcgtgtgggatggagttcaccatggcaaaggcaggattctttattggacctgtggccaggtcaggcctttgccctcattggggttcccctcagtaccatggcccaagctagctttctctaaagtagaggggaggaaaacctccagatggaagaaggccttaacctcactgctccatctccggtgggttcaactctgcttgtctccctcactgtctgcccccattttgtccctgcagctcactaaaggagtcagggcagctctggctagatgcctatcttcaccaataacaacagccaccctgcccagtctggaagaagaggaggaagactctggagccaaggcagaggggagcttgagggacaatgccactatagtttaatactcagagggggttgggtttggggacataaagcctctgactcaaactcctcccttttatcttctagccacagttctaagacccaaagtggggggtggacacagaagtccctaggagggaaggagctgttggggcaggggtgtaaattatttcctttttctagtttggcacatgcaggtagttggtgaacagagagaaccaggagggtaacagaagaggagggacctactgaacccagagtcaggaagagatttaacactaaaattccactcatgccgggcgtggtggcacgcgcctgtaatcccagctacccaggaggctgaggcaggagaatcgcttgaaccggggaggtggaggttgcagtgagctgagatcacgccattgtactccagcctgggcgacagagcaagactccatttcaaaaaaaaaaaaaaaatccactcatataaaaggtgagctcagctcactggtccatttctcagtggcttctccatcctcatttgcaaacctcagagggataaggcagttgaacctgatgagcaagaattataacagcaaggaaacattaatgcttagaattctgagatccagcacaactcagtctgtgggagctcagctcgctgcccagggataggtatgacctatgtctgccttaggctgctgggagatgccattctccagtttcagaagcaggcagggcaaaggtcaagactgtggtattggggtcttttggctctgaaggatcctggaaccactgattttggtttattccctccagggtctaaagagaacaagaggtgctagctcttaccaaaacagatggtagagagagttgctggctatttaaaaagctctttcatcttttaattcacctcttcttttcacctctttaaccactcctcaggaacagaacacttctaggactgggggtcttttagctccataagcaagtgagcagatgggacaagttagtcttttctccctagaaacaaaggggatgcccagtggtttccctttgcttcccaacctaaaatttcaagtttaataaaatagcaattagcagaagtgaccaaattgggagataattatcagtcatgaggaaagacacagatttcggtcataaagaatgtaagggctataagtagaaactttctataacctaaatgatgttatagaattatttttgagcaggagcagaaagattaaatatgatcacttcatacttctaaatcagaaataggaagattaaaaccacagaacagtttgtgatttctattgctgtagctaggtatcttactctgtccactcttgttcaagtatctaactcttctggaaaccaaataggctttagaagagattatcctatattcctatcagtataatactaaaatgtaactttttaatcatctggtttttaaaagataaacagtttagcccatctctccagagagcaaacataggaatatgactcaggagcctcctagggcttatcatcagccctcacacccgcttccccctccaacccacagcctttgcttccaggtggcaggattactactttgcctcttcagcagcatctactctaggcatattgatcattttagacactgggagaagagaacctcaaactaggaggaaaagacagagcctccacttagttttgggaggggatggcagacagtcaaggagatgagcgtcctaaggcatgttgggatagggtcagatgcaccacccatggagaggtttgtcaacacaaagacatggaaggttagaggtttgtcaacaaaaagacatggaaggttaggtttgtcaacacaaagacatggaagattagaggtttgtcaacacaaagacacaggaagaatgggctgcagaagatttagatgttttccatttgggcacattttacttagctggagaactaggtttaaaacagcctgggtaggaaaattagaagcaagctggatgcagtggctcatgcctgtaatcccaacacttttgggaggtccaggcaggaggatcacttgggcccaggaggtcaagcctgcagcgagctgagatcacaccactgcactccagcctggggtgatagaacaagaccctgtctcaaaaaaaaaaaaaacaacaaaaacttagaattgaggagttgtacctccattggcttcctcactccaaaataggtgctgatccttcctattcctattctttgccaccttttgggtgtggtgtcaccagcctgtttagccaagtagctttgggcataggctgcccaatctgagcaaacaccagtgaggctctattgagccaagaccaagtcctcaaagcacctgaaccactgtggccttctcagcctacagcagtgtggtctcttacatggccacaaagggacacacagtgacaaaaggctcggaatgttacaatggtaaaatgagtgatctcaaatccactgacagatataaaataggcttagagaggaaaagctgcctctggtcaagtagatcatggcagcatgaattccaactcacttttttacaactccaacttctatgtttatctttgttactttcacttttttacaacctggccagaggcattttttaaatcaggcccaatatcagtattctttttgtgtgtgccaattttgttatcacatccctatgaagttgaaaaataaagttaattttgaccaaaagacttcatttgtaacccatgatgttcatctgtgtgtgcacaggattcctgagtgcctctgctacgagttactgttcacctctctgtgctcttaagttcttgaatcactagactcccctttgtattgggcagaggaagaaacatcaggaccctccagaaaacaccaaggcaagggtgaagtatggcaaggaagagcaaggcaaagtccttctgatgactcccgtgttcaaatgtgagattgtcaataatctcaccaagtttcacacgtatcacttcctcctattcatgaggcaatgcccttgcccttttgtccttcagctttccattttgaattattttctctttatttttacacttacttgttttgagacaaggtctggctctatggcccaggctggagtgcagtggtgctgccatcttagttcactgcattctctgcctcccggcctcaagccatcttcccacctcaggctaattttttttttttttttttttttttttttttttttttttgagaccagagtttcactcttgctgctcaggctggagtgtagtggcgtgatctcagctgattgcagcctccgcctcctgggtccaagcaattctcctgcttcagcctcccgggtagctaggattataagcatacaccaccgcgcccagctaattttttatttttagtagagacagggtttcaccatggtggccaggctggtcttgaactcctggcctcaggtgatccacccgccttggcctcccaaagtgctgggattacaggcgtgagccactgcgcctggcctctctttacttttaaactcatttctagtttccaaatagtctccctaagtcctatctgcctaaatcttcctctgcaagtgtgatccctcagagcttgactgcagagcagtgcctcttaaccatccaactagaacagctctgagcaaaaacatttgtaggcatcattaatcttccctgcagtgtgcacacagaaagtcagattaacaaaattctataggagacaaacttaccttcaaaagacaaaagaaaaccactacattcttgaccaccacagggtataagcccttaattattaagagctactgcactgaggcaataactcctaagaaatcttaacatttcgccaggcaaggtggctcatcctgtaatcccagcactgggagagaatggcacacgtaatcctagcctttaggaggccaaggcgggaggattgcttgagcccaggagtttaagaccagcctgggcaacagtgagatcccatctttacaaaaaattgaaaaatcatccaggcatggtggcctgtgcctgtaatcccagctgcttgggaggctgaggtgggagaatcacttgagcccaggaggctgaggctgcagtgagccaagatcgcactactgaactccagcctgggtgacagagcaagagactctgtctcaaaaaaaaaaaaaaaaaagaaatcttaccgtctttagttcctatcaccattactgcagatttagaagcaatctacctgaatcagaaaatagagctcaaataagttgtgtggcttggtataatctgggaaaatcagtttcaaaagttacctgcccttgggatagaactttttgtcaacaccagttttcaaaaagtaccctagttatgaggccgttgctgggtaaactttatcccattccagcttcaaccagaggaacctgtacatcctaaagtttcacataagattacacttgaagaataggtttctccattaaaagacttgaaaactactggtcttcaggctccctacctgtttaatctgtcaagacattgccagcttaaatttcggacagttacataagtgtccctgttaacttcaaatggccctgacaggaatgctaaaacgtcagacattcaaatgggccaagctttatcaggattataaaactttcaaagctcaaaaacatgccatctctatgggaaacagtatcttggatttgatgttacaaaaggaacaagaaaatggtttctgaatggcagctttcagtttacaagtagtggcaaagtaaatgcttggatgttatgaggtagttgatctaaattgtgaggctttcttaaaggcactcctttgatctcatggagtgagagactagaaatctattcaacgtattaaaactcctctcccagcaaaataaaataaacaaaacatcctcctcctaatggctgaagttccatctagctgctatggccattttatggagcatggtgccatcttgtggccactctcaaaccacccattgttaatcaagtgcaattacagcatgttaagagtgaaaaggaaagctatttggagccatggtcacttgggatattttcaaatgttctcaaagaacatgacattttggttacttttagaattttattgacttttttcttcataactttaaaacaaaaacagcgcatgaaaaccagtgtcttattccaaagtctcaactcagctgattgccaggtgaacatcaccatcttactcctctgaataactagacacaaattacatagcaagttcgagtttctgcccacccaagacacagccagtaatcagtcacaaacacagacacagccaactccaggggctccagctttctgcccatcttctctcagcagttcctcccatctgctaagatgcgccttcctggtggctctctctcaaggtgggtcaaggctgaacaagacagaaaagcacagtctaggtccaccatcacctcccactggccaccagttggccagccaggaaatcatttctgtacatcttttgtctcccccttttatctccctctctcttctccaaaacttgttgctatctatcactttcatgtaacaatggacttagtgtccattaaactgcctgagaagtggtttgagcctgacatattttcctgagctaaaaaaggaaaagtacctctgtggccttcttgccattaagatcaagtaaaaaagggactagcactactgaaaagggtcacgctagaaaagccttagaatcctctctccaccccgtgaaggtttctctagctgtagctcttaagggtacaagacggcaaatattctggggtgaaggaggtataatggggaaacacatttattttccccttttaaacttccctgctgccccagtctttgccttcttcttagtggatcccttgggttctggctccttgcgcttagctgaagagagtgagccggtcaccttgaagaaatcatccaggcggccctgggtgctgccttggcggctcttactcagcctcttgaccccactgcggattcgctcctcagagaactgcttttcaccacacatgaacttgatcagctcttcttcatttggctcgctccacttcagctccacagactctgggtccagcacctcaggttccaagaagagctggtgagcctccttgtggagccaattttctggcacagggtacttgttggggtcaagtcgccgcacgatctcctcgatgctcttgtgcttctggatgaggtccacagcccgcttgggcccaataccccggatactctcacagtagtcactgcctagcaggatgcacagatccacaaactgttcctggttcaggcccagctcctgcagaatccggctcaggtggaattcctggattggcagctttttggcttcactggcagtcaggtgtcgcattagcacagggctgccgaaggtgaggcagtccatgtcctcggtagccgcagcatagactttgccagccttcaccagggcagcacagctggcctctgcctcactgggtgcatcaagataagggatgcccatgaggctcagcagatgtttgcactcatcattgtgctgcttagtgaccttcaccagccgcttagtgaatttttccacctcctgctcggccccagcagcctgagcctgctgcagctgcttctctgcctcagcccgccgctcactgcgtttggccagctcgcctgacttgagctgtggcggcttgccatcaaagacatacacgggcttgatgccgttctccatcatgcgaatggtgcggtagaacatgcccatcaggtggctggtggtctcaccctcctcattctgcagcacatccccaccctggcgaacagcaatcaggaactgataaatgctcatagaggcatcaatggccaccttacggccaaagtagctcttgatgtcattctcccggatggcactgggggccacatcagcaattagtttggccaggccttgaattcccatggcaacacagaggagggatgactaaaaaagaaaggcaagtcagagacggaggaaaggagaaaggttataactggtgttatctcaccaacttcatgccttcaactaaattccacacaacaaaaaggacaccatgtcagcactgctaaagataaaaagatgaacaaggtccccattctcaaaaaactcagtctagcaggagaatttactcaatagtaaggctcaacgagtaccagaaattgaaccacgtgcttagagaaataagatactgttgatattctaaggtagcagcattatttattacacaaaaaaaacctgcaacataggtctccatcaaggaccacagaaggccaggatgcttggcctggcttgaggagtccagggaccataatggcagacctgaaagacaggcaaatacaccagctaaacaaacagatctgatttgttttgagtctctggagaaccctgactaataaggcagccttgaaaaaggattgcaaacatatctgaatggaggtgatgtggctttctcacaagcttctctaaactctcttcatcatcgcctcagcacataagagtttctacttttattataatgttgctagagtttcaagtctttccctttgcgttttctcgccaccactcagtctgaaatgttaactccatggctcctccccaggtcctgatttaggggtctggcatgctgtagtcactgggctcaaaagagtattgcacttcagagttcagtgtttcccagatagcagtgtttcccaaatcaccctcacgatttttgctacttccaactaaaacccgtactttcattcacttagaattttttttaaaaaactaaactggaaaactcataagcaataatatttgtgttctattagttatattttaatatgtattaaatgtataactattaaaaaggatttttagggggtgcaatttaaaatcatcttgccatcctggccaacacggtgaaaccctgtctctactaaaaatacaaaaaaaaaaaaaattagctgggtgtggtggtgtgcacctgtaatcccagctactcgggaggctgaggcaggagaatcgcttgaacccaggaggcagagaatgcagtgagccgagattgtgccgctgcactccagcctagcaagagagtgagactccgtctcaaaaaaataaaaaactcatcttgtgcccactgttggtatgtgtccaatactccaagaaatattctactggggccaggcacagaggctctgggcagtaatcccagcactttgggaggccgtggtgggaggatcacatgagcccaggagttccaggctacagtgagctatgattgtgccaccacactccagcctgggcaacagagcaagaccctgtcaagaaaagaaaagaagacaaaagaaaagagaaagaagaaacgaaagactccatcaggccttttcattgttcccactctttcttcacagggttctttctagagcatcaatgactgttcaattcttccttctaattcagtccaaacacttcagcatggcatcacgatctttcatgttctggttcccaacctaaccctacattctgggatctcaacagaaagctggaataaggcccgccttttcccacttttccttagctgtgccctcctctcgccatcctctcacgcgtccttccaggtccatccctggattattaatcaattaataattaattgacaatgaattattcatttgattaatatgaataattcccctgtgaactgcagcggcaaaagctctggccttgaatctaggcgcggcatttaccatccgtgtgacattaccaagccactgaggtttattttctcgtctacagaagaagaacgattaccatgcctgtctctcagggctgctgccagggttaactgagacaacagacagaaacctctaatgtcccctctccaggcctgttcaacccttcggctcttgcctcaagccggccgcgctgctggagtgtggactgaggaccagaccatgtagcccttgatcccctcacggcgtcccacagacaggtaggcaggaaaggggcctaaacaactcaagtgtcagaaatgtttctcgtccaaggtcttaggaaaaatacaacacgaccccataaggtggaacttattaccgcttttctacaatggaggaaagagaggctcggagcttacgcgactggcccaaggctcacagggggaaaagtggcgggacctcttgactgcgaatcccgcgcactccagaccccggctccccacggcccccagcgccaagcggaccccgtcgctcccggaggcgcttcccatggggtctcacctggcctttgggacacgcggcctcggcggctaaagcttggttcggggttgccccgggcaggcggtcctaagctcgctctcccttctcagcttagcggcgggtggcctgacgttcagccgccttccaaagcccgcgctcccgtcacgtgacctgctcgccacgcacagcctcttggggcgcgtagtgcaggctgcgtcccctcagacggctgctctcatggcaaccagtccctccagggagaacagagtctctcagcgaccctggcgtacccttctccaccgcttgtccccactccacccacaccaggtccccgcaggcccctgctccctctacacccgaaatcgcaggactacaagtccctcaatgccacttgcgccggaggcacttccttttccggttgtgctaggcgcctgctcctgccgacgtgttcttccggtggcggagcggcggattagccttcgcggggcaaaatggtgagagcgttgaggggagttccagacggagatgcgaggacccctcggggtctgacccacaccgcgcttatctcctcagacgccggagatccagagggctagacgctcctggaacctccggcttgggctgaagggtggggaagggggaagccccttgccatgaactccttaggtttctcagctcgcgatttctaagggcgagaggcgtggggcgaattttgaataccttccagtttgtatatctctgttatcggtggtgtgttatctttatttggaaagttcttctgccgaacccgtgcccatcctacaatgccctgggcaaatgtttattggtgaagcacttccaactctcaggcacttggccagactttcctaggagcgcccacagcctctgtacagatctctggccacgttccatggacttctttgttttcggccacgcctcctagtgaccaccgtctgacgcgcatctagctctgggatgatgtctattcatctttgtattctcagtgccaaacagagggcccgtaattggaagctcaataaatggcagtgattgtctttatcattttgggggaagggggccgtgattgtttactgaattgaattccagtgtctcagaacaatgggggcagtttacttctctagagttgttatgttctggattttagaagcattggctgaccggtgacaatgaagttaacatttgtacagatctttacgtttacagccctctttcataaaagacattatctcatcatcttccctacagccttaggaaggaagcaaatacctgttgagcaaaatactccctgctaggcactagatgctttgattcatcatctttcttatttttcagttctgtgaaatagatattacagtcgctttactcagactcagattactcagaaccagaacttgaatgtcttgaccatagctcacaagattccataatagcataggtagtgaggaaaatactgaattagaaattgagggccaggcgcggtggttcactcctgtaatcccagcactttgggaggctgaggcgagcggatcaggaggtcagaagttcaagaccagcctggccagcaaggtgaaaccctgtctctcctaaaaatacaaaaaattagccgggcatggtggttcacgcctgtaatcccagctgctcgggaggctgaggcaggataatcacttgaacccagaaggcggagcttgcagtgagccgagttggcaccactgcactccaggcactccagcctgggcgatagagcaagactgtctggaaaaaaaaaaaaattgagcctgggcgcggcaactcacacctgtaatctcagtactttgggaggccgaggcaggcagatcacctgaggtcaggaattcaagaccatcctggccagcatggcaaaaccccatctctactaaaaatacaaaaattagatgtggtggtgcgcacctgtaatcctatagtcccagctactcgagaggctgaggtatgagaatctctagaacccgggaggcagaggttgcagtgagccgagatcgtgccactgccctccagcccgggcgacagagtgagacgccgtccaaaaaatgagactccgtcaaaaaaaaaagatattgagatctgggtaccaccagtcagtgacttatagcgggggttctcagcttggtgtctatagacactggtccacaaagctccggaaattgtaggcaaactttttcttgtatgtggtttttctcaggcagagagttcgtacctttagtcacgttttcatagtggtcagattattggcctcagaaaatgctaataagggccattgatctgcagctacatttccgggctaaaatcagcctctgtttcacggcagcaccaggctccttgataaccgcatgttctctccaggctgaaatcgtgggattctttgatagctctgatctctttccctcctctaggagctcgaggccatgagcagatataccagcccagtgaacccagctgtcttcccccatctgaccgtggtgcttttggccattggcatgttcttcaccgcctggttcttcgtgtatcctttcactgagcagccagaggaccagcattagtgatgtgggaagctcagggagaaaccacgctaggtacatggaccccgccggttttgtacattggattggggctgagagaaggtaaggaggagaggagggctagtgatgcccaggggcaggttatagccttatttcccaagttcaggtgagctcagtttgttctttggatttccaggacagtgagcaggggacctggctggagtggaggtggggaataggggtgctacagttggaaaggtggtataaggaagggtgcactcaggtgtcaggaggtctgagggctagtcccagctccggccctcatgagctgtgtgacctggggcaagtgacctaactcctctgggtctcattttcttcatggcagtggagcaccagagtccaaggcatctcttaggcccctctgcctggctgctctgagccagataggcctcccagaaggcattgagccaatgcttttctcctcagattgccgtgggctgggctctctgcactccacagtccaccccttcgctttgccttaactgctgtgcccagttacgaggtcacctctaccaagtacactcgtgatatctataaagagctcctcatctccttagtggcctcactcttcatgggctttggagtcctcttcctgctgctctgggttggcatctacgtgtgagcacccaagggtaagagctgcaatgggatggatgcgtgagcctccaaggcacagcccagggaagcctccccagagtcaggtcagcagggtccttaaagctcttaccagcatgaccccttggttgatggagacagactcagtggaatgggtagggacactagacatttgtgcctctttccctgcccctcatacggatttgagccaaatgtgactctcagttctgagctcacatggcccaaggcctcgatctgcctttgggatgtaccacctagaagtgtggacgcaggcatcccatggctgtacatttacattcttagaagtcagaccccagtgacttggagaggctgctgggaagtcagctggctgaaagggggtcaagatccagggcttaaaacttgctgcagacaatccaccaaacaggccactaggaatcagctctggtggctcatcctcagaggtgtgtgctcaatagcccttgccccaggagcacaggggtgcagggagagaaggaggaaagaagggccattggtcttattttgatacccctctcctcttttaggtaacaaccagatggcttcactgaaacctgcttttgtaaattacttttttttactgttgctggaagtgtcccacctgctgctcataataaatgcagatgtatagcagtcctgtctggggcccattctgcaggggtggtgggtgctgggacctacattgcttccccaatctcttccctttcccatttctcatctgcctttcacagttcctgctgctgatctacttaagggggatgagatttgtgtagcaccggtgttttgtcattggaatttaaggcttacctgtggatagggtctgggcctacccttttctattgtttctaggacaaacttctctgggaacccacatcggtccattctgccctaggccagtccctgccataaacatagccaccattctctgtgctggggcatcctcaccaggctcagcttctccccctaagaaggcttttctcctcagtggctacttttaatgcaggtgggcagcagcgggtgcgcaggaggggaaggtgtggccatgggagaggctgatgagtccactcctagccccaatatgaagctaagaggataaggggtatgaagcatccatttggccctctggttcaggcgctcagagattccaggcttctcaggaagaactttgaattccaattggccctagccttataggtgactcctctcccaccagaccaatcccaagaagagacaaggaggcaagctcagatacaaagcagtatttatacatttatttatatatgtatatttacttcagaagaaacgaacatttcggggacaggaagcaagcaggcccggggctgcttccctcactgcccacctcagagtcagagttggcacatgacaaataccaagctcagggagaagaactgggagttaactgggaagtagggggcgctctatgcacacgcaggcttctaagggtgcacggtatgggcaggaggatttgcactgggaggccctatgtacagcttgaagctagggggagattagcccagtgactacaggaacaaacgccaaaggagagagaagaagggagggatgacctgctggaccccagggcagggacagggccaagacactcacaccattgccagccgggcagctggcagcttccagcaggtggcccacttaccttccctgaagcccttttaccacaggcttaaggcaactttggtccaaggttgaccccctcaagcagcttggatccccagcctgtccccaactcctgcactgaggaacccctccccaggcttggaaacagagccagctgctaacggttttggggctgtgctgtgtccagatgggctccatggggcagtggacggtcactttccagttaaggactgagggcccgcagtccaagaacatgaacccccattgaggaagcccaggaatcctattacatggagtggggctcggcagttttaaggcatagggaggattcccccagtgggagggagaacaaagtcatcataaggaaggctcagcccctgcatggtttgggaatcgtaaaattcctatgtcaacggaaccaaattggggagggggctgggagcaagctatccctgctattcctgcatccccctgctcttccctatcctgaggacaagtgctttgagatcaatggcaaaagggggcctgcagttcataggcttcaaggaaaggcctccactatagaaaggcctcccattcaaagctgagaatgagtggtgggacaggggcaaggcctgcttcccaaagaggtggcagcataccacagggcaaggacagcaattccctttcccatttctggacccatggcagacatggctaaatgaatactacactccttccatgagcctggatgtagcctcggaatgcaccaggcaccactaagaaacttgaaggtggcacttaagatacaacttcttccctaacccagggtcttggtggttgggagtgggatgggtgtcggaggctccctgggagggatcagagtcagagccctgtctttgcaagtgtcacacccctgctctggcccactctgagctttctagctccatccttccattccttcctgccctggtttaagtgcatttagtaattacttcattaataacagcaaaagctatttgcatctgcccaccagccaagaccaggctgctgcttgagggattcctgctcctctgctcagagagaatgatgtggtcactgatcactgtgagctccagacgctcccaggaacgcaggcagtgaagctgcaataccatctgggggctcaaagggaatttcctcttcctggatattcctggttcaaggctctagggcttacctggcccactggcccctactggttcaggcctgtgaagggctgagggtggcttcaccaggcactgagtagacttaaggcacaaagtcagtttctccaacccaggcagggctggcctcggctgccctgggacttcttgggagccaagccctcccagggagaagaaacctcctgggccacacttaaagcttagaagtccgagtctggcgtaacaggcaaaccccagaaagtccactaccaagccatcccccagggaacagctttaagggggagagccgtctgccctccattgactcatgggggtccacccaagtctcttagggctggatccgagccccctgctgatctcaaaggtgggcaggtcctctctccaaaagggttggctccagtctcaaaaggggaggcaagggagaatgggctctgaacaaatcagggccacaggcttccccttccctccagggcacctgaaccagccctccaaccaccatatctggaaagaggtaaactggtcctgtcctggcccctagggggtggcaggcaggaaggcccaagaagtctctggctctcaggttccctctgtgccgtgaggggcgaccagctggaacagcaactccagtgtgaagacttccagtttcaccagtctcgggtagggccagtgaacagcagagctggcctgcagcgggctccagtgtaacaccattgcatccagtgttggggggtgcctgggcacccctggtccctggtgtggtgctgcctcaggagggcagctcagtcacacaggcggtagaagtggaagtggtagtctgtggctggctgggcgagagcctctgaactgcagttggcctgaccctgggtggaagggcagtgggaaggtgaggtggctctgggggtgcggggcagatggcactccctgctgacattgcttgacactgtgcccccagccctaccacatactgtgcaaaccccccattcctcaagccccacgtcgcagacaggggtgcccagacctccagggtaggtgggatgcccctgctcaccagcagtgccacccggaagtggtaggtgaattcacggaaggacaggatggttattggccaccggtgagaggtgccctggagagaagggagagaggggtcaggacagactgctgcccttatcccaaccagcatctctcaccacggccgtcgcagtcctggggtctgtggggagttttatgaaggaaaaaagcagagaactttgaagagataggaaggagcatgttctgctttggcagaaggagcaatggcagctactccatgcagaccgtgcccgggactggcaggtccacagccacctccacctggcccctgcctccttcccagtcctgttgtgctgggttccctcacccactatgctctgggcacatcaaagtatttcattagccccatcctcagtacaatccagtgacacagtgctgctactagccccatcttctggatgaggaaactgagccacttcctaaaaatcacacagtgtggcaaaatcacacagctgggattcaaacccaggtctgtctggctgtctccctcacagggtggcatgcagcctggctgcaggcagcttgcccatctacctgaggctttggctgtgcgtctgtgatgtggtttcaggcccgagcaccatgtctgctgtgtgtctagctgggctctccctctgtcttggaccctgtctcttctgcagggcgacagggctcgggcctccctcagaagcacccccacctctgttgcaggtgctttctgcacgtcttttctccctcactatagagtacgttcttggaagtcaaaacctgtgtctactccacctctctcccctgcagctaggcccacccagcacagggcctgggacagatggggccccaatcaatattttctgagtaaacacatgaatgggcaagaaaaaataatcactacttcccttcatttgtcctgagcgtcttctcccatggcctcttaggctcaagaagaaactgggggtccatcagccccagggacagtcataacttccggttacctggccagggaggagctcaccatccagttctcccagaagaggtggccaaacatggaacctgaggggccctctgatgctgtacatctagctgtgccacttccccaacctgagcatgaggtcggctccttcctgcttctgcagacacctccagtgagccacagccctccccgccatgggctcccagacacctgcctgtttccatcattgcactcatccacattagcacctgtgatctgctgtcttccccacgtctccagcacggcagggctgggagatgctcagcagagtgcaatgaacaaacacgggcacgcgtgcccctccctgggacacagaggcccaggccccagagtgtcccttgtggagaaggctttactctataactcccagcttctgctccttgcccattttggggcccagttgtgccaggagagaagcagctcgggcctggccggcccgcagcttcccagtcccacctacctgggtgtcctggtgggtgtggagactctgtggaaggctcccctcctcacatggttcctcctttgacctcaggctgcacagcaccacagacacgggggaggaggagctgtagacaggcccagttagcagagaaatgaggttctagagtccctcaaccccagccccctcccagccagcctgccacacgcctctgaatctccacccagcctgaaacaccgcataataaccagggccctcgaacaaaacctttcccatcgaccatcccatgtggtcctcagcccatgaggccaggtcatttagccagttaaccacgaagtaggcaatgaagtcagcacttatcccaccatgcaggaaataccagagactctccggctgtcctcagactcggctgttctgaggctctgcgggagattctccctggctcccctcctgcctcccacttccccacaccggcactcacttcatctgcagagtcaggctgaggtgcagtggggtgccactactgacagggatgtggtaggtgaagttcccaggcctgcaggggcaaaactggcaccttagcctgagggtaccctgccaccccccacccccaccagggactcctcagcccccaatctgtactggagccctccagaagagacagtgtccaagggtagcctggaaaggggctacccttccttatgggggaggctcctccctgaaagggcaagttccgggtgatctgtaccacctgggctcatgtcacctgaggacctccctgggtgaggggagggagcccagcccacctgcaggcatcccctggagcacagtactgggaggtgatggacatcgaattctccagcacctggatggaggtcagggagggcactggctctgcaaggagagaggctgttggggcaggagtaaggtgacaaggcaggacacaaatgagaagctggcaagtctttccttgccagacttgaagcagtcactcacaccttagtatgaataagttccaggttatttttttccagacctccacaatggccagcatcacactacaccctttcctcagcagccctaggactacccagttcccatgagcctgacgtctgcctcctcaaaagaactggaacacccagaagtagggatgggtcttcacatcccctgccaggtgtgcaggagcccgctcgaggcctgtgttcctgactgcgggcatctctcccagttctgggttcagaaacatcagttacactggtagcttgaaatcagcagtgttgacagcatcacacaaatcaggctcccctctgccccgaggccgatgattacaccgctaccagcacgctgctcctcgcagcctccctgaacaaaccgactgcaggctggctggctgggtaggggtgggactgaagtgtgacaagtcagatgggggagacaggacttcttgctcatctagttcacatacagtcttgctgctgcctgactatccacccaggaagggggaagctggggccgctgaacatttgctggacctggtacgttttcagctctgaggcatgacccagggacccaaggaccccaacaggatccaggacaccctgtgtggtcaggacaggtatcagatacagacgagatggaaggtgcccttcccacatcccttctgggcaaattccaaaggtcctttaaagagtcagctcaaatgtcaccaactccagagaagttttccctgatcctccccaccttcgtccggattaagtgtcctccccagtcccaaagctacctgcatgtcccctcagagcctcatcacactgctgtgttttcatctctgtgaggtctttggggacaggggcgtgtccatcttcatcacccccagtcccctgtacagagccagccacagagtggcaggcagctcagtaaacaggtgcctggcaaacatctcccccatggggttcccccatcacattgaatttccatctctgtaagccacattttccaggctttctttttcttgaagccacaaaatccatcagatgaaagttggtgagagcagagctgcctggttgaagccaggaagcctcccagcctccccttcaacccccagggcagcccccagcgcagcccccagggtacctcagaggaacccagtttgaaaactacaataaaaggttctgtagctttgttaaaaccaaagatccaaggtttgggaaatagtaggggagacccagtatagcaccctcctggtgctggcatggcgaaggaggagccaggctcgggatcaaatacaagccctgcctcggaggggctgtataaccctgggcaggtcacttcaccttagtctccatcccatttcttcagctgaacaataggaacaacaattcctttcttgcaggagtgctgtgaggactaaatgggatgatctatgtaaggctgcaggcctgattcctgatccttattctgtgctcagcaaacgtctattgactgacaagtctgaacccagacagtcacatgactgggctgaggtgggccctggccagtgagccttgccaggctgggctgggtagtgtcaggggtgcagcaagtacctgactggccctgggcccaggtgggctcagcagggcccacgctggactggagggcccctcggcgggcccggccatggaaaccaaggctgggactgttcttggctttgccctgccccccagggaaggggactgcagggctggccagaggctccagactcttgtgatgcttggagtggccaatgccattgactgaaagaccccaggacttggctctgatgttggtgactggcagaagggccatctggctggggcctgtggatagaaccaggcacaggctaagaagctggaagctggctgcttcctgtccagctgtctctagggccccacaagactgagtgaaccccatgtgtctcttggtcctctcaggggaacttcccagtcattgtccagagcctcgttctaggctccaggagaccctcccatcaatgagtatttgggcctttctctctacgcaggtagcccccgccccaagccccagcccacagaaagccttacctgagcggttggtgctggggctgggacttgggctgagaacatggccagggttaaagctggggccaagactaggaccagtggtagggttggtagtgggtgaggaacagcagatgacagggcaggggtggctggaacacatgtccaaggtgcggacagcagaacctggggccgagctggtgaggctggtggtcactgaggaggccagaggctgtatgagccagagaagccccaaagacagaacacagcaacctccctgtcctacccagacctgcccagacacgcacccagcagcaaagagggctgtatgcctggtagccccgtggtcaagggggactgtcggagctgcgtggtcccaaagctctggctggacctgctggggaaggatgggctgagctcagaggggctgggagagcttgaggggagagggcctgacagtcctggagaggcaggagggcaggaagaggcagagagggaggggagggaggcaggaagaggggcagcaggagccagaggagaggggcgctggtcagcacgtaccatgggcacaaggcctcactccccccagggggctggggccggagcagggccaggagacaggaagtggacacggcaaaagagctaaggggcagcaaaaaggcaaagggtgagacaggcaaaggggaagagaagagaagacacagtcagaggtggccccaggagctgggggtgacagtgggctcacagagcccaaggccctgccctggccctccttcctcctaccccatgttccaaccccagcccctcagacagccctgactcgcaggcccagctacctggaggggcactaaacaggccagacagaaacatcagcgtcagcagggactgggaaaggctgcccaccctccaaggaggccctccctggatccccacagcaccccagcaggctaagaggctaaggatgaactcctttagagaagacagtctcatggctctctgacctgggactgcccaccaaagccccacctggcctggcagcttggcttggcctccaggaacctacccatcagtgtctaccaggtcctcctctgtgcgcaggctcagcacgtacagtgtggacatggacaccacgctggagccacagaaaagggtgaccgttagagctggagccaccatccagtgccctctctctaggacaaggctgtggtccttgctcctgaggctgggctcccaggtgatgcctacaaaatgggtcaccccagaggggaagaggcagaaaggcccacctcaccgagacctcagctgcctgatctcccaagctacatcctcctcttcccccaggcctgagcccatgggcagctgactccactgggcagctccactcccctagtcagccaccatgagagcccaggggacaagtcacctgaaggccatgaccaccaccagggcaatgatggttccctgcaggaagcgctggctgatgcaggcctggtccggaaccacggacgatgactgaggaccaagaggaaaagtgcaaatgcaaagagggccaggctgaggctgtccccagtgggctctgctggaggtcggaggagcggttaagggggtgccccatttccccgggggcaaagggagaagaaagagaaacggggctgggagggctacagagtcacaaggagagggaagcaccagaggcagtgaggctggagaactgcaagccagaaagggaggccacaagggaggccccctttccaacccgcctgccatccctgctcacccctaccttgctggccaccttggggggcctcttcttgtgggggacgctgcccgcccgactgaactggctccctgcatggctgcagcaagagggccaggatcaggggtgtccctgggaagaagggtctcaccttcccccaccccgcacccctacctgaaggcgcccgagctgccggtggacttgaggctgtcgagccgccgcagcttggccagcttgtggctccagcgctccagctcatcaatgcgcgtctccaggttgtctgtcagcttgcacagctccttcacggcccctacgttctccatgaagatgcgctcctgccatgggccatgggccatgggccatgggccaacacagagggcccagtcagccccgggagccccaggctgccagacatcagggggcaggaggggcggccactgtccttggccactgggaggccctcaaagtctccctacctgggcgggcccctccaatccagcctcggctcccacagctcctgtgcctgtctccgagcaacacctccacctctgcaccttcacctgggctgtcccacctgcctgaatggccctccccactccctgccagagctctcctctcctaagcctgaaggctgcagccccgggatctgcccctcggatgactggtgtctcagatgtcagcacttcactattcagctggggtggagacctattacatgcctccttggcgcccagactcaggacaggtaagtgacaaacgtcgtcctcacaataaaccacgtatttcagcctggaggtaaccatacgaggatgtctgtgcagttctattaccgccctcattttaccgggggtggaaggccatggccctccacagggtttctcttgcccttgatcacacaggctccaggggccaaatccctacccactcatctccttgaacactcaccccttccctgtggggtgcagagggcgctctggaggcagcatgagagccgagggtgctcctgcctctgctttgcagtgcccccagtatctatggaggtgatgagtgttccccagctggctccccacttgcctctgggctccctcccattcccccacccacagaccttgttcaccaccaggaagttctctatggttttcccattggcaaagaccatgtctccggtgtctttcacagcctcaggcaagatctccttcacctcctgagcgatgacacctgggggcaggggacaagccaaagatgggtgggggggtggtaaagggctactcacagctttgtaatgtacagtgggagcaagactggagagggtgaagttctggaacccagagatttggattccaaggagccctggagcagggagatcccacgaaccagtgttcacaggattgcaattccagggctcaggtgtgaggttcctgggctggggtggggcggattcctgggggtaaggatcccagggcaagtgggtagtattctggcaggttaaaggtaggattcatctagcgcgaagggcgagggtccctgggccgtgattctcagatttccactgacaatggggcgaggttccggggacctggagaggtgcgattttccaaggtccgaggggcgggacttctagaaggcatgattcccaggggcgcagttccgggagtcaagaggagtaggatttccaggtgacagggggcaaggtcactgaggcccgaggtttctgggtttccggaccccagtccgcaccagcccggtccctacctgtctctggcgcggtggcctcgatgcccgcgctggcggcgaactcgggcttgtatctgtagtgcaccagccgcatgcgcgagatcctcttcaattgctcggtggtgtccacctgcggggagccaggcccgggaatgaacccctcctgcggccgtcccggagcaggccccggagcccaggagggcggcagcctggaggctgcagtgtggagaggagaccccaccactggagtggttagatcgggattcgaggccagcctccctcccttccttcccccgcagctccgcctttccgcgtagtcacgccccctccccaggagccccgcccccgcggcccgctccagcgtctggacccgcccggcccccacagccctgtccccacctcctgcacgtgttccttggcgcgcaggtcggaggggtgcataagcgagcccatgaccttgacattcccgtgcacaaccagcgcctcatccggccggtctgtgttgatgcccacgcggccgtggtggaagacggtgtcgggcacctgtgcccgctgccacaacacatcgctgtcgctctcgaactggcctgggttggaggcctaccgcgagttggggctggatcagtcctgggggatagggaggggacctgcagggccctgggagcagggggaaactccacagcagcccctccccttccagccagggtttctcactgcaccaagcccaacttgaactgtccctcccactgtgacaactttttgtcacttgtgggatcccagaagctaccaggcttcgtccacctccctgctttactgtggagaccctgcagcccagagagggtgggagctttgcccaaggccacacagccagtgcctagcaggatgagcatgcccactcctgactctcagtacccgggtacttctgcttgctgtttctcccagtcctggggagggctgtctacgccctgggaggaggtggccctcacccgcacaatgatgcgctctgagatctgggcggccagcgtgtagttctggttctgtgcatgagcctggagggccaccaccagcatgaagtacctgggacacacaggggtctcagaagtactcatggcctgcccccgcccccagggccaccctttccctggccagatgcatgttcatctcaccccctcctacagaggaggaacccgagcctccaccagggggcagaaattccccagggcccacagcaagaagccagggctgtttctcaacccagaagccaggcttctgctcttcccatccttaagtcaatgaagggctctaaatctcaggtctctcatctgtgaaatggctcagcctgtaggactctgtgcctggtgtgccacccagggcagtgtcttcctgcctcagaaatggaggggctccggggcagggcccccacctgctcacctctggtccgggttgggcttgcccttcttacgcatgttgttagcggtggtctcgctgaagtgcagccgccccacagtcaccttcgtgacctgctcagggggcagattgaccctgcagaggagaggcagggtgctcagggggcagggagggaggctgcaagagccacgccactgaggggcacccaggccagcaacgtacatgaggcggacaccctgggtacctccctggcccctccattcccaagccagctttagttgtggacccttctaggtaccacccccaacagggtcagacactcacgtgaccgggttgaagggccgcttgctccggtctgactgggactgctcgatgttaatggactggttcagggcctccagctgtggggagtgaagccagtggcacctcaggatggggctacccggctggtcctgccctcctgccccctctcagccaggcctggcccaactagagctcaccaggaaacagggcagcacccagccctcagccgcgattcccacaagctcagatgccttctgcatggtcacacccccccacaccctacttcacacccacaccctcctcacccctcacagcataccactcccccaacttctgcacagctacgcatgcagtcactccccaaacacccacacccccattccacacccacacgctccccccacctctgcatgtatgcactcacacacagacacacacacacactcacagccccaccctccctcatgtccatacccacacacctcacagcagcctccaagcccatccacttgcacctaggcccactcactccccagatcctctccatacccacgtctcctctactcctccacgtgcactggcagagccatgccaaggtaccatgcctggctcactcatcacaccgaagccgacagacccagccatgcccacagggagctcatagactcaaaatcagccactactggggttgtgctgtggtgcctcccaatgggtcttaggggaggggcccctggggaggggaccagcatggagtctgcctggagaggagggatgggtgttgggaagggcatccaaggcaaagggagccacagggtggagggcgggggctgcgatggtaccacaagtggcagagctggagcggagggcagggcccccaaggcccccgtggtgcagcttggaagccggggctttgctgggaggacactgggggccttggaaggatagggagtgctgtggccccctgagtctcaagtggggcaggagttgggggtcccagctgctgtggacattccgacaaggaagggaggtaacccagaccaggggatggacaggaaagaggcgaggaccggaccaggtagagggatcttccagggcaatagcaaggccagatgcatgatgaggttggggaaagagggccctgacccagatttgcggctcaggtaaccaaggccctgcgccccattccctgagaggggagcccagggtgggaggcaagtgtgcagggagtttagtttgggacctggagctgaggcacctggtagagggcccaggagatgggtcttgactggggttgcagacttgggaatcacaggctggagcaggaaacggggcgagagggaggcagggaggcaaggaggcacagagtcagggtaaggtgcccaacgagagggaagcaggctgaggagtctaacgtttaaggggcaggcacagggcgaaagggaggcagggaggcaggttgatgagcccaacaagagggaggcaggcgcagggcgagggggaggcaggctgaggggcaggcacagggataaaaggcgggagggcggggtggcagtagcagtgggggagtttacacacacatacacacacacacgcacacagatgcttgcttttttttttttcttttttttttttgagatgaagtcccgctctgttgccaggctggagtgcagtggcgtgatctcagccccctacaacctccgcctcccgggttcaaaggattttcctgcctgcctcagcctcccaagtagctgagattacaggcccgtactaccacgcctggctaatttttgtatttttagtatagatagggtttcaccatgttggccaggctggtcttgaactcctgacctcaagtgatctgcctgactcccaaagtgctgggattacaggcgtgagccacagcatccagccaacgcttgctttttctggggtctttcagtgcccccaaagggccctcctgccctcccttccttgctgagccccaaacttgccttcactccgtgcagcttcagatagaagcagtcgaggggcttgaggccctcgggcgtcttgacgtacttgggctcgcccagcatgccgatgtacactgtcacctggaagtggttcttcttctggcacacaaaggcgtcgtcgcccaccgaaaagttgaagcccttgtccgcatccacgcggtaggtgagcatgggcctgggggggcgggtgagggcactcccctgaggccccagagccgggcctggaacatcggttcctcctacctgctgggttccaaaaccatttcccacaccacacccctgcatcctcaaaccaccaatgcggctgcccccactcctgagaaatggaaactgagtcccggagaggattctagtacagggctgcaaactcctcagacaacattctctcctataccccatgccttaggccaccgccccgccctggtgatgggggaagcagggccagaccctgaggcccaccagactggagggaactcctgagtgggggagggcttgactgccctccccacactcggctccttcccagaaggctgcctgaagccccctcactcacccgagagggactgtgtctgcagagcctcacagcgcctgacagctagttgccctggaaacggtggaaccaggcgcctgctctgctgcagacccagcccctgcccaccggcttgctcaagcccccagatgccctcattcccactccctcctcattcctactccctccgtctgcccggggagggaaggggcactcctggactctccctcagactcagcctcagtttgcccatctgttgctgggtttagtgtcccatgtttggcccctttgagacacctctagttgacagtaaaaagagcaactgggccaggtgcggtggctcacgcctgtaatcccagcactttgggaggccaaggcaggcagatcatgaggtcaagagtttgagaccagcctggccaacatggtgaaaccccgcctctactaaaaatacaaaaatcagccgcctgtagtcccagctacttgggaggctgaggcaggagaattgcttgaacccaggaggcggaggttgcagtgagcagagatcatgccattgcactccagcctgggcaacagagcaagaccctgtctcaaaaaaaaaaaaaaaaagagcaactgttggcctgtggcttagcgcaccctcactcaggtccccaggcacaagagtggtcacaggagtgcccagtgctggcctggcggaagctgggcagggagaatgcttccaaacttgtgggaagaggcctctgggcctggccagtgttgccaaaggcctgggctcaccacctcttccctcctggagctccacccacctgcctgacctagcaaagcacccaggaagtgcctgggccacttccggggctgcagctgccaagcttcctggccttggggcctggggtggcaagggtggcccaaagagtatggcagtaagagtaaggggtttcctccccatgccagagaggctggagtgccatacgactgcacccccacctggcaggacttcatgggacccttcagccaccccagcagccagatgcccccaggcctgggactgctggctaagaattcccccaaagcctggagcacccaactccatgcagctggtctaatccactggcccaggcctggcaatatccacagttaccctgtcacctgcccactggccttctgggtgagccaggggagtggtccccacagggctcccggcctgcggcctggaaagatggagccatctgggtgttgagggggtgctaggaatgctcaggcagcctctgaccggatcctccccagcccctcctccctccctctagggagggggctgccgggagggcccagcttgggctcagcttccggctaccttcctggaatgcagagggaggaggtggggaaggaggaaccgggggaaaaaacacccatctgcccacttctccctgacttggttcccagctgcccctccctggcagtcatcaccttctcagggaggcctggggctggcctaggagtcaggagccctgactgccagtcctggctcttccctgagcctgtttgctcttctgtgaaatgagtgctcccaggccctgctccaggaccttgatggggtcctgggctggggcgtcccaaggtgggggggcctggaggagtggggagtgttgtagggcactcacagctccttgtagttagcatcgtacagggtcgcccacttgttctgctgatgaggctgccacttgatggactggtagttggggtccaggtaggagccactgaggctgtcactgtcctgcaggaggcctggagggagggaacgcccatgtgggccctgcaccttgggtcccacaccccaccttgaagagttggccagccatgtacctggggagggggcacctggcgggtgccaaggcggtgtctggacacgggcaatgctgagaggcaaggaaccagggcccggggagagcggaccctggggaggccagggtggcgatggggctcgagtggggtgcagaggcagggctgtcacggtcccaggctcctgtttgatcattccattcagcatctgggcattgagggtgctcgggggggattcagagtgcttcctcttcttggaggggtgtgtagggagcctggggaaacagaagtgtgcgccgtgggggctggctctccccgagcccctcccactgggtagtatccacctctctcccctctctagcctgtttgggccaggatgtgccccgcccagaggacacctccttcaggaagccctcaggctttgcctcctcctactccccattgctctgtgctgtcattttctgcttctgtcactcttcgcttcccccagactgtggacaggagccacacctgacttggtgtctccatcatgcccagcaacagggctggcttacagaatcacagcaatcgcttgaggaatgaatgagtttgtccctgcctgcagtgtcacactcaaggtcaccctttatagtgggggctccatggagagcaggccctgtgatcagaaacaagccacagagggcctgggccacaaaaaccagggaaggggagcttccgcacggcactccttccccttctggtttacaaaatgttttgacagcagaaccttcctttgaactaaacctttcatggaatctccacatgtaaaacagatgaaaagacaatcgtgcaggttgagtcagagtcgggggcttgggtctaggaagaagactcctcagaaacctgagggttccatgagacagctgcaaaatcactggggtctgggtaagagcacagccccgggcccagtcctggctctgcccctggctcatgatctggacgggacatttcccccatcagagcctcagtttacctacctgtgcccaccagataaggtagttgtgagcaattagccatggctgtaaacccctcaaggtattgctgggtaaacatgtataaatatgttacccccatctgccctgcagagccttctgccctccctgggtgcatcccggtccctacctccctctctggcctgcccgccgccctgcccaccctggtccctgtaccccaccttcccaccccatggagccagccacccacgtcttactcagctccgtgctgctgcaggagctggtgcagcatctgggactgctgggtgtggtgaagatcagtgggcaccagcccctgccccatggcagcgtagtgggggatcgggggctcggccttcatgtacagatcccgctgcaggacagggtagtgaggtgggggtggtgggggtggcggggggcctggcaagtgggctggaggtgggggcggatgctccaggcgggagggcactcccacgtggcacagtgtctcaggggttatcgtgcgcaggaggtggggctctgcaggagagatgggggagcgggcatctgagaccaacctcactcaggctcctgggcactgtcctcccaaggcagagtctcctgcttccaccccgtcctgagccaagcccgggggctgccccccacctaccctaggtgggagggccgttggtcagccacctactagaggcctgggcagggaggcacaaacctgcccaaggaggggcagcctttcacctcatcctagccacctcctgcccccaggctggaccaggagaatccaacccaaatctaaaggtccccctccgtccccatctcctctgaggcctgctcctcctctgggcctcaggaaggcgtctccggagacccccagcccaggcctgcccagtgttcccctctccggcaggcagtccctcttctgggctctcaggggccagccccccagcctgagcggggaggccccagctccctttgttccccaggaggcattccagggatgtttttggtaagataaacagaactcttgaccccaatccggactgcggggagcctgctcccgcggtggttctgctcttggccacctgggggccagggcacccctgagcaccctctaaggtgaggtgggcccggcctgggaagcctgcacccaggctgcacccacggccttccccagccacccacttaccgccgaagggtgcgtccatgatggcgcaggcgggcaggcgggtggcatcaccgcggggatacttgctcagaggcagggccaggctccccacccgcccgtggggaaacaatagccaagcgccagggagtatttgaccagcgataatctcagcccgttgggcagccgctggccccctccctcctcccctacctccctgataaggccgccccaactacttgcccaaaccctggagcaggagggcggtgcccgctggactcaccattcacctgctggggggagtaggcctcggagcccgagtctgggggagagtccggcagtgtgctgcgagagccaggggaaggggccggggggtgagcagctgagcttctgccttccagctgggcagcttctctgcgtggtagggtcccacagccccccagaagctggcgacactgaggtttcgtcacatccacccttaggggcatttctccgcaccacccacattggggtgcctggcagggcctggggccgaattgtgggtaggggaccgcccaggatcccctcagacctacagggcacttggggggcagttactagtgtccttgatgatggcacagggactcaaagactcccgccccagaccaaaggccaggacttcttctctcttcctgcacccactgaagccccacagcttcctggaaacacagggccctagggggctgggcctcagggcattcagcaggtcatggggggctgccccaccagaggcaggtgtggactgggaagggagccagcaccaccgggcctgggtttatttttttcttgcaggtttcacttttatcagtgttcaggaaaaagaacaaactcaacccaagaggtcaacacgtcctgcgtgaaccctgtgctcacccagcaagtggaaggctgtggccatatgggatccagctctttggccatccctggtccccacatctggagcaactccccattcccatgcccagggaactgccagagaggccatggccctgttgtggacacagccctggggctggctccagagtccccctgcatccctgtgccagccacccacccaccttcggggcctcatgtagaaacctatacaacgattcaagaacacagaccctgcaggttttgtgtgaatgatacaaaaacgtgtatggggactcaaacccatactcctcgccacagcctcaggccccctgggctgccactccgtcctgtacttccctgacaatggccaggccttctgtaatgtgttaaggtctttcacaccctgcagtccctgcagtcccatgccccaagtccacagcaccttgtgttctctcctcttaagttcctctggcacctgattattcctctacttggagatgtactggtgaatacctctccccagttaggcttcaggagccactgcagagccgtgtgtctgttttttttcttttctttcttttttttttttttttgagacagagtctcgctctgtcacccaggctggagtccagtggcacaatcaccactcactgtaacctccacctcccaggttcaaacgattcttgtgcctcagcctcccaagtagctgggattacaggcatgcgccaccacacccaactaatttttgtatttttagtacagacagggtttcaccatattgcccaggccggtctcaaactccaggcctcaagtgatctgcccacttcagcctgccaaagtgctgggattacaggcatgagccaccgcacctggccttttttttttttttttttttttgagacagggtcttactctgtccctagcagtggcatgatcacagctcactgtagcctcgacctccctggctcaaactattctctcacctcagcctctcgagtagctgggactataggcacacgccaccacacccagctaagttttgtattttttgtagagatggggtttcatcatgttgcagactggtcttgaactcctgggctcaagcaatatgcctaccttggccttccaaagtgctgggattacaggtgtgtgccaccacacccagcctcatgtctgtcttgtttatcacctagactcaggtctggccctgggtcccttcctggagtggccctgcccacagagtccctgtgtggctctggacaagcccctttccctctctgagcctcagtgtgccattaaaatcctgacggtagcagtggccagggctccttgtggggtctcccaggagctggatacccaggaaggctgatgagctcacgcaatcataggcacatgatacagcagtgggcaccagcaggcgcttaccaaatgttagttctcctccctctgcccccaggggcctgtagtttaggaacagcctcacagcctcaagcaaacagtttgccttctgcagcaaaggttcacccctggcaccccaagcctggcctccactcccttctccccaaaagccagggagctcaggaagcacggccggccatgtgtccatggccaccatgcacccagggcatcctctgtgcccttgttgcttcccacgataatcttgaggggtaagcatttgagggctcacttcacagaagaaactgaggccatgggttaccgaggcagacggctgataaatggggaagctgaagttggagccaggctgtctgaacacagagttcatgcacctagtgttttaatgctcttccacccagagacaggggcccctacatttgccctgagctcccctgcagacccatgctcccagcctcccgctgtgagcatgtgccccgggagctgccctggagtctggctggccgggtggctgcctggaacctttggtcaaagccaggcctaaggttcagccctgggtcaggcccttggtgtggactcctcagaaagatggggggaagggcctgggttctgggccccatgaggcttgcttgggtaggggggaactgaggtgccacatctgagccatgggccagctcctgtggccacagtacacgtcagctggatgcgtaagtgggtgggcttggcgcgcgtgcacgggtatgcaggtgttcccatgaaggtaaacagtcacagcctccagtcccgccgcttcctgtccactctccacacagcatcgagatttttctagcacttacgtcagccctcatcactcccatgcttggaagctttgtggctgcccactgcctcagaacaaagcccaggagtccccccttgacctggactcatcctcccttccctcacctgcccacgcacagccagtcacccagcccaacccatgccaggccagtgtctagcacctcccaggtcacggccacagccctgctccctgcctgcccctatgccgctgtatccccctactccctgcccttactcaccctggggcatagggagccttgggctcagccttgatggggggcccggtgccccccgggaagggcttgggggcagcgcccatgccgttgttgttgttgcagttcagcggggtgccgtagcccgggggtgggaggggaccatggcgccccggggagggtccacccccaggggggctcaggtggtggaccccgctggagccaggcatcgcaggctgcccgtgggagtaggaggccgagctggctggagcagagatgtcagggaagcagctgcggggaaggggggcggctcagctccagccaggaccccagccccagcagggaagtagccgccccctccctgcagggaactatggagatttcggaggagtcagtggctgggaagggacgaggagcagctttcagaggtgggaccacagcagaccccaggtccggccctcagacctccctggtgacagaagggaggcgaagggctggggctgggcgggtgcaggccgggcgagggggccactcacaggtcggaggcatcctccttgctgatgtactcctccaggatgctggtgtctatgttggagggctccagggcaccgttgatgtcgtggcctgcagggcaggagagatgggctagggaagaggcccagctccctgcagaccctgggcttcagggcccagccctccatccctgcccaggctggccctccaaaacagatgcccctgctccttcccacccaggtatccatgtgggggccggctctcaccctccactgcctggcacccctccaggaagcactgataatgcccccccgccccaccacaaggccaccttgagtctcagaggaggagaggggcccagggcatggatctgggtacagagaggccgatcctgccatgcctctttctagctgtgtgacagggaacaagtcctttccactaatctgtcaaatggggtcactgtgcctctgtcttatggggtgctgtgaggcacaaatgaggtgcttactgagtcgagagccccgtgggtgcccactgccctcgatgggatggctcggacccaacaggcactgtcctgccgtgtcctccaggggtcagtccagatggcccagctccaggaacgcaggagcacgaggcctggctgagtgggaccatatatcctgggggcccacagggctgtgggagtctcctgcacccaggccctggccgcaggcgggagtggggatcagaatcaggagagctccctgcaccctcattggatatgcccatcaccctgttgggcacaggcgggggaacttagccccctttttccagaggaggcagaagcctagagaaggaagggcttgccccggcctcccagcagggaatgatggccgccagagctccactcctctgcctgccgccctctcctgggccctctgcgctggccccggccccaccaaggggaggggcccctagaggaaaggcagccagggctcttgggcatcatgagggaggacgggggaggtgccggcctttcccctcccagggtcaccttgcagggggagccagagggcggggtgataagggggctgacgtgggagatgcgtcaaccccgataatggaggacagccccacccacacggctgacccgggctggccagccccactgaggcaggagggcccctcccacaggcctctggagcctgagtctggggtctgccctctcctgttgagctcagacaggtccaggaacaaatcctggctcagccactccctgctgagtgaccttgggcaggtcacatgcactctctgcgcctcagtctcctcattcgtgcaatggggacatgtacagctatggcttcaaggggctgttttgagtatgaaacgagatgaggtgtgtgaagtgccagccactttagtgggtgctcatcggtcggaacagccgtcctcacttcccagccccagagccctggggtccccgggagccccccgcccaggcccctccctggcctcagccggcatttcaagaatgctgagccccgcttaggtgattaatgagcggctaagccctcctaggagtcacgcgctgcctgcgacaggccagggccctcctgctgacccccacccccagctcgcccagctaggaacaagggacacccaccacgcaccaccaatggccgtccagggcggtgtggccggggcaagagcagcttctcgagctgggcgtggccagtctgtgtgcctgggttccaggaccctgcctctgctcaagccccaccctgctgtaaccacgggtcccatttactgagtgcctactgtgtgccaggcattttgtgaatcaaatacattaataatcacaggagtttctttactttatttcttttttttttgagactgagtcttgctcggtctcccaggctggagtgcagtggtgcaatcttggttcactgcaacctccacctcccaggttccagcgattctcccacctcagcctcccgagtagctgagattacaggcgcccgccaccacacacggctaattttttgtatttttagtagagacagagtttcaccatgttggccaggctggtcttgaactcctgacctcaggtgatctgcccgcctcagcctcccaaagtgctgggattacaggcgtgagccaccacgcccagcctaatcacagaagtttcttatgcgcaaggcatcctgcaggctcttcacctgcggtgtgttactcaatcctcccagcccagaatgctgaccatgacagagacagtgacttgacagtggctcatagtgagtatctcccagtgcttctcaactcatcatggcgatgatgacaaagacagtggtggtgacagtgactgcagctcacactgactgcctaccacgccagggacgattctaagtgctttatgcattttccctctctaaacagtggggatgttcagataggtaacataatcaccatcccctgttcagagaggtcaagtctcttacccaaggcaacacggcaaggaggattccaaccaggtgcaggggtctgactccacgagggagagtgtgactggcggttgctgtgccttccccaccccacctggagcgtcgcccccaccctggccgctgaagctgcaagtttttgagcctgaacttggaatctacggtgaatgatgggctgatgcagtcatggtgttgctatttataacagacccagccccctcctctcctggccaggagcactcctaatcgcccctaatcctcctgcccacctccctcgggatagggggcctcaggcagaggcatcctgggagaccctaacgagaaccagatgtgctttgggggaggagggaccctcccgtgccagggtccgggcggacggaggatggaggaaggaggcgggaggagggaactgatggggcagcgttgcggggaggccagtgggtggggaagaagtttgagggttgggggctcggagggcctcctgaggaacgctgaccccacaccttctcctggaagccctggaggccgcgtcgtctctttcccacgccgctcggcccccagcccgcccgtgaaccacactggagatttctaacagactttccaggtggacaagacaagggtgggggcttgccgaagctgggatagagcccccaagaacccaggacaggggcagggtcccatgggcacactctcgggagcgcccctccccactgctcccaaaagagccccagaacatcactggagcccaagcaggggtacctgccaggcaggaagcggaacatgggccatatggctcgttctgatcctcaagacctctctgagagaagggaagccgggcccgccagaggctgcccgaggctgcccagggcccaataacccgaaaacagcaccatgagctcacaaaccagcatctctgtccttcccttctcaaacccttcaacaacttcccactgctggggagacacccggagccctctggcagtccaaggcctgacatggtcccctgcctgcccccgacagccttttctccttccccaggtcccctgcctcccctcctctccgtggtcagcccttgcctcctttccatcctccatcccacatcaaggccttcacacatgccattccatgctgttccctaagcctgagaaagccaggtcctattcaggctttaggttttgtcttaaatgtaaattcccccaagaggccatctctgactctcccattctgtttagcaagggatgggcaggggcgttgtaattcctcatcagttctttaccttcccgcctacacacaccccgctgggcaggatgagtgtctgtccaccacccgcccaccacccacagctcactcgcccagtggccactctgtgcccagccctgtgccatgcactttacatggctcatattgaattctcatcccaacctacaaggtaggtgattttctttttcttcattttatagatgaggaaactgaggctcagaaaggatgggcatgtgcccatagcttacaggggcaggcactgggctatgagcgctgccctgttctgtctctctgggatatagtatcccagcacacagcaggcacccaggaaatgttcacggagtggatgagccaagtggccagtgagggacctcggccaggccatgctgtggccagggccggggctacctggggcccctccaggtcctgcccctgccctgctgagctgtgtgcctcagctgctcctcattaattaggccctttattacctgcctggaacaggaaccagacactgccccttcccaggcaggctgcgatccagactatgggaaggcagccccctcccctccgctccgctcttctctcctcgtctccttaaggccaccccagctggccaggaaaggaacggagggcacccaagccaggtgcaggatgagagcaggcaggggcccaggtggtccctccacccaggacccctcccttccgcccctccttgtgcttatgtgcccccccccccaccagctgtggccgttggctgagtctcggccattgtcccggggaacgggggagggtggggacacggcacagtgggaggcttgtgccctgcccaccccctcccctgccccgtcaatgaggcacttgtcaattcatgccccaaacatggcggaaatcccgtcagccacgtggctgtgggtagggtgggccggggcccgaggatgctggccaggcttggtggatctgaacctggggtgcagaggacaccagggcccaggcctatttccgacaaccccagttgctctgagtgtcctctcagagcatctgaacctgaaggatgccctagcttcaggcagcagctgagggccagggtggtagcagtcaagggacagcccacctgggcataaccacgatgcccagagagacctccagagtcaaagaggcctgttttctaatgtggacttcccacttgatggctatgaccctcagcaagtgacctgagccctggcttccttctccatcagatggagcacgaatccctgccatggagtgaaccttaaacgaggtgacccccaggaggccattccgcagtcagggtgaaccgccctgtttccatctctcttaggactcccatctcctttcctgcctgcacgcctccgcccaggctgtcccctctcccccaggcccctccgccttgctgcacacgtgctccagagcctccgagggacatcctcaccttctcctaagtccctctgaggcatggtcagcactctgctgctattcttacacatgcacagcacagtccagcctccgggcctcggccccagccatcccttccagtgggtcagccttctgcgactgcctccctgcctgccctggcagcccctccccatcgccccagtcacagagggcccccagtgctgtggctcatctcccaaccagtttacatgggggcaaggcacagtggcctcacctcctttggtttgggctttctctctttattaatatgatctatggccaggcgcggtggctcacacctgtaatcccagcactttgggaggccgaggtgggcagatcacaaggtcaggagttcgagaccagcttgatcaacatggtgaaacgctgtctctcctaaaaatacaaaaattagccaggcatggtggcacgtgcctgtaatcccagctactcaggaggctgaggcaggagaatcacttgaaaccgggaggcggaggttgcagtgagccgagatcgtgccaccacactccagcctgggcgacagagtgagactctgtctcaaaaaaaaaaaatctataactgctagctgccctgcttcaggcttcaacttgtgaccagagccgtcttagtcaaaatgccttcaggtcagatgtttgcttgtgcaagcaaccctttgcctctccgcatcaaatctcagttagcttgggcccagcagccacacctgacaaagatggggctcttgagccgtttttttatcaggttcttcgatctgagtcacagtagtctttgttctctcccagcttcttaccaaaaatgcagaagagcccccacaggctgcctacagagacccctctcttttttttttacctttctttttgagacaaagtttcactctgttgcccaggctggagtgcagtggcacaatcttggctcactgcaacttccgcctcctgagttcaagtgattctcccacctcagcctcccaaggagctgggactacaggcgcctgccaccacgcctggctaattgttgtattttttgtagagacgggatttcactatgttggccaggctggtctcgaactcctgacctcaggtgatccacctgcctcggcctcccaaagtgctgggattacaggcatgagccactggcccagccggagaaccctctcttctaggagacccagaatctttagccacccttgggctatggctacatccactccaagtccccatgaagctgccgccctgtcctcaggtcaacataaggctgaactcacagccccaagatgctccaaagccaggtccaacagcaccgaggccagcagctgcgacctgttcctactctctcccacagggaccagggcaggcaggccaccaggtgccaggtagagaccctgcagcttggggtggacacaggtctccaccagggtcacctgtgcccatctgtgcctacacaccggtgtggccccacgcaggcacactgccaacacacacacatatatgtaagggcacaccctgcagtcaggtatccactgacatgcgcatgatcacgtaccacctgccccctactcacacatacacagtactgacacacagtggcatgccccacacatatacccacacacatgcgcacaccagcgttcatccgtgtgccttcattcattcagcagttatttactgagcacctgttatgtgccaggcaagcatagtgcccagctttggggctacagcagtgagcaaaagggacaaaagccttgcccacatggagctgacattctagggagcagagtcagatgacgagagcagcaaaatgcctagcattctagaaggttccagatggcggggacagccggtgcaaaagccctgaggtacgagcatgcctgtgcatgttcacacctcagcacacttcacaggtgtatatgccaggacacgcatgtacacaaacgctcactgacccgacgacaggcccaggcccacaggcacagcgtcacatgcatgggttaggttagtggccacccaggaagagctcccacctcctcttcttccctccaagccccctccccgcctgctgtcagaccctccctaagcagctccggctggagccaggccccactgagtgaactcagtgtcacaggcacaacttccctcctccaagctagcagggcaggggatggggatccccttgccccagccatggagggagaagagaggggagtgagggaggccggagggagataggatcctcaaactccacaaaggagagacagaggctgtggttgtgcactctggcggctgcacggaccccggtcagctggagggagaacttccctcactgatgcgacctggggcacagggaggacagaatgtccgggagccccctccatactctaggccggcagggggctccggacccaactgtactccccacccaggggctttgcccctcccccctcactccaggccttggcactcgtgggatctaactgctaacatcacccaaccttgaccatgtgagtgagggctctgaggtctagagaggtcaaggaggctgcacggacatcacctggcgtggccacccgtgctggagccacccctcagcatgtcaggaggagaggccccttccctgcccatcccaggctggcacagagctgggacccaggctccagtcccagctctgttgtggccaccttgagggagcctgacacatcatcgccttcctgtcctgcctcacagtccccctcagaaatgggaggccgtcacccacgcttccactgcaccccaggactccaggaagacaacgtgcaaagagcctgggtgcagcagatgaagtcacaatacagccaagcccctcctccttgctggcagcaagaacagaacccaaatctcagagggggaggtggggcgggccccactggatgtgccagggaccaggaccaggccacgctgggccagagctgtcatggttcaggccttgcacacagaaccacagaacatgttcaacaagccccctaagcttaggggcactgacctaccctggggactagtaatcttcaaggtagggcgcagaacacctgccatggaccaatggagtgttcaccaggccaggcacaatcttacctaatcaccccagaaaccctgggacggaggccctgccattacaactgcactcccgttttacagatgagaaagcggaggcacagcggtgccctgatacggccaagagaagcactgtgggtaagcaggagagctaggaacagaccccagctgccctcgctggcgaatgcacagaaccattacatcatcctaccccgagacccaaccaagaggtacccacaccccgtggcagccggggctgaaggcctggagataggagaggaggccccacatactccagcacccaaggcaatgagagaaactgaggcccaggaaggtgctaggtccgtgaagaggaaggtgggaaggtaaggcaggctgcctgggtagggcggggccacccagttaatgattcagttaataatttctgctcccagttccttatcagggagggcaaagtccaagggtggcagccaatgagcagctctgctgggctgttacccagcagcctctgctgccagggccctccagtctgtaaccccttgggagttggtaagtggggagtcaggcccccagggaaaaggccattctgccctcaaatgccctccttggctctacttaagaccccaaggagcactctgtccagccttccagtctcaggagagtccctgaggccaaagggttggtaactgcctgtttctcacccctgcactgaccccaggccctccagagaggtgctttctggggtgcgtcccccacccccgccgcctctgttcacatacccattgttgtcaccattgacctggagagcacttcctgcccaccccccacccctgccctgcactgggtgctggggacatggggatgagtcagaccccctactaccatttcctcccctgcctgggctcaggaaaccctgtgcctggccacccctcccatctacttactccctgggtgcaccagggacagacagagacaggctgacacgggccacagtgccacccccatcacgaagcccagctcagcccccggattcctgtccaggtgggagtcctctcttccaaatcatcaggtagtctctacctgggacctcctcctgccctctggaggcagagatgttggtccctgacaggtagccccctcaaccccaaggtactggtggcagagtagggagctgggggctaggtgtccactctggctaactctggccaactcccttctctctgagcctcagccagcgccattcccctccccttacccatcccacagccgggaagggtggctttcaaaccagtatcctggtgcttcaggggctgtgaggagcccagcccccattatccactgtatctgtcctatcaggagactatgagtttgtttgatggttaaaaaatcacattggaagcccctgctctggtccaacccacttacttaccctgggaggggaatgaggccagagaaggaagtcaccagtccagccacccatcagcttcagaaggggcgaaatcccaggcctccctcctccagccctggtggggctccagaggccgggcagaggcccactaaactccaagtggtctttccagcacctgctggaaggcgacttccctccatcctccaaggcccctgcacacccacctgctttctgggggacactggttgctcactcgagcctcatgtgcccctagaatctagggccagcaggcaccccttccaggctcggccattcatactctaacatgtctctccttcccagggctgggcagtgagcttcttcagagctgaggttcttctctgccaccccctcctgtcttgcaggtgaggaaaaaggacttaaagagggcaagagctctttgggggttccctgccaggcacagacggtcaccccactctcagtggtccagcctgcaccagaactctgaggtcctggcaggattctcagacactgccctgtcccgtgcctgccctggctctggagtccaaagcccccttataccatggcccggttacctgctggaagccagtgcatcctgcccggtgggtcccctctctgcaggccctgtgcccgccgatctgggctgccttgcctctctctaggggattagccgggcggtcacgggggcccggctgtaccagcctcgagggggccgctctgtcccggcctcccacctgaggtccaaagcgccttagcccccagcccaccaccggcacagggcaggacccagcacctatgcttggtgtgtgcccagggagggggaccacgtcaggtgagggggcgcgctgtgctgcagccccttcggtaaaaccctttcccagtctcccagcccagagccgagagcacagggactgctacccactgtccagagggatgaccaaggccaagtggggaccaggatgagagctcaggtgtccccagccccagccccgagtgtgacagcactcaagagtgacgcagccacggctcaaaagcacaacttcccgctccctcgcacttcacacactcacaagcacaccaggccctgccactcccaggccttctctcacacctacagtgggtcccccacatgggccttcccctcccaagtggcctggagaccctaggcctcaggggccacccacaccttcccccatcgcaggggctgggagctgtttccagcccagccctcctagacgggcagcctcacacccctcccctgctccccacagacattcttgagtctcctcttatctctctggagggagtagcgcagcctccccccgccaggccgctgcatggctaagccgtggcgtcagcccccaccccccaacccatggtcaggagggagccagggagtccaggccagccaggcccacccctctgctctctgtcagggcccagcgtcctggggcaggcagtgtggaggtcaagggagcctggcctgcgggtcctctgggtacctagcaggctcaaggcactccagacagtaacccaagcaagcacgaatgtctggtcccctcttccctgaaggtctcaaaccgcgtcaggcccctcgagagctcctatggatcaacagtgtctggggagagccagagccccgggacagatgcagggctgcctaagaccctcagatggcccacctgatgcagagtcaaccattcaatctagtccaagcctgaactcttgggttctgggtctgtggggtgtccagaatcctggagtgggatgactgaggcttaggggtgcccctgcctgggctgctcagccagcaggtgtgaacaagggttcctgcctcccaagtcacagagggagagaaactgaggcactggaagacctgcttctctcctccacaggactccacaggaatctggggcttgaaacttgggccttggttccctgccctgtagccctgataggttcacacatgaagggaaggttctcaatgcaccaaggagcaggatgtggccttagggactagagggagctcggggcaggggctggtctcgctgcattggtagacaggggcacaaaagggggccagagggtctggctagatgttccagggaggttctgagaagcggagtgggctgggaggcagtcagccagaacttcccctccccctcccactgtggtcccatccctccagaacccagcaccaggaggagtggtggccctgcaggaggggcaggggtcgtccaggaaaagacagggagttggttagatggaggagcagacctccaaaaccaatgtaggggtgggggcagaagaagatattatggggtgtatgtcaattccaccccagagggctcctttcggtcaagtgggggtgaggtcactctttgagggggcgaggtcagagaggcacagctccagggttggggggacatagtgctgaggagcctcagagggctggtgggatgcagttcacagcactagaagggtctcagagagcagaggtgaccggtggcagggatgtcagcttcaagaaggttccagccccaggagagcatgctagggaggggggtcccagccccaaacaggagagcagtcactaggcagcattgtggaaagcaggtggcagtctccaaggggatccaggctcgaaagtggtcctaccctcatggaagcacagtggggaggtcccagctcctagaagtcatgggggatggcgccaaccagaagggcacacagggggtcttggtctctaggcgggggtcacagattctgggaagcaggctggggtccagcctcaagaggtacggaaggtcctagaaggcacgccgggggtctgggccttgaatggggttgtatcccgcttggggttctggggaagcaaagtagagggtccccagactcgggaagtttgctgggggcgagagtgtcacaatttagggaaagttccgggtcctggaaggctcaaaggagtccggacctggaaggggacacagtcccaaggaagctgcgagttgaggagcggggagggggagcccaacttcagcggcggtgggtggtaaccgctgggggactcccagccccgggagcctgtcttggcgggctggtgccagcctgaaggagggtcccagccagaggaggcggaaacacagcgaggagccccagttcccggggagatcagccgggggttcccagcgccagagggtcgccgccgccagcccgcggtctctcaccttcgaagaagcgctgcagcgcctccgtctcgtccaccacctccatgtcccgcctgcccggcgcacactccagccgcggccccgctacagcccggcccgggggcgcggcatcgccggcgcggcccgcgcgacagtcccggctgggctccggctacggtcccgcccggtccgccgccgcgcttgccccccgcgcgtccctggcccggcccctgcccgccccacgcgccccgcccgccgcgcccagcgccccctgccggcccgcgccgcgcccagccccgccgcgggcaccacgctcccgactcctgcaggcggcgctcagcgctgggcagtcctaggcttgcggggcgcggggccgtcccgggtcgggggacgcgagaccgtcccaggcttgaggggcgcggggccttcccgggtcggggtgggggcgaagggccgcttggcctctgtggggtcgggactggaagggtgtgccctcgccgtcctcgccttcgtcttgcacgggacaagatgtcacgattccgaatccaaacctcagagacagcccccatccctctcgttagccacccacacaccccgctcagcaacaataacaacctgcatttagggaacgtgtgttatgtgccaggccacacaggcattatctcatgtactcctcacaggcaccttatcaaggagatgctgttgttacctgcattttacagatggggaaactgaggctcagtgcattaaggactgccaggaagccctgtcctgtggctgtgatgatggaaatgttccctgtgttgttcagtatggtagtcactggccacaagtgagcactggaaatgtgcctattgagactgaggaactgattttttcattttgtttaattgtaattaaacagttacgtgtggctgtggtattggacaatgcaggtctaaaagctccttttttttttgagatggagttctgctctgtcgcccaggctggagtgcaatggcgcgatctcagctcactgcaacatctgcctcctcggttcaagcgattctcctgcctcagcctcccgagtaactgggattacaggcgccaccacgctgggctaacttgtatttttagtagagacggggtttcctcatgttggccaggctggtctcgaactcctgaccttaggtgatcagcccacgttggcctcccaaactgctgggattacaggcatgagccaccgctccccgccctgcctaagagtttcaaggtcattaaagttcagagccaaatcctggctgccccgggaatccgagctctcctttgccgtggccctgtctggtataatgaaacctggaggttctaactcgatataagtccaggataaagcggttgtccttgtgcccctgccttcacccttatgactgactgcctccacatctctgtcctgcccaacttgcacagcctctcgtctcactgatatccccttcagttctcccaaatcaccctttctgaaacatacatccgatcatgtcattcctttgcaaaactaagtttccctttgcactcaaaacaatatctgaatgtcttgctctggtttctcaggccccgcctctaccactggcctcagctcttcccctctctccattgctcactgaataacagccaccaagacctccttgccattgctcaaacatgcaaggcctacacctgccacagggccttggcacatgctattccatctgtttacaatgcttgtctccacatggctacttctttgtagcagttggtctcagctcaaatgtcatgtccccaaccagcctacctaaagcagttctccctacctaggcctttcttgctcaccatgtaaaagattcctatttagtttctgttattatccttcttgctctagaatggaagccctacgagggcaagatatttttctgtatcggtcactgctatagcttcaacaccaagaacatgacctggcacacagtaggtgctcaataaatgtgttgaatgaatgtatggtggcatcttcaaactaccgaatccagtcaggcttcagtggctcacacctgtaatcccagcactttgggaggttgaggcaggaggattgcttgaggccaggagttcgagaccagcctgggcaacatggcaagaccctgtctctacaaaaaattaaaaaattaactaggcacggtggcacatgcctgtgatcccagctactggggaggctgaggaaggagaatcgcttgagcccaggaggttgaggctgcagtgaggctgcagtgagccatgtttgcaccactgcactccagcctgggcgacagagcaaaaccctgtctccaaacacaaacaaacaaacaaacaaaaatctacagaatcctggacctctgaaaccttgggagcggataattctggaatcccagacctagagaatcatcccgcttcagagtggctcaacttgaagcctctcgggacccttcaaggcagcacgtaaaagctggaaaaacctaccccacccaaccactgtttgacaagccactaaacagaggccagaggtgtgggggactgctggcagatcaagatgccaacgtagccagcttcggactctcacctctgccttgcagcatccccagggagggtggggcacaagccaggccaccccgtggggatggggtgagaggcctggaagccgctcccaccccagcctccctgtcagttctcagtggccagccgtgggggaggggcagccaatgcctgagccccagatgtggcccagtcagcaggcccatggtggcccgccgaaaagggtcaatgccacgacagttctggggttgggggagggggtgctgaggccggcgggtgcctcacaatgaggttttgtccctctgggggccgctctcagagctgttgctcttagatatatagaatgggattttgctggaggccccagctgtgtgtgctgaccgcagctccctcaccgcccccgcaggggctgggctgagaggggggagaggggccacactgagactcctattcttttccagctgatacaccccagaggtttttctccctccgcagactcccttaagacaattgttattctccaccctgcccctcctccacccggggtcaggcctgcctgcggacaaagtagacacccgcctacaccacgcgattctgagaaacggatttacattacgagtcgcctgggaccagccacagaaccagcttctctacaagcctccacatacccacggatctttcctccgtatcccacatactgcataactgaccatcatctaagttctcaccaccatccgttgagctacacattgtccctgtcctggtcagcaagggctggaggtagaagggaagactcgtactttgtccctaacgccccaactccattgcattataatcaattaagagtatagattattcaatctctagggtagccttgaagttggaaggggtggaatggagcctcctgttaaccctgtagcagctgacctggctaagggagctcaggccctgccatctcccctgttacactaggtcactgagcaaaggagcaactgtccccagggattttcatctctggactggaggaaagaggtggctgaaatgtcccagactcaagggctcagccaagagttgaggctgccatctgccaactccataatgaagttgggtcccaagcagcgctggggcagaggctggggcaggaaggtggctgggccggtgaaagtagcccaggggacttgcatacaaggacctaggggggcccatcaatggagatgagtcctcatctgtgcccctggcttctctaccgagccacagtgagtgaggggctgagatttcagccctagcccagcagacatggctgtcccctgtagccagctccacctagtccccaaggcctgccctctgtcctcagaggcctcatctataaagcacactcagtatccctgccttacagtggaggtaaagtgccaggtcagtgatcagtaaatggtgccctctccagttccaatcagctctcagcacccatcactgtcccttgagtgggagcagggccaggaggaggtggtagaccgaaggcagcactggggagagggatgctggcacctgagggttaatgggtaatgggcgtagaggccagcccaggagaaggtacagccctgtcctccccaccgtgggactctcctggcctcctgtggacccacacagcactggcatcaggccatttcgcagaggaagaggagggctcaaagtggggtgagtgtcaatccagcaagccagtgaggctggtggtccagcttccccggactagggcccaagggcacacctgagtgtggggtcctgcagggtagaccccttcctgactgcaggggcaccgggacaggagggggctgctgcaggtattgagtggagcgtgaggcagagtgcctctctagcccttcccagcactgccctctcaagaccctccccaatgccacaccctggctgcagccccgggcaagccacagagcctccctggccttcagtttcttctgcctgtgctgtgctcactggacaggataatttgcagaccattgagaccactgagggcaaagaacctctgaaagccatcaggtgtggtggaggccagagtcctaggctgagaggccctgattctggtccccagtctgtccccacctcccatgcgaccttgggcaggtcttcacccttgtttggcccgtttctgcttctgttcagtggctgtgggtgaagacaggctctaaggctgggggcattcttctatcactctccccagcccctcaccaaatagagccactggacactgggggccgagatgggggcagggtcaggggaagggaaaggtccggtcagcttggctgggtcagtgccgaggccagactctgcggccaaggcgggactgactggctgaacagcgccacctgctgtgtagagggggcaggccccaccacctgggccttccagccactccctaggcctcactgcccggaagctatgctggcctggggttcctgggctgcactgggtctggccaggtattttgcgccctctcaggaaagccctcagcaaagacttctagtggcccctgcatttcagtgctgtcccactgggatcttccacccctgcctgccctagctgtctgcattgttggggagggaggtgggcatggtcagactagcctggtcccccagtcgccagcttggcagtcttgggcagctaatcctctcagacccctcagggaggaaggggaggccagcaagctgtatctttccaggctgtagtatgaacgtgcacccgctggtacatctctcacacaggcaggactccgcaagtggctgccctcattcacagggggcttcaagggtcttctactccctccctgcaactcaaagtgtggccccgggccagggcactagccgagcaggagcaggtaagaaatctatacctgggccccaccccggaccactaaacccgcacctgcatttagcaagcgccccagtgagtcatgagcaccgtgaactttgagaaacgaagttctaacccaatacagacaaagggctggacctgaaccacccaaacacaccctgcgtcttgtgggtgaaacgggctctggtcccaaggaatctgtttcccccttaggctttctgttccatccagggaacagtggcagaggcccccccggcccccggccccatgccaaccccctgctctgctgcaacctcgacatcaaatttctacccagtccccacctgatgcaaagacattcgaggcagccagcgtgcttctacatccagtttatacacagctctatacaatatacagaaacctttatatacagatatatttatagaataagctatattaatttgtctctcctttttacagcaatattagtttggatctttcatacattaagtacaaaaaaagtctggggagaatggcacgtaagagagtgcatgagggtctgtggggcccggctgctcgctactgattgcatatggagtcgcccaggcccctgggaggacaggcccgcgcacttgtgctgcaggtctggggatggagtgggggtcggtctgagccgaacggggctgaggggggtggctcagaccccccagtgtggtatggggtggaggagggagacgtgcagcaggcccatccttcaagggcaaggtgggtaggagccaggttaggggtgggctgcccctgggtgcccaggattgagcccaagcctgccccagccccaagcctgaaacatggtgtggctgcagccttgggggtggggggtctgtccctgatggctcgtcctggggtggacgacatgcccacattagaggtcccaggacccaccctggcagaggaggaattaaaaggccagacatcaagtctctccctgtgactggccacggtgcttgtcagatctttcatctgagagtctgtcttgttttctaaactctaagagccactgattttgtcttgcttctgtgctgggctgaagctctgtatgcctcagcagggccagggtgtcctcgagtctggtgaaggcgggagttacagaggatgaggggaggcccagctccctctgtcagggtgggcaggggctcccaggacagccatccaggccagtcccagctgtgtggggagccgggggccagaattcaggcccccaggtaccagtgatcatgagagggaggtctcttggtcgggggagcctaggccacccagggaggctgcaggtggagccagaatgggagggaccatgccgctgcagaatgaaggcacgagcaggcggtcagccgtgcagtcagcgcctcggtacacaccagttttccaaaacgggtcacagcagcaggcgcgatgggaacagatggtgcctaaagctgagcttgtccctgcgaccctgcctcaaaggccccatcatgctcccctaccgttttcttggcaggctgggaggggcagcaggcaggcagggcaggtagggtgggcagccccagaggccccttccttaggaacggtgcacactcatgcacatgcatacgcgccaacactagcatgcacaccctcccaccccgcttctggggaaactccgggtcgctatctccctaactgcttcccaaacccagcaggggaggaagccctatggggacctcaggctaaaccgggactgctcccagccccaggcccctccctgggcagtggacagaggtctccagccaaggcccaccataccccactcttggccccacctcctaccaacaggacattgggggtgggagggaggaaggcctgctcccaggagggtgcccaggccagcgaggagggaaagctgaggggaacaggggtgtgttggttccagatcccagggcccagagctgcctaggcgtggtgggggtgacaccaaggggtgaggtggggccctcagaggaagggggctctcagtgccttccttccacccagggcactgactctgcagctggggtggtcacagcagtgcccaccaccctttgggtggtgaggatccttgggggtagaaggtaagccaggaagtagccagcaggcagggcaggcctgggtgcccaggacccatgggcagaggaggcagcatgagaggcacaaggcagagaaggggcggccctgaccccaccctcctctggcccctccaggcccctggctgccttgggccctgctcagaggacggctactgaacacatgattgggcggggggcttgcaagcccagaacacatcctgagccaagcccagcagcttctgtaaacatgtacagcactgcaggccacctcggcaggggcaccccagggggccggccagcaggcaccagatctggggggtggccaggacgatgccggcctggaccacagatgagaatacatgtgtcggggggcactgctctccacctggcccctgggagagcagccagcaggcagtgatgggaggcagcttgcccatggcctgtcctggagcagggggtgccagaatgcccccatggagggcagtcaggctgagtgtggcccacccagcaggctgcccaggctcctccccactccacacccttccccatctttccccatctgtggggccagatcccagccaccttggctctgggggtcctaagctgaggtagggatgcggacccccagctcagcagcgatgcctgtgcctgaggctaaactgcccctgggggtctgtccttaaagctgcccggcagggggcaggcaccaggtgcccacagggccacctgctcctgcctgggcccggctggccacgcaactggggtgctagcgtgctgagatgaccagctcatcttgcttggcggggctggctccgtggccagtgggggtagaagtccggatcttgtcagccgccaggcattcctggctactgaggcccgtgggcgtcaggtccatgagctcacccgaggagctgagcgggaaggagggcgagagtgagatgcccgaggaggggtcggctgagccggcaaagagccgtgggggcttgggcaccaggttgggctcgaactgggcacggagcaggatctcttgctggctgggggacttggggccctcagcgtagtcactggtggggctctcgggcaccaccatgcagtagaggtcttggaaggagctgctcttgctgtccaggttgaagaggctgtcgatgaactcggcgaattccagcacctgaggactgggcgagtcccccaggcgcccattgtgcagcgccagctccccgcgggaggccggcccgccacccccaccgccaacctcttcctcctcgtcattggccgcagcactggggggccgctcaggagtgacgccgccactgcccagggccgcctccaggggctgcgtgtcctgtgagtgcttggacaggctgtcggccgccagcagctcagtgcgcgagctcagggatgggttttcctcggggatggcagggtcaatgtagaagaggtggccttcatcacgctccagcacagcgtggaggctgggggagccccggatgctgcggaagcctgaggagcggcgcgagtcgaagctgtacagggactcagtgtccgagaggctctccatggtggccagtggtgcccgccgggcctgcagctccgccgccagccgctcctgggtagacagcagcagcagctccaccgggtcctggcgggccgccgccgcaaccactggcgacagcagccgcccctccgagaagccctccaggctcatctcagactgggacttgctcctgcagagggagaggagagcagggggtataagactcagaagggagaggggactgaaccccagctccctggctaaaaggaacttgcagggaataaagggtacagttcatttagcagttgttgatgatgtgcagcagggaatgcttattttctttttttttttttttttttgagacggagtctcgctctgtcgcccaggctggagtgcagtggcacgatcttggctcactgcaagctccgccctgggttcacgccattctcctgcctcagcctcccgagtagctgggactacaggtgcccgccaccatgcctggctaattttttgtattttttagtagagatggggtttcaccatgttagccaggatggtctcaatctgctgacctggtgatccgcctgcctcggcctcccaaagtgctgagattacaggcgtgagccaccgcgcccagccaggaatgattattttttaaaaacaactcacaagaacccaagatagaagacaaaagagttgatgctgggttgagccgcggggtccctgaggggctaaggccctgctggcagcactaggacttcaggagtgctgctggggttctctgcaccagaacccctgtcattgtaccaatgtgagaatgaggctctgatagactggctgccccagatcactcatgagcctgccccaggtcactcatgaggccacagtggaatgagagagacagagggagggaaggagggagggagggaaggaggaagggagggagggagggagggacagagggcagcagggagacagggaagggagagagccctgcacatagctgcccaactggttccaccccaatctcagagccagcaaccctgggtgccactcccagggatctcatcacttccttcctcatccgggtctcctcctgtctcccatgggccgcagccctctgctgggtggggagcctagtgcccctggctccgcagaccagcctgcagggaatgagtgacagggcagggagtgggtggcttgcagcagtcaccgcagccggaaatggacactggcttcttcatcgggttgtgcagctgccacaggaaatgcacaaatggcagggagagacgtccagttgtccctaccaagggccaggaagcagcctcttgaccagatctgtgaccaagcacacagggcctgtgtgggaaggtcctagaaaggcaggacaatcctcccctggaaggactaccacttaagagcctcgcacccctcaaagagtgtgtgaatagcaagggcgctgtggcccccatgtgcgtgcccctgtgagcatgtgtgcacgcctctgttcatgtgtatgagtgtgtagaccagacgtctgtgtatgtcagctggcttgtgtgtctgggtctgtgcacaggtgtattcatgcatttccatgagcacctgcctgtccacatgtgtccttgtatatgtgtctccacctttgtcttggtgtgtgtcttgtacatgtgcatgtctgtagggggtgacctgtgtacttataactaataattgtgtgcacatgtatgtgtgtaagcttcaatacaaatatgtaagtaaatgggtgtccatctgtttgcgtctaagtgtgtaagagtgaatctgtgcaggccggccatggtggttcacccctataatcccagcactttgggaggctgaggcgggcagatcacctgaggtcaggagttcaagaccagcctggccaacatggtgaaatcccatctctactaaaaatacaaaaattagctgggcacggtggcaggcgcctgtaatcccagctacttgggaggctgaggcaggataatcgcttgaacctgggaggtggaggttgcagtgagccaaggtcgcgccattgcactccggcctgggggaaaagagcgagacttcgtctcaaaaaaaaaaaaaaaaaaaaagagtgaatctgtgcttttgtggcccagggtttgtgggtctgtgtgcctcccctggctcatgtaggattcagggacagcaggctgtgggacagctggagcacagcaagagagccctagagcacagagggtgagtttgacccctcctgtgcacgtgtgcagagctgagcccagtgcatgcacaaaatgcatgtgcacacaagtctatgtgctctgaaccacactcaccctggggtggggctgggagtggccaaggctcacctgacgctgctgttgcggtggtctgcagtcggcagctccagggcaaggccagtgggcatgggcggccccgtggggagtggctgctgctggaagatgagctcaggagtcaggtccacctcggtagggctcaccatgaccttggctgcagagagcagagcggtcttccccttgttgtagttctccagcacctgaggacaggacagaggaggctgggggtggtggagggacatcaggccccatcgtggggccgatgtggagccagggcccaggcctctcaggccaagcaaagcctcatggagtcacttgggtcccactctcctcctcctgaggtcaccactccccaaggcctgagacttgcccatctggtcacgactcgccccacagcccggcgagtgctcctgccctacctgccttcagcctttccgcagccaggggatggctgcggctgtcgctgcttgcccattcatctgttaagggccaggtggccttccgggcctctgagctgagcctgcctcagggacaggcccctgggagtctccttatctcctccccaccatggggcaacgtggtgatgtggacagagccaggggtgtgaggttgaagtatttgagtggggctttctggcccagctacctacttctctgagccccagcacccttgtctgtaaaatcgggcagtgatctgatggtgcttacggggttctgatggggtgacagtgccttattccctggtggtaccctgccgggagctgcctcaccttgttgagcccctccatgaccacatagggcaggtgctcatgcagcatggctggcgagatgatcacctcattgaaggccttgttgtcgccccagatggcaaagtatgtgggctcctcctgctcacagcagctgagagggacatggacagaggggagttaagggtggggtggtggcctggccctcggtgccagggcctcctggctctgttctctgccctgctcagcagagctggcatggtttggaggcccctggcctgcctggcagcagggctctgttccctggcctggctcctgccctgccctcagcctgggaaaggctgacctcgagcctcagccatggtccctccacagccttcgacctgcttttggcctgggccacacctgctccacctgctgcacggcccagctcaccagctgtgtcaggggaggaagccgaccctggagggaggagccagggcccagccgtctgaaggagcacagtgggaaaggtctacccacttgcctgctcctattctctctcctggcgcagcccccaccttgctcacagctgtcttcgaggaattcccttggtgaaaccaagtgacaactgaggtgtgagctggccagggcctgaggggtgagccctccagggcacctacttttaaatggaccaccagtggggagagctgccctggggcacaccagggaagggctgacactggaggcaaagccagactatggagagagacgcctggagtcctgctcagggctggccttttgttccatttccagagcccgatgctggggaaacccctccatggaggccctgggccatcttctcccagcctccacccccagccccgagcggtgattgagccaaggccggccctgctctccactgcccctgccctggccactaccccctgcagcagcagaccctggcagaacctaccagcactgctctgcagggtggttgtggaccacgtggatgatgcggccgggcgggtagagtggagtgctggctgagagggctatagttaggtcgctggggtgggtccagagccgcgtgctggccagggtggtcacctctacctcctcaggcagctccgacttggggatgcatttggtggcccccacgatgatccgccactgcgcggggtggagtgggagagatggggacagagctaagtagcactggctggggggcaggggcagggggaccgagaaggggggctcagcaggtgagaggtgggcagtaagatggcaaaggggcaggggaagggcagtggccagagcattaaaggtcggtgcccacctgaagaggcagtggctgaggtgcacggtggccagacggccaataaggtgccaaggacagatgacatggaattgttgaatttcagggctggcaaggggctggaagcccagccaacccctcatctagtagatggggagacaggcctagtgaggggaagggacttattctggatcactccacaagtccgaggccaaacacaccctggagttgagtccagctggacctgccaggcctggcctgacaaaagcccaggactaatctggtgggagcagttccacctccccagaaccaggctcctccaggcaggcaaagtcccacaaagctttgctgccctgctcactgcctggcacctggtacctggcccagggccctgcctgccacagggtctagggcaccaaagctgggaacggtccagacggggctgagatggtgaatgggctgagggctcgcccggggcagggggcggggggcagggggtgaggaggggtgaccacacagaggaccctctcctcctgcgctggcctgcctcagtgtgcctggccaccatgtccccacccccacctggccaccccgtctgccagtgtcctccagagacctgatgcggattaggaagggctgaccctctcctcttggtcacagcagaaaatcagaacaaactgtacccaaatcctctccacaggtcattcccagccctccctgagcctagggaatctcagaggcttcggcagaggcctttcctcaccgctcaaagcctccagatcgctttctcctgactgtgggcagctcccagctctgtgtgatgggagcctctcggttcctgtcctgattctgttctaactttttatgtgagcaaatgcaagtccctcccactctgggtctcagtttccccatctgcacaatgacaggggatggatgggttgagcttggggatgctgagggtctgacttcctgaagttcccacaacaccagccacaccctgccctggccttccatggcagggcctcttgtgctttgtcccaagaaaccggtgggggtcaagggcagggacagatgaggctgcacagaggcagggtgcccaggtgggggctcactttgggcttggtgcttcgctgcaggacatccaggagctgtctgcggaagccttccagctgagagaggccaatcctggggagggaacgagacagggccgtcagccaggcctggtcagcggctatgagaggtatggggccaggggcggaggggcaggcacacgcctagcccctggaacaagaagacacgtcagccagggtcacggggtggagaggtgtccacagagcagctccccagagcagagctgaggagtgagaggacaggcagggcgggcgccagcacgtgcgttcacctgggcttctcaccactgggcaactaagggtggggaggggcgtggggtcccttgagagacaggaatcggactgagagagatgcgggggctgggggtggggagaggcctggaggagggaggaacagcctggcaagggaccatggagcggggccaaggactcacctggggacgaggtctttgcccagaaccacagcagtcacgaactccttggaatactccatcgcatcctcactgcaagggaagccgaagcagaagctaaggccaagggggcggggtggtggtgttccggaatcggggggcccagccacaagcaagccctgctcctgcactcctgggatggctcccggggagctggctggtggcaggctgggttgcctgctccctgctctgtctttcccactggtaaggctttgctaggtagatcctggggggcgcatggcatttcagagcccccaccctccaccctccaggccactcccagacctccatgtgaccagaagtcagactcccagtccagcccctagcaccagccaaccctcagcctccactggtcccaactgccccagccaactctgaagccccagatggctcacctcagcaggccccctggcggggagtaggcaaagcacttgagggtcggatactgtgggcgcagaaggaaggagaggatggcagcagtgcccgcgcccagggagtggcccaccacaatcaggccgtagtgtttggttccgcggccctggagaccgagagaagcctgagagccctgccccaatgcccgccaagcgactgtcttagccaacccaagggaggcagagggtcttcccatcttcccagagtcctgggatcttgtctgtgctgtgtgaatgctagggcacagagaaccaagatagggccccacagagcgactgcttaggcagactgttctaataaactcttatttacgcttccaaaccttgctcagaggttatgtccttggggaagcccttctgattttccaggagtggctcactccctctagtcattgcatctgtacctgggatggagctttttatcactataaacatgtggttacctgaccccatctctctaccctcactactagactgaagtctcctgaggccagagcctgctttgctttggaaagggcagctggtggcacctcaggagctacctgcacagaccgtggccagtgggcaggactcagttatcccctaggtagagcagcaccccttctctctgctctgtattttgagcctctccatgtttccttctgacaaacggttctgcagctatgaggcttaaaagccgtctgccctgaatcatctttgtgcctctagtgtctggcatgaatcaggtgcccaatgactgtaggtggggcggagcaggatgcccacaggacctggcacaaaagaggaggggttgggagccaggctggaagggattgcaggagcctggcttgtgtgggagttgtgaggctccatcacccatccatcctctcctctctgtgctgcgttggaggagggggacccaggtgtgaaaaggcttggtgccatggaaaattcctcaccaggtctcgcccaaaggcctgggacaggaccatctcctgctccagtttcttcttgatgtactcagctgagaggaccataccctgggtgggcaggaacagaagcaggtgttggtgggaggcctcccagtgaccagcaaacccacagtgacctgcagctcaggaaccctgccccatccatttttccctttgggcctcgtgacaacccagctgtgggggctggcagacacgctgatcctgtcacttccatttcacaggtgggaactgaggctcagaggggcagtgtggctaatgaagctggtatgatctctccgcagctgcctctcaggttcttccatggtcaggctctgggctgtgcagggcagtggggtcgcagcagtgggccgcaacgggccttccagactaattcatgcctctctgaccaatctcttccagtgagcccagcgagcagggaggaacccccaaccatacacgcctctgcacactggcagggcaggaaagaagcccaggggccctggggtccatgacgtgggttaccttgtggcccagccaggtgccgtggtgcccctccacggggaggcgctcagcatcacccgtcaggtcagtcagggcatccttggggagagaggagacaggtgagggggcggctaaagaggacaggaagagggaggcaggcacccccgggggctgggagccatgggcagcgtaccttgggggacagggtcccccggatactgatcaccactttcttcttgtcatggtccaccgccacgtagaagggcgtttcatagacctaggaggcgggcagctcgtgagcctgagcggccctggtggggccacactcagggaaagtgacctaggcaggtctccttcctggccaggaactctggctccaccagccacggagcctctgccgccagaaaggctgacgggctcccagggtcactggggatctcctcccgatcccagccacaggcctgccctgccctccccgctccttgctggctctggcagccctgagtgccaccacttgcccctgagtccaggtgatggctgcccctccctgcttctgccctcaattcctttccctaaagggctagggctcggcaacccaaacactgggtgtggggttgatgtctgctttcccagccccagaggtggtacaggcaagccagggtctggggaagagaagggggccacctctggtctgcccagctagggatgcctggaagctgcagccagccagcaccagccaagcaagggctcctgccggcctggaaggatagcctcagcaccctaggccctcagctgcctgctcctgacaccaggccccagccctgcccggcctcaccgcatcatggcaggaggtatagacgatgtccaccgcagtcatgttctcgtccaggaagtggcgccggatggcaatggcattacagccacagcagttgtcttcctcgatggtgactccaggggcgaaccgcggcctcgcaggacacaggcaacacctagggtggggtgacaagagagttcagggccagggagtccccgagggaacaaatgtctcctgccactgtccctggaaccagttccagttgggcattcagccccactgcctctaccaaattgcccttgctaagtcctagtgacccccacgtcaccaaatccactggccactcttagccttcctcttaactgagctcttggcggcacctgaccctgtgggcccttccctctccccacctggctggggccccctcctctctgggatctcccctccgggcagggcctactcagcgatgcacccaacactgaagccctggggtccctctgggggcactggctcctccatgcactcatgcagtcttgtgttttagacaccatctgcatgctcaggaatccaccccaggcctgccccaacacccagatgcttccatccaatggcctagccagcacctctctcggacacctgacaccctgccagctctcaaaccccttccctgcttgtgtaccccaaccctcctgaggtcttcccaaggcccctcggtggcttggcctctggcttgcaactgtctgtggctcctcagccctcacccccacggccatgccactcggtcagtacacgtactcggcttcccttcagactcagagctggactccaggcactccctcacctcccctacccctgccctggcagctctgcctgggactgtcatggtggcctcgactggcctccttgcacttgcccctacgctctcagctcagcaacagagtggcccttttaagataagttgagccacatcattttctttttaagaccctacagcaacgccctgtctaccccacctggctctggtctctctgacctgctgccagcgtgttcagcagcacctgagacagcgtggcctggcccttgctcctctgggcctctgttcaaacgtcctgtcacagtgaggtctctcttgccacctcatctaacagccagggctccccaggcccccagcactccccatcccaggcacctggctttatgtgggtccaaagtgcccatccgctccaccatgtgccctatttgccttgtctatgcgctgtccgcctcctcgctgggcagtgagcaccacagagaggtccacagctgtatccccagcacccaaacagggccaggtacacagtagcctccccacagaaatgaatgaggcagcctgggagctgggcacccagctaggtgcagcggcacctcaggccaccagagggagccagcatccaactgctaaggcaccagacgctggagcccacgtgactgggcctgccagctgtcacgggatgacagctgagattttattaagaagcttggattctggtgatgctaggaggtttgtcttcactcagagcatcacctgagtgactattacacactttccaatggggagagactttgctgagaaagccacagtgcttgctggggggacaaagccgatgtacaatgggagagcatggtcccccacactgcaggtcaagtggtgatgggccagggtctaggggctgagctcctgtgctcggcagctgttccctctccaacctcagctgagcatgaggctgtaacagtgtggcctttggagactggaggcttgagtttgaacccttgctgtatcacttcctgaccgcaagggcctggaggtcactcagccattctaagcctcagtttcctcttctgtaagagcaggtggtgacagctacttcacaaggctggtgtgagatcaagggtccaagatgcagaaatggtctggcctataataggttcttaataacgagtggctcctcgcttctccggtgacagggctgcctctgagtcagtgatgtgtgggccaggaggaccagtcaggggagcagggccagcaccccggatgggagggccctggggctcatccagggcagggctagggccaagccagaagcaggcctggctcgctgtgctctgcatgggctgagaactgctgccaggggagaggcctgggcccgaggcagatgggcagcccttctccctctggccaggctgttatggacaggctggggcactggactctggcctcctcccaacaccctgggctgcaggcctgcctctctctgccccacaggcacctggttcttccaggcaggggcctggctgggccctcatgaggtctagggactctgctctctctgcaacactaaggcacctaatacaaatgccagcacccctcctgtctgcagagcaccagagagccctgcctgccagtgataccctgggttctgaaacaccctatgggcaggcaggacagataccacctgttacagtttaggaaacaaaggctctaagagctgtccccacaccaccagtgagtaatggagcctggtgctcattttgaagagttctctgccacagctgggactcccagggatgcaggcaagaatgccaggcacatgcagctgacaaagatgggaagggggcatgaggtgctctagtcctctctgatcagtcgctggagggatggtgagaataaggccccgagagccacccagctttctgaggacagggagggcgctgcagagtgggtgtggctgctgtgggtcccaagggcaggggtgtcaaggaaagaagctgctgcccagcatgccagcctttccagaacgggagcccagggaactgtcctccttctgcctggcatgagctgagggcggagacacccaggacagggaggggttcctcctggagcaggcgcccttctctggcccacttaggaatgcagagtccacccagcccccaagcggtgggctgagcgcagagctaggctgcaggccaggtctggggctaaggcctttcctagatcctatgaagaaggttggagccttaactaacaggccttcttggtgccttttcaaagacctctatggattgggcctctctactaggaaagtcctttcttctagaaaggcagagcacatgaggggagccgagagaagggaagatgtgggcagaagggaatggctgagggggcagagagagaacgccagaaggggaggggaggcagcagtgtgggtgttatgcaatatctcatctagccctctccaaaaaattccacgaggtatgtatcaacatctccacttcgcagataaagaaactgaggctcagagaggtggacccacttgccccaggctgcaagtgacaacatctggattcgaacccataactgtgtgactccgaagcctacaacttcactgctcagggataacacagaactagaaaggttgaggcccagagaaggtgtagaaaagaagccattcagggcaaagcagtaggcgcagcccggtagcccttcctcacacaccacccgggaggagaggtgcaatcgctgggggatgggacaggggtactcacgagcaggaccgagccagttggcagaggccgcaggcgggcttccgcatcaggtacatgggccacccgtaggcagccagggcaaagagcatgtagtagcagacctctttgtagcggagcatctcttgctagaagagaggaggcagagggcggtcacctcctgcccttcctgcctacagcctcagggcccagcagttccccagggtgggagcctgcggacccaacccctggcagggaggggttgctggtcccctgttgaggtgtggggcccaggccttggaggaaggacactcctccaggtgataattgcatttccctaattatctccatgcaaccaggacacgaatcctcagagacctgtcctgttgctccagtctcagaattaatgatttggggacagaaaatcacttggtccatttccttgcctgttttccagagaagggaagagttgagggatgtgagtagtaatccccccacctcggcaatcagccctgagaagggcccttgatgctgggaaaatgtagccctgagaggccccagccctccagctgggcggcgtgtgtgggccttgggcaacagggcagccacgctaggccaggagaccaatcaccaaatctctggcccttgggttctttgactgcaaatattgggagccttcaacttgactcagccagctgcaggctcccagggctccgggcaggggctgcgttggtgggagactgggatctcttgggagaaaggcaccagtttgaaagccagtgtgtctgaggcccagcagccactgttgatgctgaggaggttattggctgctggggtggagggaggaagaggcaggggtgccccagcaaagtgtctgccagcttccagtctttcccgagtgccccaggcaccgggagagggaattagtcaccttgtaaaagttaaggagggtggttagtcaccttgtgaagtgaaataggtggcaccttgatcagggcccggaggggtggaaacatccctggccagctcagctgctcttcaggaacgagagtggagaggtaattatcctctccctgtcagaagctccctgcagccctgggggcggggtgggccctggcagcctctgccaggtggcaggtgtgaccctggcacctcgatgggagtcacttgatgggagtcacagctgcctgccctccccgctccctgtgaggagtgggagggagaaggtggtgagaacagccagggcagagcctggcaagcagaaatgggctggtttggggcacttactatggatgtggctatttttagagaggatacaaatgcctgctttagtggggagtagggacaggcagggaggactgaggcttttctagaggactgagtgttggttttttttttttcttctttttaagggacagtgcagctggagtgcagtggcaatcatagctcactgcagccctgatctcctgggctcaagcaatcctcctacctcagcctcccaagtagctggggtcacaggcatgtgccaccatgcttggctaattttttttttttttgtagagacagggtctcactatgttgcccaggctggtctcaaactcctggcctcaagcaatcctcccacctcggcctcccaaagtgctgggattgcaggcacaaggcagcacacgtggcctaaaggactgagatttctaagagacggaatcctttccatcagcatcctggctggcaccgaggcttcctggcactgtgatgggaatggctcgtgtcctctcagcacagctctggtagaaggtgtgcctagtgtcatttcacagattcaggatccagctcagaggggatgaggggcctgctggaggtcgcagcgacaggcatcagagcagatgcacgctccagccatttgcttcctgaggcagggcctgtttctcccggctgccagctgtggtttcagcctgggctgtactgggccctgggctgtactgggccctgggctgtgtgctgggccctgggctggggttctcccaccatgttactggcaccacctttccctattacacactggatttctacgaaaggcgattgagaaaaggttccactactaaaaaagcttggaaaccaagtactacgcccattgcgtttcattaacagcagcagcagcagcaaaaatgctagcagctcaccctggtgaagtgctctgtcatctcaagaggccaggaccagacacttctgaacttggtaaaggaattcaggggatttgtctgtcgaaccggtgtgaagtgggtggttctcgtgaggggcatgatctgagcagagaggctctctggagagccggggggagaccgggcaggggcaatgtggctggcactgcaagggcagctgggaggagtttgcttaggtcattgtggcagagtgggagggatggggacggggtggggtgagagttgatgtctgactcactgaattcttgaggtcgaggtacttggtgtttctggtcaccggcatcccagacaggaaggccaagatgtcattgtttgcctgtaagaccggcaggtgaagaaggacaatcactggcccaggcccggctgcatggctgggaaagggggcccaggccctggcgtccgcctgcttcccaaaggccgagaagcccaaacgagcatgcagcttctagttcttccaagattcagccacttttccaaaatctgaggtttccccatatttccagatgctccccttctacccaaaacatcaagcccctgaggacattcctggcccacagcaggcgaaaggtattttgtatgagacactgagaaaccctaactggggttggtgtgctggtggggatgtggggtgggcggagcggccacgcagaagaccgactcgggagctcaccacgtccactaagcctgtggttagaagtcctttgagggccagccccagaggcagccatgcacgacccagaaagtccctagagtagtagtcacggaaagcctggccgaaggacaagctcaggaaggcagggggagccagaggtaaaggtgacctccagggtccaagagagtgcgtggtcactggggagctgcgtgggagccgagccctccgctgcaggggccacagggaaggggcctgaaagaagggtggtgtggagaggtgacctggagaaggggctggtggtgctcacctcgtccagcacggcgttgcgcttggcccgctgccgctgccggagcagcaccaggccagcaatgatgtcggatggcacaatgtcaaggtcccggaagaactccgcaaagaggtaggcgatttctgagtaggcatcctacgaggtccaggaaggcaggaggcagtggcaggggagcaggagagaggacgagaggccaggagtaaatcccccagggctgggaggctgcagaagcaggtgtctgctcggggtcccctggacaggttctccccagcacctccacagcgcccactgagcctgaccccatgtggccctgtgaccctgagggccctgcccagggctcctagacctggcagtagccacccagccctctcctctccttggaattcgcatggtgcccactgtctaccaagagcaggcgccaacttgagccactcctttttgctttcccagacgctagaatcaaggccgggtggctctggctcatttctcctctagccattctctccagcacagaaaccaaactaagctcctggctgcctctgacccaccagctgggaccttggaagtccctcgtaaggcctctgtggagcctgccaggtctcagggcccctcccccagctacccacaggctgctggctcagtgacccccacaatgtgccctagaagggggtgtactctctggcccagtggtcccccatggcttctctccaggcccttggcctgaagacagtgcatgtctgggcctcagggcaggaggcgagccctgctggctggtgccctcttagtcttcccttcctggccccaggctgcagcccagagcctcttccctaacctgttaggagacgctgaggtgggaacaaccacatggcaatgaagtctgtctcactgggtctcgcccctgagtgtttggcacttgtaagtgactaaatcaagggctgcaaattcaaatgccgaatggagccaaacggagccagatactgctcggctccagctgaccggaggccctccagggcccacttcaccagattcagaaatacagaagtttatggaaatacccctgatttttaaatgctggcatccaattaaaatgtgtaagcaacacaacacacgctgatcaaaacatgcttgggaccagacctgccccctgaggccatcagtgtctaacaggacctttgccgtggggctctgctgtgatgtgctatcttttccccagactctgacaacagccccagctctgcccgtgcacccagaggggcaggcgtgccctccacacagcagccccagcctccatccgccaggggccggctctctgccctctgcatggcctgccttgcagcccagacccctcagaccgccccagagagacccaagggggtgctccccgcccaccagggaacctcgggggctttcttacacttgattactcactctacggctcaccaggggacgctggtgggcaggagccactcgaggcttcccggtggcttccgtggaaggcactttgctgtctgcctcagggaggagtggtctcctgacctcactggctctgctactaactagctgtgggacgctgagcaagtcactccacctctctgggcctcagctgcctgatctgtaaaatgaggggtgggactagatgatctctaaggtccctgcccgctgcggggcacccctggatgatcccggggcctgcctcccttccctccccttgggggccgcccccagctggccctgtcttccttctgcagtgccctggcattaagtccggccctctggtcactcctctgagctcccaggtgctgaaggctatgtgtccccatctaggaccgtgctaaacgcctatcggctttgccaggccttcttgattaatttgctgctggtgaaacgctacttttctttgtcttcaggtcaccctgactttgcatatttcttctcctaaactagagtataagttccaagggagttgatgcagtcttcacagctttctgttcccttgacaaagcaagtggacgtggtcctgcgtgctggagcgagtggctcagtgaataacaggccctgtgtgagcaggccatacttgctcacgctggaaacccagctccttcccaccagccctgccccatcctgctttgccaaaggagccaacagccccttaatcacctgaccacaggatgtgagccagaggggagcgacctcccagtacttactgactgggagtccttcgtccgcgtgcagcagaggaacactttgagccggcgcgaccagctggtggcttgaccctcctctaagcggtgcctgcaaagcaggagaggcggtatgtgtgaggtcagagggctggaccagaagagctgggacccagacgttatggaaacagggcaggctgttcccaggaccctaccaaagggttcccgcagtgggttctgggggagaacagggcccaggccctgccagagctggtggccagtggcctggctgctggccagcaggggccctccctgacagactcctgctagcctaagatggtgtgtgccgttggccaagggtgggtgggtggaagagagaggtggggagcagttgagaggctccttggcttttggaagactgaacacaggcaggctctggggcttcagagctgggagccctaagtgggggctaccctgcagctcaggtgtccaaaggctcaaaccctgggaggtcagcagggtgttgggcctccctgtcgtctcattctaaggcctggaacagaccttccagaaagacctgcttttccccagaaaggatttcagacacttacatacttacatactctacttacaggaaatctatggggctgagtaaggctctgcatttcccaattccttggatctgatacctaggtagggagagggctctacccctcacccacatggttgcccttgtctattctcaccccccaaccccatccccagtgggtctggctgctcagatggagaatcagggtctccaggagtctgtacccaaaggcagagcaatgggccagttattcacagaggttcctcctaggctggatgtctgcagtcagtgtgttgagcataaagataacagatccaacattaaaagtgcagacctccaaaccgagcaagaaggggctagcttgcttttgtgccatgtgcggccccttaaaagcctgatgctgggtggtcaggagaggaaggcaagggtggccctcatatgcattcaaggcacttaacatcaatctgtagtgacaggccaggccctttttgagcctcttggctcctccgtgtgtctaaggaccgcttcccgctctccaaccctggcttcataaggcaaatggccacaaggagaaggagggcaacagggtcttccagggctacgggaggcaggtagggaagggtgcagggaattgctactctggggacctgctggctcttagggacttggacagctgtacatcctaaaccaatgtcccaccttctggggcatgaagggacagtgtgctggccaagcagggttcccagagcactgtgggatgggtggtggtggccagctgggctgggagggaatatgggctttggggccttggctcccagacctgacattttgggctgggacgtggccacagcaggcacgggtgtggctctggctgcagtgctgagctgacgtggaaggtccacggggagccgaacacagcagtgcaggagggtgggacggtgagaattcctgccgggcagcgggggtccagacagcctgctccccaggtgcttgagccagctgctctgggctgcaggtgtggtgccagttctgcaccccagcagcaagacccacggcaggtgacctgccctctctgggacttggattcctcatctgtagaatggatctcacaaccatgccggggttcacaaagggattaaatggatgaattgcgtaaagggcttggcatggggagctccttacataatgcactgtagaagccccattaacaggaggtactgggacccaccctggaagcccctctctttttctttcaacaaacaaattattgtgacactacctggatgccctccctcattttgtctgccatggcacactttcccccatctttaaaacatcatgcaaaactcaccccctctaggaagctttccttgacttgcctctcccaatctctgaatcctagaggcagcctagcctaatttaatagctagttaagcgaggactctaaggccagactgcctgggctagttcccagccttaccattttctagctgtgtaacctcaggcaagtcccatcatctctctgtacctcagtttctccacccatattatggggaagttgacagctgtgtggtggacttgtaacttactacacgcaatgcttggcttcactgttattaccattgttattatcagcagtggacaatgatgacaacaactactattaaccgagcacttacccagtgtgagcactgtgttagtcactctgcaggtattagctcagttaaatctcacaacaacatgagacaagaattgttattattcccactttatagacaaggaaactgaggcagggagcagttaagccctttgactaatgcccacggctcacacgaggttggcatgcagtctgggaggcctggggtagccttctgaagaatggagacctctgcccaccagacagcaaagcccaccctgggactgcccacccagcccgctgactgaccgcaggttgtaggtccgcaggttacgctgcctcctcttggtggctctcagcttgacaaaggtgcggcccgtggggtcgaagacgcagaggacagtgatgcacacactgaggatgactacccagttgcagacaaccattcctgcgggcagcagtgggaggcattaggtaggggcgctggggacacctctctggctcacccgctctgaagaaagggacattggagcctccctaaccccaaatgcttctggggacaaaagccaggctccaaagcccctggtcccagtctctggccacatacgtggccaccctattgcccacccacaaccccaagggccactcttggctcagagcaggcagctctgtgggtttccaaggaggtgctgaggagcctcggcttgacctgagcagctctgtgcctgctgcagcccaccccagaccaggtagctggcaggcctcaagggtgagggaagcagtctcgcccagccaacctgctggtgcccccacagaaggcactgccctctggcaatgcccaagcttcttcctctctaaactgatctcatcccctgtgcccccggggctgctgaggctccagcaggcctcacccagacgtaccgagggtgacattcttggcagtgaggtcgttgcaggaggtgtagtactgagtgagccagacgatgcccacgatggcgtagatgaactcgatcaccaggatggctgcaaggagagcaggcctggctgaaggatggctgccacttgcatgccagggaagggcctagaaccccggcctggcctttcctatcgctgggctttcagccagctcagtagcaaaggcagaggcagcgggccattagcagaccccccaccccccgcctcccaggccccaagcccgtcctgtcaccatttggtcctgttggcccctgaatgaccgcttgcaatgtgcccaccacctctcctagcttctgtgctctcaagtccccggggcatccctgatggagttttgctcttgttgtccaggctggagtgcaatggtgtgatcttgactcactgcaacctctgcctcctgggttcaagagattctcctgcttcagtccctagggtagatgggattacacgcacccaccaccaggcccagctaatttttgtatttttagtagagacggggtttcgtcatgttggccaggctggtcttgaactcctgacctcaagtggtccacccgcctcggcctcccaaagtgctgggattacaggcatgagccaccgcgcctggcccatttcctcattctatcaggatctcagaatcatgtctgaactgtggaatcagacacatcttaggcaagtttcctaatctctctgagcctccatttcctcatctgtaaaatgggagtgacaacatttatgtcataggactgtgcaaaaattagatgagagcgtgttcacttcatggaaactatttcccagcaagaggcctctggaacctgatggaggagagaggaagggcccagcagctggtctgcatccagctcaggcccctcaggggctgagactggaggggaggggtatggagtggtggctgagaaggagatctgctggcctcatgggggcagcctggaaagccccagctgcacgggcagcagtgtggcagctcagagaccagactttggagccagacagcgtgggttcaaatcccagctccgacatttacacgcttactagttgtgtgagagctaggcctgggccccagtttcctcatctataaacggagaccaataacacccactccctgtgagttaacacaggaaaaagggcctagcccagtgcacagaagcacaagagcagtgttcactacaaatgaccagaaggggctgcaacctaagcccaagaagaggacacaggctggtcctctggggagctggcccagactcctgagggggttcccaggaagcagaaggcctgttttgagaaggatcacaaggaagatatgctttgaagagatgcacatggttgaggatggggtcagcaccttttcctgtaaagggccagagagcaaatatcttggactctgggagtcctacagtcgctgtagtaactactcaactcggctgctgtaggggcaaagcagctggagacaataccttactgaatggatatgtgccaataaaaccttattttctttttttttgagatggagacttgctctgtcacccaggctggagtgcagtggcgcaatctcggctcactgcaacctctgcctcctgggttcaagtgattctcctgcgtcagcctcccaagtagctgggattacaggcgtgtgccaccacacctggctaatttttgtatttttagtagagacggggtttccccatgttcgccaggctggtctcgaactcctgaccttgtgatccacctgcctcggcctcccaaagtgctgggattacaggcatgagccaccacacccagcctaaaaccttatttaataacacatacagcaggctggatttggccctcaggctgcagtttgctggcccctagtctagaatgtaagctacagaaggccttagttcactgctgtaccccagtgctaaaacagggcctggctcgcaacatgtgcgcagtaaatactggctgagtgaatggagaggtgggagttgtctggggcagcaccccagggtgggtggcccttacccaggcgcacgtagagcacgtactgcatggagtcacggggctccgtgtagaggatgcccccgcgcatgctcagccagatgatggccatctcagcgatcatgcagctcagcaggatgcccaggtagccgcggccgtggtccaccaggttcagggagcaggcctcgtgcgggttatagaccaggccgaagagcaccacggacaggatcacaaacctgtcacaggaacgcccgtgtgagcaaggccaggtggcccctgtacctcgagatgctactagcaggcaggcccttccccagcccagattcagtggaaggagggctggcagcaggcacctcctccataagaccattgtccacctggcatcgaatgcctagaagggcatgggcggccagtaaaagactcagggtcagccatggggagacagtagcagcaactccccccagtgttggggtcaggtccagcaatggtagcaggggtgtcattgccctaaggggctagatgtttcaggcacctcctccgggcagctgggggcatgacagggttgggacttgggcccaagcagggaggaacaaatggccagaaagcgtccttccagacctttctctccaaacccaggcctgtggccccgggcctggggactcaccaggtggtatgcaggagaaagaggaagatggccggtaggacgaggtcatcactgcccacagaccagcgccgccggaacaccacgatcccgggcatggctggtggctctgcagaggctcagtgggcctggtgctcacctcctgaaagaaagcagaggaccttatagctgcctgaggaggtgaaggcacccagggccactgcattccttgggccacgggaccagtccccggtgtggccagaagcacaggcatttttggagctggccactggaagtgctgacccacctccgggcaggagccaacacaaaggaccttagcagcaggacacagacttcagccttccccctggagtctctcctgtcccccgagactggtactggccactagggatcggcttctacctggggttaccccagcagtcactgttgagctctattaaagaccccgtttcctccttcatgggatcagtgggaccctcagcccagccctcaaaccctataatctttagacctggcccagtgcacactgtccttggagtcaagggaggggcttcccagaccaagaacaagcccacccaacagcacaaagcccagcagggcaggaggaaggctgaaggccttgggaaggtgggggcaagggaccctgtatggttggcagctgggactgacaaacatggaaggtgaggagtgcctggcatagagcaggtgctcagtaagtatttcttgaatgaaggcttcagtttcctgctttgctggaagccaagagcgtgctctatgacttggttttgaacccatcagacagaagtccccaccacagctatgcctccagggagggaagagcacggttgaggtgcagggtcaggagtagggcttgggacaccttccaccccacactgctggaaggatggggtaagccctgcagggtcacacccctcctggcaaccatacctcccaagcccaccctgagccatgcagcttttccagctggattttcaactctctgaagtagctgaattcaaatcagccccaagcaagctcaggaaagagtgcccaggaactcagggccctcactccttagcatcccaaagagaaaggaagcagcatgggtgggaggtgaccccacagggagctaggtccccagagatacccataaagggctccagggtagctctgcactaaactgctgcagggggctggggaccaagttggtgggcagctgtcccccgccgggggccagtagaggcttacatggcacctggtccggggcaggcggcagatcctcctctccccagtggcggctccagggaaaatgtgtgtccgaggagcccggcatcattcggggaggaagcagccaagtctcccttggccagtgggcatagcccccagggtgggcgagagggcgtggggccaggtggccagcccgcatgtccgcccggcccgcctccctatccccggtgcagccacttggcgagctgtggcctggcgggctggcgggctagcctgccggggtcgtgcctactcctccccccaccctcaggaagtgacatcatcccactctctctccaaggaggagtcggagctcagcttctgggaggcagggagaagggtggagagtgagggagcatggtggtggggtggctgggctttgggggtggggggtggtctgtggactgcaggggtccggggcgtcagcagtgcctgtgacatgtggctgacagcaccagcttcagattagggttggacacgataggacaggagggggggctggggcaccgtgggtggcagttgggctggggcagaacagagctgccaacagctggtattgccgccccctccctgtctccaagtagctcacagagggtaaggtgcagcgctgggtcgggctcagggggctgtcggggctgccaggagcccctcacatgaatggaacagaatgaaatggaatgaatctagaggctgggggggcagtacgcccccgcaggtgctgtagagccgcatcctgctctgatctggccagaccaggggaggagggagcagtgctgtcccagaggggctggctggagggctagggtctggccctacccagcctgcccccaggcctgcctctgccagcagccaagaatatctccttctcaggtccaccccatggatggcccctctcagtcaccctgggaggtccctcctctcactcccacccttggacccatggaacccaggatagctaacactcctcgagatcacacaccatccacccaacacacacactcactctgcactcccctcctctgcccgaacaatgcccgctcgcttcagctctcaggctggaaggagtgagccgaacctggccctgggccctgcagaggtgaggtggctgaaggactgtcaagacgctggagggatatgaccagtggtaaccactgcccccacctcagggtgaccagcctgaggccaattgccatggtcaacagcagtacctacctagagtatgaggcggggctcctgggggccgaccctgctgggtacccagtgacaggcctgcaccagtggccggcccaccaccatagaatccgaggcacagaggctgggacacaagtgccaggctggctggttttgaacctgggctctaccacgtacccactgtgtgacttattagtcgtgcctcagtttcctcaactgtaaaatgtcgatttgtaaaatgtcgattatccctacctcctaaagtcctggtgagaatcacatgagaggtctgcagaggctctagctgtcttagctggggcgggcgaggcggagggagtgcaaggaaccccttgctggaccagccacccctcccgcctgggctggtggaatctccggctggtcaccaacaagtcaaggtctggggtgggggtggcagggcctgtgctgcataagggttgggggtgggctgcaccactctccaggccaattcatacatctcttggggctatttttaagggccttgaatggtgccctttctctagagaccccggcccatcacaataagggcctgttcccctgctggggatgtgatttcatctggaggaaatgtctcaggagcggggagggcagaggctacttcctggtctggggctgccacaaagcacctcttctggctctcctcccctggggcatagggtcctcccctctaacagccacagtggggcgggggtaggcgctgcctgcccttcctatcccacaccagtggggcttccagggcaggcacggcataccttccagcaggggccacaggggcactgctgggggctcctcctgcctctggttggacccccagcacaggcaagtgtgaatggggtgccaggacccctctcacatggatggaatgacttaagcagcccaaggaagcctccttcttcccccacccacacagcccaattttcctgctggtgattcaggcccctggactaagtactaaccattctgggagttcctctttctaaaaatgcaaactctttttaaaaatgcatatgctgccccctactttaaaaaccttcctggctccccatggcctgcaggacaaagtccaagcccctcgggcggcagcgacaggcggtgcaacctcaggcatatgcctcgccctctctgaatccacgcattcccttatcacctgagcagaaagcgatcctggtgcagacagactccagcacagagcccaccctcagctgacaaatccttctggctggagaggctctccagcaccttcttacactgccacatccttctttctcgacaccccaaacatgctgctccccagaaacacatcactggaagggtccatgctttgcttactccagttctgatgggtgaaatccaactcatctctctaggtcagctaaaagtcacctcctctttgaagccctccctgacagccctcatgcaacccactctcctcctgggaaacaggctgctcccttatgggaaccctagaccccttcccccagcatggccctggtcacactgtgttacggttaacctgctgactccttgctgcccatccccaccccagctcaacagtccccggggccagggtctcacagtacccatcgccacacctctgggtgccagctgcagtgcctggctccagcacctcagtcccaccccatggcctcctcagcacagctcccctcccagtcacaagggctgagacagtggctccttccccctctgagctcacacccttcccttctggggaaacgtccctcccttcctgactgtcaggctgggttcccaccccagtgtcttccctgacagctcagggagaaccctctcccccccctctggctagatgaactgttctgggacctcagtttcttctcttgtaaaatggggctaacaacatccctctcaaggctgtggtcagaacagactggggtgatgtcactacaggactctgcacaggtcctgcacaccccaaggatctgctgatggctgctgttgcattagcagacacctgaggggctttgtggggacctcctgtgatgtgacctgtgactgggtgctggggtctggaaggtgctgctggtgcccagctggtcagaaagggctggagtgagcaaacagaagccctgaccgaggagcctgcccccaccatgagtgctccggtgctgctggtaaaagcaccccaggctgggcctcgccccctcgtcctaaggtaccctgtgggcttggccctgggagcagattttaaggagcagagtcccttggcagcaagactcccagcagatggggctccaagagctcccagggggatgggggggaagaaggtactggctcagccctctggagtgtccacagggaactggacaatgagcttgggaacccccgcgagtgccacctccagcccatgagatttcccatctggccagagatggctttggtcattggcctggggatgggatagaggttgtgcctgaaggaggggatgacagccaggtccagccatagggatccatctgacattagctgagcaccttctgtgtcccaagtcctggactaaccggcttcagtcctcacagcagtaacacagggtcgcagtgtcgctctcattccacagtgtgtgcaaggggtggttaagaccctgcactctaaaacaggctgcatctgagtcttggctctgccacttactggctgtgtgaccttggacaaggtacttaacctctctgtgcttcagtctcctcacttctaaaccagggataagaagagtacctacctccgaattatcaggagggttaaatcagtcaacacttcaaacagcgcctgtcatctggtaactgctcagcaaatgctgccactgccattactattactactgaagaatgagactgagatgcagagactgcctgacaccatccgaggatcaagaggccaggcaggcaggaggcgcaggtcattcctgctgccatccaaagcccacacctaacaaaggtcagagttaaaaggagtctcagaacagtcccactgtcccctttcatgggcgaggaaactgaggttcagaaagaacacagaggccctagctcttcccgtgatatccatcccagcagcgtcactgccaggtgctggacacacaacccaagcccccaagccagcctgctcccttctacctcactacataccccactcaaactccccagtgacaacagcattagtagcgtgtcaccacagggagcctgggctgagatcctctctttcacgatcttgaagatgcctaaccctcctagaagccagcaacatccacagaagctccctcacaggagataaacctgtagggaggcatcaaccatgtgcctacttcagtcacctgcggctggctctcctgcctccagcggtggagtccctgttgctctgcagcagctgtggtgacagagaggagactctcagacagatccagagagccaccttccctgggcccccattttactcctgcctctgggggctggtgatggggaccaggtccagccacatcctagagctgcctggtgctgaatgaagagcagtgtccccaggacagaaagtcccaacccctctaggccccagtaaatcaaaattgagggccgggaggatgagtccattgcacacatgtgagacataagggcccccacggttgctatatgtaaaactagcactggacgccacacttcctggttgccaaagtaaatgtggaaactggcaagtttgtaagggctctttttcgctctgcagggttttttgacccttggtgtcctgaagggagagcccaggactcccatttccatgacgaatgggattcctatgtgaaagggctttgaaattggaaggtggtccaaaatagtggagaggaactgatgcctactgcctgctatgctctcgtggtccatccgattttgaatgtgccttgttgggcactggagcttatctggtctgggggtgggcatctgatctgcgggactcagcacagtgaggctgggccccccagtggtgccccgcaggacactggtggcccgccccccagcagaggcgttgtgttcagaggctccaccccagctagggtgggctcaccagcaggtcgctgtctggcctcgctgggctggcagacaggtcctgctctctttagcacaggctttggtcgtggtgagattccagctgttcactgtggctgcaggactgtggtagcgagttaacctctctgcactggtgaaactgcaggctccaggatcctgggtagtgacagggacagaatgatctcagccacctataagttggggactgggctgcttcggttctcctaacatttatgaattgcctacaaggtctcggcgcacatctatgccctttacaaacatgaactcacctagtcctcataacagctctgtgaggtaggtactacccttccccttatttgacagatgagctgaagtgacttgcccacagccacacagcctaggcccagaacccaggtctttacctctgcatgctgtttctgagaagcaggattcagctaaatgcctgtttctgaactcaaaagctggctctaagcctcttcttacagactgaggagctctctgggtcttcatctagcttcagactcacaatcatgtgggatagcacgggacccattctgcagatgaggaaaactgagcccaggggaattccacggagcaggctgtggagtcgggagagagcaaggcactagaaacactatgtgtcatccacctccagcctcatcaggccacagggtattaccccaactttacagatgaagaaaccaaggctcagagaggcaaaatggtttgcacgaagatccctccacgaggacatcgcagagctgggatttcaagtagcttccttgaactacttgcaagaaaaaaataccctctctgcctgtcagtctgactccttattgtcacaaacacagagacagtaggacccacaggtcccaccccaggctcccggggctacagtaccttccccttcttcccagtggccgagaggctggcctctgaaagcacaggaggggagaggtgacaagggagacgacggagagaaagcacgtgtgggctgggggccacgtgcgccaccagcctgtacctgggtgtgtgcaacccaagttaggggcctgaaagctgtcgcttttcacacatcagctgcgctagagcagaaggcagagcggagcctgcccaggactggggccagatttcagcatgagataggtcctcacacgcccaggcctagggatgaaaacagtgtgccttgtgcagccaggggcaggagtgggaggccactgacatttgtcccctcctacccgccgcccagggtcttaggctaacaaacgcctttcccactctcccccaggatggcctggaaggaccagaggaggcacctcctccacccctcaccatgtgccagccacataaccatcctcactacaaccccaggggtgggtctagctgttcgcatgtcatggatcgggaaactgaggctccaagaatttaaagaagctagcaagtgagtgtccaagtcaggctctgaagccaggtctacctgctgtgttctctctgtgccctcctcgtgcttcttggccagagacccctcccctataaaacagcagtcagggagctgggcacagagttcagggaggaggacggaaagagaagctccagtgacttgggggcaatgccagcctgggccggacccagaaatagttccaacaattactcgatcgtgtttatttaaaaacaaactcttatatagcatttactacatgctggttactttaacaagcagttcacaaaaattacctcctttaatgtaatccttttaacaacctcttatgccctgtattatggatgaagaaatggaggcccagagaggctaaataagttgcccaaggccattcagctcttcagcggcagagccaggcctgaggttgcagggcctgtgctccaggcctctccccagaaggcttcaccagggctccatttattaccaaggctccagctactcgttctcacgctaattattttctactcatccacaatgagcagaatttgccatctgccaccagccctgctactgacaccagccaactccctgggaatcaattgaggcctttcgtttcctgctggttattttggaaagatggctggctgctggggagcgggaagtgagggccaggagggcagcagcacccttccctggcgaccaggctgggccctcctcctgcccccagccttcctctgacctctcttcccagggggattcacatcagagcccactcagtcctgtgctccgacaatgttttccaacagtggaaggagtcccccaggctctggccagaccaggtctggcttctggattcttccttggagattattcatttttctgaaactcagaacaagcccttgtcccacacgtccacatcccctctggagaggcccagacaggcgggttctgctggcctctgtgatgggtgcggccgggcagcctggatctccaagccctcacgcaaaggccgacaccgccccacactgggtggcaccaggctgttttctcctgcctgtctgtggggaagggtgtctgtggttttcgtcctttctacctgccccggtggtcttcttggtcagtcccctcatgccctaacacgtctttaccccactctcccgggaacgcgactctctcaaaggcagcgacttggagggggtggccatccaatgagctgaccgaggcctgccttctggccccagagcagggcagcccgaatttgaatcttagttccatcacttctagttgtctatgactgtcacttcactgagcgtcagtctcctcatctgtaagatggaataatgaaggtactcacttcatagtgagtgagtcatgaggagttaacgaaataacgcacataaagtgctcagctcttagaaaacaggagctgccatcattgtgatttagtaaccatgtctccccagtgtgcgcagaacctttacctcaccttgcatggcaggggcaataactctccgcgatctaagtcaatcttcccaaacagacaggtgagcaggctgacccacacctgccctcacccttccagcctgcataatcctctgacttgccttcttggaaagggagagctccaactcctaggagcccagcacggccgcactggcactgcctcctttaatccacaaccacccagggagaggggacccaacacccctgggacagcttgagccacagagttctcgcccaaggccacaagactctagaacactccaaagcctgagatcctgccaggatgccccgcatctatcagcttgcatgtttgagtttcagggtgtctcattgcaggccccttcccagctcaaacgcaggatgccctgagaggtagcggtcccccctccctttaagcccatctgcccttccagctttccactggccccaccctctgctcctccccccagagtcaccccctctcctaggagccacttgctgggacctcactccccagatggcccccctgccaggcagttcatcagctcccagcacgaatcccagcgctctggcttctcagaacttccttgagaggagactccgtctgggtgctggcaacgcctcagtgaagaattagtaccttccacttcattaggggccccctaatgaagctgttaatgatatgctaagtgggcacacctagcctgatgcctcccctcttggggcccccgcccccttgcccagcctaccctgagccctggtcctgctgcctcctctcctcaggctgtgggttggccctcggggtctggctggtgtgggtgcctgctgctcaaaggtggggaggcttcgtgggccacctccctaagctgcatggccatctagggcacaggctggccaactgggctattgggtttcccttcgactgtaccccgggcatctcggaagcaagcagggatcaagtgacttcgtaacaggagctctttccccaggggaagaggttctgcagagctctagtatgtgacaggaagggccaacatcccctgcccccacagagactggagagggaggtggcacctgccaccaccaatggcacacaggctgcagccccgtcccctccctctgtcaccctcctctccttctgtgctcaatgagggggatctcagtgctcttcagtgggtttccagaagccctcagggaccccagatgaggggaggtggccatagtgggcaggcttcagtgggcttgcaggcaatgtcaaccacagcagctttcagctgctctggatcacctgaggtcaggagttcgagaccagcctagccaacatggtgaaaccccgtctctacaaaaaattagcggggcgtggtggtgcatgcctgtaatcccagctacttgggaggctatggcaggataattgcttgaaccgggaggtggaggttgcagtgagcgaagattgcgacattgcactccagccagccttggcctcccaaaatagctctaggtgacagaactagactctgtctcaaaaaacaaacaaacaaacaaacaaacaaagtttgaaagccactaagcaggatatgctctcaggtccattctagtctggacttttagagttttacttgcagaatggccaaggagagagcctgggggctacatacaggtgcctgagctcacacaatgatcacagcatttcctcccctcgcctgagccaggagggcaaaaggggccacagaaaaaagtcactgacccagaagcttagagacctgggcctacagctgactattctgtccttcagacctccctatcccctcccatcaccccaggcagggcaaagctggacccaagcacaaggcctccaggaaggggcaggggctcagaaggcccctgctgccgggtggaggacaggactggacccggctttggtcccagtgccttgatttactcaaacggccacagagttgtgaccttcaatatacaacgcagccctctcctcgtctataaaataggatgaggatgatgacagtgcctccctcttggggtggctgggaggacaaagcgagttaaaagttgtaaagtgtgaggctgggcgtggtggctcacgcctgtagtcccagcactttgggaggccgaggcgggtggatcacgacgtcaggagatcgagaccatcctggctaacacggtgaaaccccatctctactaaaaaatacaaaaaaaattagctgggcatgatggcgggagcctgtagtcccagctactcgagaggctgaggcaggagaatggtgtgaacccagcaggcagagcttgcagtgcgccgaaatcacgccactgcactcaagcctgggcgacagagtgagactccatctcaaaaaaaaaaaaaagttgtaaagtgttgaaagcaggctctggctcagaggaggagattggtgacatagagctttaattaaatcaacccccaagtcgggcgcggtggctcacgcctgtaatcccaacactttgggaggcctaagcgggcggatgacttgaggccaggagatcgagaccagcctggccaacatggcgaaactccatctctactaaaaatacaaaaattagccaggcatggtggggggcacctgtagtcctagctacttgggaggctaaagcaggagaatcgcttgaaccagggaggcagaggttgcaatgagccgagactgcgtcactgcactccagcctgggcaatagagcaagactcagtctcaaaacaataaaataaataaataaataaataaatacataaataaattcccttctcaagagcctattatgactcctaaatgccctttaaataaaattaaaactcccaaccattagctataaagctctccaccaaccacacccctaccccgccctgcccagccctgccaccagcacccataccctccaccttgtctgactctgtccctgccggccgggcacgcccactcccagctcctgtctttccacctgctcagccactgagtgcgccccatgcccaggcatttcctcctctccagatggccccgcttgctttgggcactccgccccgacatggcctccacagcctgcgaggcctgctcagtgcctgtcccagctggccttcagccccagccctggcaaaccagcccacaaatgaccaggtaagcccgtgacccactttcctgcatgcttctggtgtgtctgcctcacctcctccattacactgtagttcccaagaagaccctggcctccatctgcctctctcccagcctgtgggggaataggccaggaggctctgggcaacatagagactggaaaggagaggggagaacaggcctccacgatgaggggaaccccatcaggcccctgacaagtgccagcctctgcctgcccatgcctgagcaaggccactgacccactctgttctgggtaggtaagtgcccatctgctcgacctctgaccccagaatttggcatcactttccttcccaagagactcgcccagccttgtcacgctgtcacttctgcggcctctgcttcccgacctgctcagggtgtggtgggaggtggagctggggccacatgctcggcacagcccctctggccccagtggcacttcactcccacttcacgaggacacggcagggagggggcgggagtttggcagggcttcatccctgtcaaccaggggctggtgccctcggcccccctaactatccgcagtggggaaaaggcaggctcccgctaacccctgctggcccaggggaggtcagtgaagctgctgtaactccaggggatgaacctttccgtgaaggagctgacggcaacgtctgagagagaccagcagtgctaatgggatgcccagctggggctgtcaagccagacaaggtcctggtgagaccggcagaggccaaggctcctgccaggcagaaagtggcacctcgtctcctccagggtttggggaggcaatctgataatgcctgcttcctcagcaggcccagtcctaggaagactctggggtgggggtggtggtaagggagtcagcgagagctaggggacctcggcggggtcagcctgcgtcacagctcatgctgactcctccaccttcagtggccgccggctgctataaataccactcctgtctctggatgttgtgggaggtgacctagaatcatgggctctgaggcctcctgggtgcaccccccgcctgttttagacagagcctgacgaccagaaaatcctcacaggttagagcccacccccaaccacgagcagggccctcggccagcagataaaaccccaacactgagggagatggcttccaaacctagagcttcctccaacttgcacctcgacatgttcatgggtggggtgcagacaccaggtccctgggagcagagccctggccagcccaagacccgaaagagacatggcacccagggccattggctcagcctgagacctgctgccattcattctcctccatgcccactgccctctggagcccagctcaagggtgaaggctccaaagccatttgatcctgagtcccttccccgcccccaacttctcagtcctacggttgtcctcgattcttgattcagcctggtttccaaacttgtcaccaccctggaagcctccctggggtgtactctacttcgaaaggggccctgttagactgttctgcagttgctcagatgagtccttgacgatttcattcttccatttggtagcacgcttctgagtgagcccttccctcctccagagatcccagacaggcccaggcctcaaaccccaggctgggctggcccaggagcaaggacaggaggtggtcctggcctcggcaggtgtgaagacaccaacacccacagatggccagggcttggttccagagtccctggtttagggcaggggcaggctctcagagtagaaaaggctggaaacagccctgagggtgggccctgggtggtgtgaacacaggtgaaatctggttaaagtcaagttagtgcatgcagccattctccatccatccacaaatcaccagagtgcctactatgtgccagggattgggtggatggtgacaaaagccgacatggtgccagcccttatggagcctgcagaccagaaggaaagaaacttcaagtgaaccttcacatacaacaaagaaaaatcctctgacacgtgctcaggcggggaggctgcctatagaactaggagctggagctgtttctgaaggactagcagagggaagcaaccacaggagagagcagcgcggaacaagcactggaggataccctcggcagcagggcctggatgtgaggacagtggaggcctggaggatggagaaaaggccagagtcaggccagcagagaggaggccaaagcaggcaggctggcagggccaggccctggactctgagcctgggaatgacaagccaaggtgggtgcgagggtgaagagaagtgggtggcccagatggaaattcagcagacaaaatggggacagacagggcaggtattaaggatgtttactgctcgctgtaacactggcgctgtcaaagacgaccccagctgtctggcccgtgcaattgggcgggcagagggggcactggatcccagaggaacgccttgagaacggaggcctggggctgcccatcccaccctcagagcaacagctccgggagtcagccctgggctctgtgaacacaggtgaagtctgtgtcctccccctccccccagtctcagctcagcccagtcccgagctcaggcgagcccgggcacggcaggtcaggatgtcagtccaggagtcccactcaggagcagtcagtgggctctgctcccaccgctgagggttcccaatcatgtgcttgagggggtttgaggcatttctcctgaacattcagctccccactcttcctgccatccgggcccgaccatgaataggactacgcagaggagctctcagagttaattcaacctactacaggaggggaatggaaagagggtctctgtatgccagtcatccactctcccaaccacatgttggggctcagaaaatggtaccccaaagtgaacgcctcacaaacagcctcagaagcaaagcttttctctgaacatctcctgccttcctgtctctatcccttactctcccgacacaaaccacagaaactagaattctcttccccacccctcactctccccagaggcaagccatagaaactagaattcctctttcccaaggcaggtcacagaaaccagaactcctttcccctaaagccacccataaaacctaaaagtattagccttctcctgcctttctgcgtaagagctggccataaagaaatcctttggtcgggcagggcacagtggctcacgcctgtaatcccagcactttgggaggctgaggcaggcagatcacctgaggtcaggagttcgagaccagcctggccaacatggtgaaaccccgtctctatcaaaaacataaaaaattagctgggcatggtggcacgcgcctgtaatcccagctgcttgggaggctgaggcaggagaatctgttgaacccgggagacagaggtgccatgagccgagatcgtgccattgcactccagcctgggtgacagagtgagactccatctcaaaaaaaaaaaaagaaagaaattctctgacctactttgtttgatagtagatcataagacccccactcagaatcctgccccataccctgaaggaaggaatgcagcacagagaggccaagaaggatctgagagcaggccttgctgggtttccccactcagtctgctcccatggggtcttactctttgtgtccaatcatagctcttcatagttgcccattcctcctcaaacttaagcataaaaatggagtttccctggatctttggatcttcattctgaaggctcccatgtcacgtaaaactttgattaaatacatttgttatgctttcctcttgttaacctgtcttttgttacaggagtgttgcctatgaccctcatgatggggagaaaagggatcaccccatagctgcacctacaatccattcatccatccatccatccatccatccatccatccatccatccatccattcctccatcctccatccacccactcaccatttccagtcattctacactgttcatcacacttagaaagccctctccctcttacgttggcctgccagccctgtggcctggcctctgcctgccctcaccagcctcccaggcaccctggccttctctctgttcttgcaacaggccaggcgtgccgaacgcctttgtcctcactcctcctctagcctggagagaaccccaaccccacccccacccccagagctttgcgtggctggctccctcctgtcattcagctcctagctcaaacatcccctcctgggacctgcctgccaaatcttaggtaccccaagcgcccccatcataggactcagttttcctatcagcacttctcaccatctaaagttctggtgaatgtgtttaccatctggctccctccaccagggtgtggcttctcaggggaggggtctcgcctgttttcttccttgccaggttccctgcactgagtaaaggtttggcaggttgggggagctcaccacgtccctgctgcctgaaagagaaaccatttcggagcacggcctgagaaggacagaaacaggagaacgtaggagccacagcagagctgcacccagaacccagggctcctgactcccagccctggcctctttccacaccatctgctggccatgcctgggatccaaagccctatcctgaactgcccacatatgcaacttcactggctaccaacgaccacgctgtgggcgaggcagggaggaaatgtggcatcttcattttactgatgaggcaactgtggcaggaaggggctgtgggtgatttgcctgtggtaatgcagtgagtggtcctgctactggagggctccctagcattgacaagcctggcttccctctacctccctatgcatctggggccgtgtgacttgcgtccacctctgtacagcatcctgtgggagggagggcgcacctccaggaaagagcacagaaagctacgttctcaggatgcagccaggagactgaagccctctcccaaccgggggcccggagggcacctcagccatggcctggctataagtgagaaggggaaggacctggggaaatgacttctcttctaagagactcagtgtcttcatctggaggatgagggggttgaccagatgatctctaatttccctaggatccacttttacccccatcccccaatgctcagtttataagggtctgcagcctctggctcaggaatataatcccacagaagactcggagccttaaggtgctatcatctttctcacccactttcttctgggccccaacattgtcctggaggtagagaggccaggaatttgcacaccatggcccagtgctttgatgatccccacttttgaaatctgtcagaactaagttcgaaacctaacatgttcagcttgtaattatcagagttaaagacagagagagagagaaagagagagagaacctaacatgggctagctgtgggggctcacacctgtaatcccaatgctttgggaggccgaggctggaggatcactgaggccaggagttcgaaactagtaagaacccatttttacaaaaaaaattttttttaatttagccagatgtggtggtgcatgcttatagtcccagctactcaggcagctgacgcaggagaattacttgaggccagaagtttgagaatagtttgggcaacatacggggaacctgtctttattaaaaaaaaaaaaatttatctgggcatggtggcacatgcctgtagtcctagctactcaggaggctgaagcaggaggatcacttgagctggggagttccaggctgctgtgagctgtgattgcaaaactacattgaagcctgggtgacagagcaaaaccctgtctctaaaaacaaaacaagaaaacctaaccccccactgactgccgctgtgtgacctcagcaggctcgggggtgagactcggtaaagggcaggttttcggggtcctcatccacccccttccctgtgacacagaactgccctttgccaacttccctcgaatgtgagaacaaacaagatatactgagggttccttagaggaaggcactagaacaagcctcagcaatactccttccctttaagcagagccttgggcccctgcgcgcacacatccccaccacatgggggctcatcgaatcccggctgctttcctcctccaggttcgtacaatccacgagaccagaggaagacagcaggtgcctgagacatgcccgagcctcggcagcttccctacctagagcagagggagaggcgggcagcaggcatgcagtagggctgggcctggcagcggagaggctggctcctagtccccatggcccctcagagcccagcctcctctctgctcttctggggccttggtaggacacatgagatcacgtctgggcggtgctcagggcgtctgagagagaaaaggcccaagggatggaggtgggattaattatgtattagcacgcttctttattagcacttctgtttactgcagggcacagtggaaaacacatggggcttggtgtcagagaatccaggctggacatggggcctggccattcaagaggtgtgggcaagtcacaacctctttgggccccggttccgggaaaaaggggatgaacaacatctgagcgatgctggagaaagcatgacacaaatcagatttcctcacctgtcagtgggattgcaagaacaccagcctcccagcatcgctcactgtgaggtggccaagtgcctggcccggggccacatgtgagtgacatgcagggggtctcgttgctggaggagcagggaggtgcagggtgaaaggcctgaggatcgggctattggcagtgccgttcaggctggcactctctgggtgtgtcccaggtgggtatgctgggccagctctccttaggcagatacccacagcagcaagagaaggaaggggctgtgcaggactgcagggagggaggcacccggctccttgcctggctaatgcaagcctctctttggggtcccagctgtgggagagaaagggctccctcttccctaggatgccagatccatcagcagctaattatctaatctgttccccttggcctgaggaccacgatcacaggctcaaggagtcactggccatgagctgaatctgacagaaaaggacgcttgcaggccacaccctcaggagggcaggtgttggggaggcaggtccagggcttccgcctccagggctggcccagaggctggagaagtccaagttcaagttcctggggctgactcatcagaaagagggtgaagagaaggtcagggcagggactggttgaatcaagacaggctctccttgcaggagggcctgcagacaggctgctgcagaaaaggaaggcgcagacgtgtccataaatactcccagattcagttatgtgctcctctgcctcctgccatacaaaagtctcactgatgcatcccgtcacccccacaacccaggaccagtgccccaacaggagggctctgggggcctctccagctccttactgacagttcggctgctgctgccgctgccctggcacgccaggcatgccaggcccaggcactgccaagtcacatgctctgcgcgggcgaggccgggcactgctggggcagccttggggatgcagggtggtgtggcattcgcaggcagtgtgggtctgcagaaaaacggagtgcccagaggcagccggccacctgcctgccaccctccccagccccaccctccttccaggggagaaatccttgggcaaacagtcagccaggtgtgagcagcacagctaatgcagggctgggaaaagcaaacacggagggcctccatgctgtgggcccgctgccctatggggtggcattcgggtggccctgcccacagctgccattggtgtccccagcactctgcctacagtatttggagggtcttccaggatgaatgctttggccttccctccactgtactccccggaggggcctgactgtgaggtgacagaagcagcgcagggaagaacaggcaaggcatgagtctgcaaagggtgaggcggacctaggcctggagtctctgctgggccacgccttggctgggtgacttggagcaagtcaaaggacctcagggccagggatgcccaccgcacatggcctttgtgaaggttaaatgggatgaggcccatgtgggaccactgagaaaggatttggcacagaagagggtctggatatgtgggtgctcagcttagtgccacctgtgggtgtggggtggagccagggcaggtcgcagtaggagaggcagtgccatggaggtctggcccacacactctcccagggcatgctcacctggctgatctgtgaccccctggccttagctccagggcagtaaggccaacaccagacttctggcctgtggctgcagggccagccaggagggaaggatggtccagttctattctaccagcaggggctgctgcgtctactggccccaaactcagggcagaattccccccaactgagaaaggcctgttcccccaatggctcccatccagggcttcagcttcaggctggcccccacccatacgcagccagaggaggccctgtctttctgagggtgcatagcatgtcctgctttctctgctctgctgtgcaccacagttgagcgtgctctgcaggcggtctgcatgcctctgtgcccttgcacagtctgttctctttgcccaaaaggccttttccaatcctgctcccctgggaactcctcagtgttccaaagctcagcctaaacacaacctcctctgtgaagctgccagggcccgccaacccccaagggcagacctaatcagtgccccctccattccgggctccccactgggctgggagctccaggagggcagggctacactctgcatctctgtgtccttggcacccagcaccacgcctggtgcctagcagctgctcaagaaatgtcagacaaggcccccgggccagctcccttgctcctctcagatcatgctgccggcacatttggccaaagagactcagagatggcatgtgggaagcagggtaagagtgagcttccccagggaagcaggtggggtacgaggtttcctttcctttggaaactgtccgtgctacgtgcaccaagcttcacccactatcagaagtggctctggaggcttgcaggctgcctccccatctccaaaagcagaaaccaaagttagcaggggggtgagcaaaggaaagggaagtgcaccggaactgcagagagaaaggcagttgtggctgccatctgctgtgagcaagatgtttggagaacatgcgctcctcattctgaggtctcccagccaacttgcagagagctgggccgcccctctgcagatgggagcctgcagctcagccaagctgcagaggcaccacaggagagatgtcagggaccctgcctgcctgccctgaccctctggctggcccagtctgaccttctgattcttgagcagactgggggccaggatgccagcccaggacaagagtcacactgccttttccagggagcccccaacaggctctgagaaggcaactccacaataaggctgatgataatgtaaacataagggtgataagggcagtagtaccagccattgctcactgagagcccaactagctgccagaagacctggtactgggaacttccagtcattatctcactttgccccatgactcccaggggaggaggaaatggagggtccaagaaagggccctggcactgctcctcactgcagagacacctggctacccagggccatcacaggaggaaattagctgggcatggcagggcatgcctgtagtcccagctgcttgggaggctgagatgggaggatcacttgagcccaggaattcgaggctgcagtgagtgcactgagctatgattgtaccacggcactccaggctgggtgacagagcaagaccctgtctaaaaaataaaaaaataataaaaataaaaaaaaacaggagaatatctgagtgggaaggaacctctgagccactgagtcacaaatgctcatttgagggaggaaggtgaggaaggatgtagacagctgccccaggccacatcgaggtcagcagcaggctgggagcagaacctggaaccctgccccacagcccaggctcctggggccttggtgtgctcctgcgcaggaatggctgctgtcctcctgtccttggcaccacctggggctcagccacgtgtggccattcccccaagcagagcgatgcatttccgaggactgaggtaatgctggccttgcctggagggcccatctcagtttaggccaggccttccctcgccctggcccggcttctatgctcctgaccacagcagcgggccaagctcaggaggctgggtagggttgggcctaccaaccacattcctttccagggccaccttaccctggggctacccacaaaggaatttgcacagccaacagcctcatcagagtcactggagctgtccatggcactggggcacagaaaccgcttcatttctcactggccaggtgagcaggtagggggctgagaagtctgcctgccaagaccgaaccatgccagggtcctgaatgtcgccctgtgccctcagccctggcaggccagtccccagaggctaccatcccctgctatgccatcccagggaggtcatgggtgacctccctccccttggcgataggaaggtgaggatcttggggcaaaccacccagatccacacctcccatcccaccccacgcagctctgctgccactgcccccacaggccagctcacaagccgcacactccacatttctgtctgctcagtcctcccccagccccctacacacggtaattgcaacacctccaccccactgacagtgcctgccgctgcctgctcgctgccaaggaggctgggatggcccaaagatgtgcttcacgcaaaccttgctaggggaagggactacagttttccccttttctccaaggggtctttggatccgggtgctgaccccacttcctgcctctcacagctccccaccccaccccaccccacccccaaccccgggtcgcccagtctgtgaaatgcctcttactctgggagggatggagggaatcaatggcttccctattctcctgcctctcccacaggggaaggggaggggaggcatgtggcccctggagggatctttcagggagcgccccggccccactgctcctccccgctgggaagtgggggtggtgtccttgacggacggacggctgggcgtcaggtccactgggagtggaaggcaggcagccagggtagtgggcacctccacccccactctcccgctcccaggactccatgggaatcgctgtcactatccagacaccttcacagagaactcatgcctaggctgaggcacagccaggccgagggtgagtcagccagggaaatcccggcactggcgcccaccgctggtgacggttccgctgacacctacggaacggggtgcccagcccctcccgcagagggtgagaggaacacccaggctcccccactctcatttcctgctccctgagagcaagcctggtggtggggacagggaggagtctcagtgggggcggagtcctggagcgaggcctccgcaggctgccgtctttgggcctctggtccctcacccttgaacatcagcggggaaggaggtgggagaacggtcaccacagcccctgggctctggcccggagcctgtcatccacactctgggtatctggctttccagggtctcaccggggcacgcagggatgcacaccctacctcattcctgaagggccctgcccctgccctccttccaggcaaggccactgctctgcctgagcccagcacccccactatatgctgtcctggaccccaaaaaggcaagatagagagcagacttaagccagaagtcagtaccctccctgggatgaaagagagagaggaggagcaaagaggagccaagaagaacagaaagccaggcacaaagcctccttacagcaggacattctgtccctggagaagcgcctgtggccaggtccccacaaactcgccagaccagttggctggagcggggtgggaggctcagaccagggccagagagtggacctaggacctgaaagctcccagacaagaagctcccactgctcctccccgctgggaagtgggagtgggttggactcagcaggcccttaggcaggagcttctggggacatgaactcgaggatgccaagccctatcctcaagtagctcacagtgcagaataacaaggaaaccggggcgggtcagtgagcacagagctccgacactgatgcctggaccactgctcagccccaggcagacagaga

SEQ ID NO: 59933 - DNA, 2747 bp, Homo Sapiens
ttttaaagagctgagccaaaaaagcaacagacaaggcaagtgggcattcgaccacatgccagactaaagaacttctcttcctcttaaatataacccatagatcagtccttcaaatcccaaaagtaagtacatgtcgcccatgctgtgcatacagggtggtgtcctagccttgaatcatttctgtgctcttagatcacattctgtccttaaccacgcacacaaaaacacacacatacacacagacgcccacacaaaccctttcttcagaggccacatttgagttgggcattatttttgacaaatactgtgtgagatctctgaaacagaatctcccaagttgagagaatggaatcagcttctcggagaagagctccattcacgctgagccaaatctgcttgagcagttatttgtacacaagtgccatcaatgttgatgggaatttggaatgaagcactgaaaacagcatgttaggccagtgagaataatccttgaaatctctgtggtaattcaatttcagcagtggttggaccacccaggagccactggaagcatggtgcatttcaaggtctgcctattttttcaacaattttctctttgaaactttaagctcttcagtcagcacaatgtcaaaatgatcagcagacatgggcaattttctagtccagcaacttgagatacagtaaaaattcgaagaataaattacatatgaaaggcagttggttgggactgaactgtgactgatgatataggaatagcaccagattttatagcattctgtcattctaaaactggccatcaagtgaagtaacttaggaatggaaaaccagacgttgtatgtcctaactgatacgtgggagctaagctatgaggacgcagaggcataagaatgatacaatggactttggggacttacagggaagagtggagtggggagggataaaagactacaaatatggtgcagtgtatactgctcgggtgatgggtgcaccaaagtctaacaaatcaccactaaagaacttactcatgtaaccaaataccacctataccacaataacttacggaaaaattaaaaaattttttaaaagtaaaactggccatcacattacctttcatgcattatttttgggatgatttcgtgtgttatagaactttcacatgccaggaagatttacgtttaggaaatacattatgcccacccacccctatctgtgcttatacaacattcttttctcatacatttaatctagcctttatacggattatttgtaggaaaatcaagcctccagaaaaggacaacttgttcagaaggaaagcatggacaccattaaccacgcaagtcagctggtagagcaagcccatgatatgagggataaaatccaagagatcaacaacaagatgctctattatggggaagagcatgaacttagccccaaggaaatctctgagaagctggtgttggcccagaagatgcttgaagagattagaagccgtcaaccatttttcacccaacgggagctcgtggatgaggaggcagatgaggcttacgaactactgagccaggctgagagctggcagcggctgccaatgagacccgcactctgtttcctgtcgtcctggagcagctggatgactacaatgctaagttgtcagatctccaggaagcacttgaccaggcccttaaccatgtcagggatgccgaagacatgaacagggccacagcagccaggcagcgggaccatgaggtacagcggacactcaccatcaatgcatttcagcatcagcagtgtgatggtacaccaagaaggggctgttgatataaatttttttaaaatattggtatagttaaatacttatattttaaaatattggtgtgttttttggtgctataaattactaacttgtgtgttcctaaaatcaagttgaaactaggataattgtctagttcttgctttgataagaacgcagtagttctgatgcttgtgtccatgtgtatgggtctgttattcttgcaagtgggtaagcaatgcatagctttttttatactgagagcactagaaggccaaagcatctcaaaaccatgggttctgggtatgcataatttttggaaaggcacgataagcaaatctcacagtctggctggtcagcagctgcagggataaggagactaattgccaaggccatgcaaatgcaaagaggaaggtgaggaggattcccagatgtgatcatagcttgcaaagatggtcatctcatggggccagaattcgtgcatgcccacacctacaaagctgagaactggtaatggtcatgtgtccgcttcaagcaatgcatgtattcacagccgccagcatcaagaggggccatcttttgataggatgacacatgcatgttcaaacatattttaaaagattagggagaaaagaatactgtgaacaaatagaaaccaattatgagcaaattcacgaattcggttatgtactattgtggctggcaaaagccacttaaactaggctctctagcctgattttcagccatcattacccctcactaagaatccttgtaaaatttcttccgtaaaagttaattacactcatcaccactgtttgctaatgggagcaaacccctagccaatattttttagaataatatggttgggataactttttttttttttttgctaaatgaatgcatgattatcttatacaataaaagtataacacaaaaaaaaaaaaaaaaaaaaaaaaaaaaa

SEQ ID NO: 59934 - DNA, 671 bp, Homo Sapiens
aacctttctctcttagagtattttccaaaagaagagcaaggggtatgtatctaacatgacatgtctcattagacacatgaagttggctttccatgcatccctttggatttttttttttcctggggattccctcaaggtagtgtgggcccacaatctgtgatattaggaacaacataatccatttgaaggaaaaaaaagaatattctccaaatagcacttactgccttattctttcctttgctagcggagctggcagggtttcccttggcatctgtcttcctcccaagtgaggtcaagggcaatgtagaggttttcagctggttggctgcctggtagttattattattgttttggttgccacttagtgtctccatgatagatcgaaaggctccaaaaggccttttcagttgatcccccgattcgttacttgtggaggtccgctggagagtcctgcccttatctttgtctttttctccattcagttcaaggctaggctgctccatctgcaccacaggctcctcaaaggtaactctcagttttaagttctgagatgtcctacgcctggaagatggagacttgaaggcactcttgggacttgtggcaacttttttggcagcagtactgtcaggccttggctgctgagggtaccaaaaagggctgtttggagaaat

SEQ ID NO: 59935 - DNA, 544 bp, Homo Sapiens
tgcttccctccagcccccaccgcccccgagaatcctggagaattgggctcaaaagtaaagggtttagaaactgtcttgctgaagtaagcagtcttttataagagcacatctatccccttggaatgttacctaaatatacaggaatctgaatctgtagaaccgataaagtagggggaaaaatctgttttccctggatacatgcatagatgaatggataaatgcatgattcatataatattaggatgctatgacacctggtgctttactctgatcagcctggctgtaatcaacatgggaaatacatggaaatagaagggaagtcatttataatgtctggaacatattgaaaactattcccaagcagagaataatttccaactctaaagaatagaaggggaagtcttgtttaaagagaaatgtctgaatgttcatcgactttttaagtctgcatttcgaatcgaaactacagaactgagcaaagcgttattcaaatactgtcattcattccaatttctcagcaaggcctatgatgcaatgttcctcg

SEQ ID NO: 59936 - DNA, 1817 bp, Homo Sapiens
taagatgattaagataataaataattgttaattgaattaataccctgttcagatttagtctctaggttagccagacattttgtgaataaatacgattctttaaattatttttattaggaacattcctttgtgtagttatcccaaccttgaccttctgttgaccttataaattccatatcttgttctaataaattatttgcatgagattatccctaggactttccagagcattattgtccaatagaactttttatgatgctgtccaatatggtagacatctgtgattattgcgcacttgaaatgtagcaggtgtgactttgagagacaacatttttaacatatttgaatagccattgtggctagtggtgaccttattaaacagtacagctccagagagcaaaagcaagatgagtccagaaactaacagtaccctcccgcctgcccttgcccccacccccaaagccacccagctttggagcttacctagagaggacagtaacagtgtaaaagatctgtgtggactcaaagtgaaatcattcccaattaatttatacattctaaaaaatagagaacatttaagttattaaatctcaatcgcagctcactgcaacctctgtctcctgggttcaagcatttctcttgcctcagcctcctgagtagctgggactgggactacaggcgcccgccaccacgcctgaccaaattttgtgtttttagtagcgacagggtttcatcatgttggacatactggtcctcaggtgatccactctccttggcctcccaaagtgctgaaattacagatgtgagccaccacacccagccttaagtctcttaaattgtgaataaaatgtaaatcttaaaaacaaaacttgagaaaggttcttggattctttggtggggttttttgttgttgttgttcgtttgtttgttttttggggtggatgctatctagctcttgtgtgtaatgtacatgagagtctcaaatgttgtactttaagtccttaggttgtatgttgaatttaaactgttacttgttacaaagcccttacctttaccttatgccttcaaaagctcatatttaaataaaatggctctcaaagtaacctaccttttgcacgttttttgcccaccttgattgtacatgtcaaagtcaagcaaactaaaagtgcttatttatataaagtatatgtacatccctgtgactgtccttaaatgcttattagatcattgaattgctgaatatagaataacaaatatggaagacaaaaaattttaatttgcttatttttattaatcatgtttaagagtttgaaagactgcaagagtaagtttgtaaaagaaatcaaagactttgttgttcattatagactggctatctccctatagtagccagagtttgctttttattagtttaagcccctaggcactgtagtatgttattcagcaatgtttatttttaattttttagggggaagctaaagagctactcaaaattcttgctaggttactgtttctaggtcagaaaggttatttttgtttgtttgtttcagacttgcaccataatgtgatttgagtaggtctttttttcttaacgtgtatatattttaaatcaatttttaatttttggaaagccaatacatccacatggtttaaaaatcccacagtgtgcaggcacctgtagtcccagctaccaggaggctgaggcaggagaatggcatgaacccaggaggcggagcttgcagtgagccaagattgtgccactgtactccagcctgggcgagagaatgagactccatctcaaaaaaaaaaaaaaaaaa

SEQ ID NO: 59937 - DNA, 593 bp, Homo Sapiens
  misc_feature (522)..(522): n is a, c, g, or t
tttcagtctagtatggaagaagatgggatgactccactgacaactctctagagagaaatgatcctacatttctgtagttgtctgaatttaatgaatatttggaaaacagatgggttgggcagtgtgaggatgaacatttaggtaacaacctaaaccaacctgccttccactttgttggttaccactaagatggctgctgtttgtgttttctttttccctttcagagcccactttctttcttttgtttggttctatttttctttaacctttttccagctttaccgatgtatgacaaatacaaatagtatatactggaaggtgtacagtgtgatgttttgatatacactacttctgtggatatacaccatcttctgtggtggatatacatcatcttctgatgtggatacacatcatcttctgtggatatacaccaagaattaggattgctggatcatatggtagctctatttttaattttttgagaaacctccatactgttttccataatggctatatcaattntcattgccaccaacagtgtacaaaggttccctttattctgcatcctcactaagactgattacctcttgaat

SEQ ID NO: 59938 - DNA, 1281 bp, Homo Sapiens
tggggttctgtgccattctatcaagtgtctgtaaatataactactactacaatttcctatgcagaactgtttcatcaccagaaagatctctctcctgcctctcttctgccaccatctctaactcctgccaaccactgatctgttcttcatctctataattttgttactgtgagattaccaagtgatatgtgaccttcggaaatgattttctttactcagcataatgccctcaggtccgtcaaggtttgttgagtatatcagtagctaaactgggaccatttatttgtctcttcatctaatcatcaattaaaaatgaccacgcataaatgtaagcttttacagttaaacttattgtatataaatagtcacttcggctgggcgcggtggctcacgcctgtaatcacagcactttgggaggccgaggagggcggatcgcttgaggtcaggagttcaaaaccaacctggcccccatggtgaaaccctgtctctactaaaaatacaaatgagccaggtgtggtggtgtgcgcttgtgatcccagctacttgggaggttgaggcaggagaactgcttgagcccggaaggtggaggttgcagtgagccgagatcatgccattgcactccagcctggccaacacagcaagactccttctcaaaaaaaaaaaaaatgtcacttcatgcttagaaatatcagtagatggccgggtgtggtggcttagcctgtaatcctaacagtttgggaggctgaggtcaggagatcgaggtcatcctggcgaacatggtgaaaccccatctctactgagaatacaaaaattagctgggtgtggtggcacgtgcctgtggtcccagctacttgggaggctgaggcaggagaatcgcttgagcccgggtggcggaggttgtagtgagctgagatcgcgccactgcactacagcctggagagagagcgagaatctgtctcaaaaaaaataaaaaagggcagtagataaaaaaagtacaaacatgagtatcttgataaattctattctcaggctttcaggttcataatcctgttgatagatgacatgtagaaatagaagaatttgtaaatataggaatattcattgatgtttttaggactggattctaagggtggtttttacctctaatatccaaatactgctgcctcaagagaacaatttttgttttcaaaattccatgataaaaaagatgcagtaaccctgtatgtggcattttgtcaggttaattaagagcattttgcagcaaaaaaaaaaaaaaaaaaa

SEQ ID NO: 59939 - DNA, 6359 bp, Homo Sapiens
ggcctggctgttgctcaggtgaccagcttgtgtctctgggagggcgctgctttccccggccacccggcgcgatgatccagaatgtcggaaatcacctgcgacggggcttggcctctgtgttctccaaccgcacatcccggaagtcagccttacgtgcggggaacgacagtgccatggcagacggcgagggataccggaaccccacggaggtgcagatgagccagctggtgctgccctgccacaccaaccaacgtggtgagctgagcgtcgggcagctgctcaagtggattgacaccacggcttgcctgtccgcggagaggcacgctggctgcccctgtgtcacagcttccatggatgacatctattttgagcacaccattagtgttggacaagtggtgaatatcaaggccaaggtgaaccgggccttcaactccagcatggaggtgggcatccaggtggcctcggaggacctgtgctctgagaagcagtggaatgtgtgcaaggccttggccaccttcgtggcccgccgagagatcaccaaggtgaagctgaagcagatcacgccgcggacagaagaggagaagatggagcacagtgtggcggctgagcgccggcgcatgcgccttgtctatgcagacaccatcaaggacctcctggccaactgcgccattcagggcgatctggagagcagagactgtagccgcatggtgccggctgagaagacccgtgtggagagtgtggagctggtcctgcctccccacgccaatcaccagggcaacacctttgggggccagatcatggcctggatggagaatgtggccaccattgcagccagccggctctgccgtgcccaccctacgctgaaggccattgaaatgttccacttccgaggcccgtcccaggtcggcgaccgtctggtgctcaaagccatcgtgaacaatgccttcaaacatagcatggaggtgggcgtgtgcgtggaggcctatcgccaggaggctgagacccaccggcgccacatcaacagtgcctttatgacctttgtggtcctggacgcagatgaccagccccagttgctgccctggattcggccccagcccggcgatggtgagcggcggtaccgagaggccagtgccagaaagaagatccgcctggacaggaagtacatcgtgtcctgtaagcagacagaggtgcccctctccgtcccctgggaccctagcaaccaggtgtacctgagctacaataacgtctcctccttgaagatgcttgtggccaaggacaactgggtgctgtcctcggagatcagtcaggtccgcctgtacactctggaggatgacaagttcctctccttccacatggagatggtggtgcatgtggatgcagcccaggccttcctgctgctctcggacctgcgtcagaggccagagtgggacaagcactaccggagcgtggagctagtgcagcaggtagacgaggacgacgccatctaccacgtcaccagccctgccctcggaggtcacacaaagccccaggacttcgtgatcctggcctcgaggcggaagccttgtgacaatggggacccctatgtcatcgcgctgaggtcggtcacgctgcccacacaccgagagacgccagagtacagacgcggagagaccctctgctcaggcttctgcctctggcgcgagggggaccagctgaccaagtgctgctgggttagggtctccctgactgagctggtctcggcaagtggcttctattcctgggggctcgaatccaggtcaaagggtcgcaggagcgacggttggaatggaaaactagctggaggacacctgagtactcttaaagcaatccccgtggccaaaatcaacagccgatttggataccttcaagacacctgaaaccttatcatgagccagatgccaaggaagagactctgggaggatccagaggaccccctggttgcagccacgtagagactgacgctgaggaggactccaactatcatgagcaacacccgtcgaacacagccaccccgctaagaacagatcaagaagctgtcacagatggcggaagaaaacctgaggaaagcgggacaaccagtcacaatgaataatttaatggtagctatgatagcagttatcaccactgccgtgagtattccttcaataagggctggtaataatgcctggatgcaatcattctatgacacagttacacatgctttctgatctcagtatttaccataataaatcggctcctataattgaggcataccaccctcaaaaacctatttgtaaacaggattggacccagttagaaaaaatgaacgtacttatttaggaagattgctttgcagaataggcagagatgctgcacaacgattcctatggaatcattactaattggtcccccaaggggatgtttagcttgaattgcacctctcagtctgcatgccacggtcacactatgttcagatgatctgaacaaaacagtcagatggtagaaatgttaagtacggcaaaagttcctattatctggaaccatggcggtatagtggcacctcaacctcaaataatatggcccgctctaggagctaaacataaggatttgtaaaaactattaaatgctcttaataagatcaaaatttgggaaagaataaaagagtatctagaaggacactctacaaacttgtttttggatatagcaaaattaaaagaacaaatatgtaaagcatcccgggcaacctgaccttaatgccaggaaccagagtgcttaaaggagctgcagaaaaattagcagctagtaacccatttaaatgggtaaaaacacttggaagctctgtgatttcaatgatgactatgctttttaatctgttgtttgcctttgtatagtctgcagatgcggatcccgactcctgcgagagtctctttgcaaatcgaagaagggagacatgttgggagcaagccccccagagtctggccataaactggccccaaaactggccataagcaaaacctctgcagcactaaaacatgtccataatggccctaacgcccaatctggaaggttgtgggtttatgggaatgagagcaaggaacacctggcctgcccagggcggaaaaccgcttaaaggcattcttaagccacaaacaaaagcatgagcgatctgtgtcttacgggtgtgttcctgctgcaattaattcagcccatccctttgtttcccataagggatacttttagttaatttaatatctatagaaacaatgctaatgactggtttgctgttaaatgaaggggtgggttgcccctccacacctgtgggtgtttctcgttaggtggaacgagagacttggaaaagagacacagagacaaagtatagagaaagaaaagtgggcccaggggaccagcattcagcatacagaggatccacactggcaccggcctctgagttcccttagtatttattgatcattatcgagcatggcaggataataggataatagtggagagaaggtcagaaggtaaacacatgaacaaaggtctctgcatcataaacaaggtaaagaattaagtgctgtgctttagatatgtatacacataaacatctcaatgccttgaagagcagtattgctgcccgcatgtcatacctacagccctaaggcggttttcccctatctcagtagatggaagtatattccatgtaaagtaaatcggctttacacccagacattccattgcccagagacgagcaggagacagaagccttcctcttatctcaactgcaaagaggtgttccttcctcttttactaatcctcctcagcacagaccctttatgggtgtcgggctgggggatggtcaggtctttcccttcccacgaggccatatttcagactatcacatggggagaaaccttggacaatacctggctttcctaggcagaggtccctgcggcctttgcagtattttgcgtctctgggtacttgagattagggagtggtttgagattagggagtggtgatgactcttaaggagcatgctgccttcaagcatttgtttaacaaagcacatcttgcacagcccttaatccatttaaccctgagttgacacagcacatgtttcagggagcacagggttgggggtaaggttacagattaacggcatctcaaggcagaagaatttttcttaatacagaacaaaatggagtctcctatgtctacttctttctacacagacacagtaacaatctgatctctcttttccccacagttaataaatatgtgggtaaatctctgttgggggctctcagctctgaaggctgtgagacccctgattttctacttcacacctctatatttttgtgtgtgtgtctttaattcctctagcgctgctgagttagtgaccgagctggtctcggcaggggtgggcgggtcttttgagttcaggagttcaggagcagcctggccaacatggtgaggccccttctctactggaaatatgaagattgtccgggcatggtggtgtgcctctgtactttcagctactcgggaagctggggcacaagaattgctggagcatgggaggtgggggctgcagtgggctgagatcgtgccactgcactccagcccgggcgatagagtaagactctgtctcaaaacaaaaagagttttaggccaggtgtggtggctcacgcctgtaatcccagcactttgggaggctgaggtgggcagatcacctgaggtcaggagttcgagaccagtctggccaacatggcgaaaccccatctctctctactaaaaatacaaaatttagccaggtgtggtggtgggtgcctgtggtcacagctgcttgggaggctgaggcaggagaattggttgaacccaggaggcagaggttacagtgagcggagatcgtgccactgcattccagccggggtgagagagcgagactctgcctcaaaaaaagaaggcttagtgtgcaactcatcagagttgcacagggcagagaaagaatgggaaaaaaaacaatttctagaaaacttttcgaattttctgatcaacaccaaatattccaaataggaaaaatacaaaaaaatccatacctatatgtggcataatatgattgtagagcaccaaagtaaaagatcttattttttattaaaattaaaaaaaaattaaaatagagggtctcactatgctgcccaggctggtcttgagctcctggcttcaggctatcctcccaccatggcatcctaaagtgctgggattgcaggcatgagctgctgcatctggcccaaagtaaaagatcttagaagcagccagaaaaaatagatttgggctgggcatgaatagattgatcaccaaaaaggtggcagactaacttctcgacagaatccacagaagccagaaggcagtggaacattagctttgatgtactaaaataaaataccacgctaggctcctacatacagtgaaaatgttttgagaatgagaattataattttttggcaaacaaaactaaaggagtttacaactaagaaactcttttgtgagacggccttgctctgttgcccaggctggagtgcagtgacgaaatctcagctcactgcaacctcggcctcccgggttcaggcaattcttgtgtctcagccttccaagtagctgggattacagatgtgcgccaccaggcccagctactttttatatttttagtggagatggggtttcactgtgttggccaggctggtctcaaactcctgacttcaagtgatctgcccgccttggcctgctaaagtgctgggattacaggcatgagcgactgtgcctctccagtccctgtgtttttttttgtttttggaggttttatttgtttgtttttggaggcactttcactgtgttgcccaggcctgtctgttggcctcaagtgatcctcctgccttggatctcccagggtgctgggattacaggtgtgaaccactgtgctcagcccattttttatttgtttcttgaaggaaggtagcagtattaattaattttggactttgctcactaaagtttgaatgttaagaatagatgtatacagtctggatgcagtggtgcatgcttgtaattttagcactttggggggctgaagcgggaggatcgcttgggctcaagagtttgagaccagcctgggcaacatggtgaaaccttgtctctacaaaaaaattttaaaaaattagccagacatgatggcatgcacctataatcccagctacttgggaggctgaggtgggaggattgcttgagtccagggaggtcgaggctgcagtgagccatgatcacaccactgcactccagcctgggtgacagagtgatactgtctc

SEQ ID NO: 59940 - DNA, 535 bp, Homo Sapiens
tttttttgttatttaacacttttattaaaaacattttgacaaaaagtaactgtagcatttagtaatatgtcatattcagaagtatgtgacatgaattttaaacacttgatatttacacgaatcaataaaaatacattacttgttaacaggcaagaaagctcactctgaaaggagaaacattattctggtgcatacatgttccactcccgtgttgatgtatacaacctagctattacatgggcataactgactcattatataaactcgagaagtcttagatacacatatttttctcttatcctttcttcctccaaatggggtagggcagtaaccactgaaattatagtatgaacctgggctgaactaaattagctgcatatttatcttttaacatagactgggggagactaggctgaatagaggtggtctacgcagcctctcaaacaaatctgctatcttagcacagcaacttgtatcaaactgttttcaatggcttattttccctgtataccagagaaatcagcaaggtagacaa

SEQ ID NO: 59941 - DNA, 509 bp, Homo Sapiens
tttttttttttgccaaattgtactcttgttttttggccaagttgtacccaaatcactccaatcaggacattgaactcaatggctggcattttcagatatgctgaggccttgaaatatttttcttgagattcaagtgataatcttcaagaaaagtgcaagttgaatagacaggatgactttctgatgaatcatgagcttagacaagtatcagaatccttagttttaaaacttcaactctgatacaatgaattcctggcaatatttatataaatttatgccatggcaagtagcctccaaaacagtgactgtgactaggaagcgaaggtaaattaggaggcaagatcatatttactgataggtactacttattggatatttatttactgaaaatttaccccttggtatccttagtaaagtgctttgtacacagaaggtactcataaatggttattgtatcaagaacttttggtgactcactatgattaaatcaggatgtacaacatggtttc

SEQ ID NO: 59942 - DNA, 1002 bp, Homo Sapiens
gcggctgaagcgcctctacccggccgtggacgaacaagagacgccgctgcctcggtcatggagcccgaaggacaagttcagctacatcggcctctctcagaacaacctgcgggtgcactacaaaggtcatggcaaaaccccaaaagatgccgcgtcagttcgagccacgcatccaataccagcagcctgtgggatttattattttgaagtaaaaattgtcagtaagggaagagatggttacatgggaattggtctttctgctcaaggtgtgaacatgaatagactaccaggttgggataagcattcatatggttaccatggggatgatggacattcgttttgttcttctggaactggacaaccttatggaccaactttcactactggtgatgtcattggctgttgtgttaatcttatcaacaatacctgcttttacaccaagaatggacatagtttaggtattgctttcactgacctaccgccaaatttgtatcctgttagtcctcgaccttttagtagtccaagtatgagccccagccatggaatgaatatccacaatttagcatcaggcaaaggaagcaccgcacatttttcaggttttgaaagttgtagtaatggtgtaatatcaaataaagcacatcaatcatattgccatagtaataaacaccagtcatccaactttcaatgtaccagaactaaacagtataaatatgtcaagatcacagcaagttaataacttcaccagtaatgatgtagacatggaaatagatcactactccaatggagttggagaaacttcatccaatggtttcctaaatggtagctctaaacatgaccacgaaatggaagattgtgacaccgaaatggaagttgattcaagtcagttgagacgtcagttgtgtggaggaagtcaggccgccatagaaagaatgatccactttggacgagagctgcaagcaatgagtgaacagctaaggagagactgtggcaagaacactgcaa

SEQ ID NO: 59943 - DNA, 2445 bp, Homo Sapiens
acgcgtccgacttccaggagtgatccgtaattgtgccaattgctccttttttcggagtgggggtggtgtggggtggggacggggacagagtctcgctatgtcacccaggctggagtgcaatggcgtgatctcagctcactgcatctctgcctcctgggttcaagcgattctcctgcctcagcctcctgggtagctgggattacaggtgtccgccaccatgcctgggtaatttttgtatttttagtaaagacggggtttcaccatattggccaggctggtctcgaactcctgacctcaggtgatccacccaccttggcctcccaaagtgctgggattacaggcctgagccactgcacccagtcacaatcactcttaattctgtgccatctctttccgccatgcctctggtgtgcagcctgttttgagcctagaaaagatgaattgtgccttatagaggggcagctttcagtgtgggagccctcatagacccagaggaacagacactgtcatgggccagcacagagcacttggcgtccctaagggcagtgactactgtgattcccctgtctctgagcccccttctgcctttgtgttcatggcacagcctgtgaacccagattctcggctgggcatctgaccttcgaccctgtgttatgtttaggtggccctggtacagtggacggaaagtgtgggcttaaccctggtgggccgagaccagtcttccatgcagctgaggacccctggcgaccagatcctgaacttcaccatcctacagatcttccctttcacctatgaaagcaaacgtatgggcatcatcgtgcgggtgagtcgtttttattcatggcttaaagtgcttaagtaccccaggtgtgctgcgtgtgtccctgtgggttgacattctttctaaccctctttactgtggtatctgtcacccagactaacgagggaatataattccctaagcagaaaggaaattagttcattcattggacacaccccgtaactctgatccgcttatggtgtccctggttctggagtgaaagttaaagagaacgtccattggggatttcttggtaatacatctctcattctcttttgtttaatattgaacatggtatttttttattgaggtgaaattcacataatacaatcattttaaagtgaaaacttcagtggcatttagtccattcacagtgttgctcagccaccacttccctcatgtttcaaaacattttcatcaaaatgatgaaaaaagaaaccttgtggccgggcacgttaaaaaattttgccagtctgaagagtctgattggatttgatatgttgtttttctactggctcttttaaaaatttttaatttttaaattcttattaaaagaatgtatttataagagtcctcccacctcagcctcccgagtagctaggactacaggcttgcaaaaccagggctgactcattttttaattttttatagatacagggtttcactgtgctgcccaggctggtctcaaactcctggcctcaaccgattctcctgcctgggactcccaaagtgctggaattacgggtgtgagccactgtgcccatccctctgttttctctttttacccacggagatcacactttccgtcgtggggaggctggaaaatctggtgttcatatgccacttggtctggttgttctgcagtctgcatgattgtctgatttttcccagggagctttgaaaataccgattccttggttcagtcccacacctatgttggagtggggtggttcctcacatcatttagcttcgttgcagaaaactctccttcagatcttaaggatctttggaataaggctctttcatcttttctggacttttttttttttttttccttgacaaatgagaatcctctccaccctgatctacccaagtgtttcatgcctcatggaggaaagagatacttgcacatgcatttttatagcagcacaatttgcaattgcaaagatatggaaccagcccaaatactcatcagtcaacaagtggataaaggaactatgagatatatatatatatatatatatatatataatgatgaaatgctacttagccatggaaaggaatgaattaatggcattcgctgcaaactggatgggactggggactattatctaagtgaaataactcaggaatggaaagccaaatgtcgtatgttctcactcataagagggagctaagctatgaggaagcaaaggcttaagaataatacaatggactttggcgagtcagggggctgaaagggtgggaggacggtgagggataaaagactacaagttgggttcagtgtatactgctcaggtgatgggtgcacgaaaatctcataaatcactgttaaaaaacttactcatataaccaaacaccatgtgttccccaaaaacctttggaaataaaaaaaaaaaaaaaaa

SEQ ID NO: 59944 - DNA, 746 bp, Homo Sapiens
ctattagtaccccaacaaacagcgggaaatgctgaactaatcaaatgtactgaagtgtgttctgaaaacagaacatattactagttgagagatgtgccttcgtgaaacctggaagctggaagacagcacagcagtgttttccatgaggcttttccaaaagagaatacataatctggtagctacaaaggtgtttcccacttcagtttctctaatatctgggggagaaagtataaacacatattcatttctcaatataaatatatcaatagccacttctcagtatggatggccaattcggtttgatcagaatgagataccctggacggggaagacaacactctgggcatcaaaaatatccatcttctacttgctgaagtaacaaattaacgtttttttaaagtcactaacaaatctggttgatatgataactgagtgggactgataaatgattcttagaccagcaaaagtggggatcatatgctgaaatggggcaactcatgagtagtgccttctaaatgttttgaaaccatggtaagacaaccctcagtgatcattaaatcaatttagtgggttgggattagcttggtagggatttgttctgtacatacaaagtggacttaaaagactggatcttgctacatacacttaattatcagaagtaaatacttttggtttagcataacatttacatgtgtttgtggttcactacaaatttgaattttttttatgtgaggccaatcacaagg

SEQ ID NO: 59945 - DNA, 3424 bp, Homo Sapiens
gtgatttttatgaacgcctgtcttagtagcagcattgtagagtggctggagcactggactgactaggaacctgatgacttcagctgtagtccagctttgccaccacttcaagtcatttaaccagtctgctcctccgtttctccatctgtcaaatgggagctttagacaagatgatctcaaatttccttcccactctaacagttacgatttctacagcaaatcttgtgagaaggaaatgccagcccagtaccatttcataaaaagcagctcaaaggaaatagatctgtgcttgtttctaccaatcttggcagaaatacattagcttgtcccaattttgctttggtgattggatcctgcccttccctcctttctattttccctatacttttctaatcattaggtaaactggcagttgaggatacaatttccacatcacagagaggaactagtcaggtgataaatgattaaagtgacagtggttccctgtgtgattgtgatgtaatccctcctggtgagtctccatcctgccggttgatgctcaagtctgtttcactactcttttgtgtgtctcacagcccatagctcagctgtgagctgcaatgactctgcacatctttttttccctttgggaatgcataacatccatgaaagccacatgctttgcatatagtggaggcccagtgatggttgttggaattcaaagtagtaaaggctctagaattgttggaagaatctggaaagcagattcttcccaggaaataggcatgatggggtgtgaaaggaaggttgccacaagggaaaatggctagacttgtgcaaaagaatgaatggacaaaagatcaccaaggggttttggtcccattacgaagtgagtgtttaactagtagagccactgagatggaagatacaccttacttcttgggaagtagtgagttcccatcgccagtggtttgtagataacagaccctgtttcagtccacttggaagagatactgtagcaggaattcttaagcaggattgaacgtataataagcaagatctcttccacctctaaaattctctggttgtgggtattgagagctacataataataatagcacctgacatttttcacatttctggagcatttactatgcaccaggaactgttcaagactttccatttaatcctcacaacagttgcataggtaggtgctgttattattcctccctcatatatgaggagactgcagcacagcacctaagattgcatggctgtgggtagtggaggtagaattggaacccaggctttggctgtcaggctacactctcaccctgtgtactgccgcccgagcagagcagtgtaccatcagcctcggcatccatggatttcaccaaccatggaccaaagatatttggaaaaaaaaaatgcaacaataggaacaataatacaaaatatatatatatatgtgtatatatatagcatatatatatattttgtattattgtttttataatatatatagcatatatattatatatgctaaaatatatatatagcatatatatacacacacatatatatatatacacatatatatatatatatacacatatatatatatatatatatatacacatatatatatatatatggccaggcacagtggctcatacctgtaatcccagcactttggaaggccgaggagggaggatcacttgaggccaggggctcaagaccagcctggtcaacatagcaagaaaataaaaaataaattctacaaaaaaatttttttaaatagagtataataactatttatatagtgtttacattgtcttagatattataagtaatttagagatgatttaaagtatacaggaggatgtgcataggttatttgtaaatactataccattttatatcagagatttgagcacctgcagatttcagtgtccatggacagtcctggaaccggtaccctgtggatactgcaggaggtctgtacttttttataggaaggtcaaaatctcaaactgagatggcactcctttattctgctgtagaactgtaatttgggatgtcagtgtgggattcaggaagtatcatgaatgactgctatgtaatttttctttatattcctatccttctagataatttttcattattttctagtcatggaactatatctttgttaaacttattggaaataaaatacccaagaatttttgctctctttctctctttatcagattaatagaactgaatctctgacattccaaattaatcctgctctttaaagaaattttcttttaggctcttcattacaaactattcttgctgatcaaattccacgtaatgtctgaggaaaacagattccactggcagttgcttttgttacatttgagtggagaaatttccttggtcattacaccaaaatattgaccagaaaggtcctgttgctcctcaacttcaggggaaacaatagggttcaggtctgaaactcagacttgtttgagaaagataatgtgctttctttccttcttagggtgtgagatgaactagaacatttcaatatcttgagcgtccaacaaaatgctacttgggcaatctgagccaatgattatgccaagttctttgtaggagaggaattggcttgaaaactttatcttctttctcagtgtatctatggtggaagaacactggatcaaggaactctaaataataattcttggagcagctatttcaaatcttattcttacatgctaatagaaaaaagataggattattatttcctccctcactcagaatgcagtgataactaccaaataaaccaatgtgaaagagtcagttgtcttggacaccatctctacttcagataaatctgggtgcatagcttgagccagtaatttgggctaaagtgtgtttcggacttagaaatttgtgcaatagtcaactgtctaaagcagtgttgttcaaatagaactataatgtgagacacacaagtattttaaaattttctagtagctaccttaaaaaagtaaaaagaaatgtgaaattaattttaaggacttaacccaatatgttgcaaaatataatttcaacatgtattcaatataaaaattattagatattttaggctgggcacggtgactcacgccagcactttcggagtaatcccagcactttcggaggccaaggcgggcggatcacaaggtcaggagatcgagaccatcctggctaacacggtgaaaccccgtttctactaaaaatacaaaaattagctgggcatggtggccggtgcctgtagtcccagctatttgggacgctgaggcaggagaatggcgtgaacccggagggcagagcttgcagtgagccgagatcgcgccactgcactccagcctgggcaacagagcgagactccatctcaaaaaaaaaaaaaaaaaaa

SEQ ID NO: 59946 - DNA, 2280 bp, Homo Sapiens
gaaaaatgtgtgcaaagaaatgatggcccctgaggacagactctgggcgatcacagtcacctgtgaaggttttatgaagatgaaatctgatgaaaatgcaagccttcagcaaaccataaaaccctgtatcaaggttagagagaaggaaaagccttccttactgaagctctttcgggacaacacggccattccaacctctagtgactctacgtaggtgtaaacttttttgtgggcattcaaagaaacactcagcatccttcccataaatatatttattaacttctacaagcaatctaatttccttaattacaagcctaatttaatttccctttaagcctttttgttaattttctttggagatttttcacgtctttcatttatttatttggagacagagtctcgctctttttcatgtctttaattaattaattaatttattttgagacggagtcttcactgtgtcactcaggctggagtgcagtggcgcaatcacggctcactgcaacctctgcctcccaggtccaagtgattcttctgcctcagcctctcaagtagctggaattacaggcatgtgccaccacgccccgctaaattttgtatattttttagtagagacagggtttcaccatattggccaggctggtctcaaactcctgatctcaggtgatcccctgcctcagcctcctgaagtgttgggattacaggcatgagccaccgcgcccgaccttcatgtcttttaaaaagtttgccaaagtttgattgacaattaccaaagtctgatgagctattctaggcaaaattttttgctaaacgtccatccaatttagaaaccacaggaaagattgttttacgcctggtatcttatattcatttcaggatatccgagtaacatggggtccctttttaccccaaatatctctaataaagcacatttctattgtacctgtgttctaccatgatcttaggtatctccatttgtttttgtctctagactgcaattcctacatcctatatttgtattgttaatttttcatctctaagtgtatcaccaagatgaatgccaatatgctaccacctaactctggttataagtgctaacccaggttatccaccaatataataaaaagttcaaagtttcataatttaataaagagaatgtcccttagatgtcagatcaaaacatcttctaaactgtaagcttacttaatgatctctataaggatagaattcatctattgcatcatcttaaatatttactaccctgccaatgctaatcctccacaccccaaaacacagagcttttagcactcaatatacagaacaatgttttgtatacggtacacaatgctcaatacacatttgttggatgaaataatattttatattttctaaatgctaaacctataccacgtaagaatataacacacgtttgctaggcttaaaatcattaattaaaatgccattttctactgattttggtaaaggaaaatgaaatactaacctacatgttgaagtgtttgctttagaacaacaatgcaatttagccccatcgaggcctgtagagggaggagggtgtacagtgactccagggtgaacagattgtgagctttcaagaaaacattgccaaagaggatcttgaggcaagggctgggtcttacaaccctcgatgagaccatcaacaatctccatttccgttttcttggacatcaggattctcttgcaggcattttggcaagcatggtcttcagctctgtcacagcaatataaacctacattttcagaatataagtggcttaattagctgttttttttgtttgtttttattgtactttaagttctgggatacatgtgcagaatgtgcagatttgttacataggtatacacatgccatggtggtttgctgaacccatcaacctgtcatctacattaggtatttctcctaatgctatccctcccctagcccccaactccctgacaggccctggtgtgtgatgttcccctccctgtgtccatgtgttctcatagttcaactcccacttatgagtgagaacatgcagtattttgttttctgttcttgtgttagtttgctgagaatgatggtttccagcttcatccatgtccctgcaaaggacatgaactcatccttttttatggctgcatagtattccacggtgtagatgtgccacattttctttattcagtctgtcactgatgggcatttgggttggttctaagtctttgctactgtgaatagtgctgcaataaacatatgtgtgcatg

SEQ ID NO: 59947 - DNA, 2336 bp, Homo Sapiens
atttttttttttcctctgtgctcttagtgctattattgtaagttcttagctggttccctctcaaccattatccttaaattgaatgtgttattgtcactatgttgtgtcctggtagggcatttttgacagtgaatgttgagaaagcatatgcatgtgacagggcggatttgttagaagcagtggaaaggtgagtactaaactgggtgtttaaaatgcaagcttcagctgggcacagtggctcacacctgtaatcccagcactttgggaggcagaggcgggtagatcacctgaggtcaggagttcaagaccagcctggccaacatggtgaaaccccctctctactaaaatacaaaaaaagtagctgggcatggtggtgcatgcctataatcccagctacttgagaggctgaggcaggagaatcgcttgaacccgggaggctgaagttgcagtgagccaagatcgtgccactacactccagcctgggggacagagcaagactctgtccccctcctgccccgccccccgcaaaaaaaaaggccaggtgtggtggctcatgcctgtaaggcaggtggattacgtgaggtcgggagtttgagaccagcctgatcaacatggtgataccccatctctactaaaaatacaaaattagccaggcgtgttggcatgcacctgtaatctcagctactcaggaggctgaggcaggagaatcacttgaaccagaggttgcagtgagcagagattgtgccactgcactccagcctgggtgaaagagtgagactccatctcaaaaatatatatatatgaataatttttccaatgtctggtgaaaatctgtcttgtgtgtcttttcgtgtgtgtgtgtgtgtgtgtgtgtgtgtgtgtctgtgttttaacctttaaacaacagggaatagtgtcattttggtatgtaactgatcatatataagtatatgttaataattcaccgaaaaccctatctctattaaaatacatctaaaggaaaaggtctacatttcaattagttctatatctctaatttggatctcttgctatcccagaggatataatttaaaataagatttcttgtttattctcggtaagaagtaattacagagcacctctaagctgagtattgcttcttaaattgaaggcactaaagataaagattgctaaatatttcgggaactagatttaactgtgtgacttgaactgaaaagcattctaattttccattcttttatgggtgctggggaagaactgctttgacatgaatgtataatagaattaaaatgtcggtcttaaattttggggagttgttctcagtttgctcttggaatttattattgtaatactgtcattagatagtttgttggaagcagctaatacgtgaaagtgaagcatcttaatatgcatctcttttctttctgacaatgaactgtcaaaaaagctttgagtttatctaacaaacacagctgaggctgggattttaactccactattaatatattctaattttaaactactgtaactgaaagggcatacagcactaattcaatccagacatgtttgagtgcgtttgatagtctcatccttgtaatagctgctgaaaaagatgtggtagagatttcagactggaccactgacgtctgggaattgacactagcacacagactgggtcaggcaaggtacaacctggtgccgccagctgttttgcatggaagaccttatctgtaaaactcatagagagtcaaacaagatgtgtgcctctgaatgaatgggatccttggaaaggagttttaaaataggttttaaaggttttctattttcccctccagaaccagcaggaactgttctggatcacagcaacacgagtctgctttctgcttcttggcagagccgttgcccctgtggtggcagttgtgtggtgggtgatagctgggagtgggaatcgactctactccagcatgagggagagattcttttccaacttccccagacccgtcccacattgctcgtgtattctgccactaacaagaatgaagacatcacattggccgggcgcggtggctcacgcctgtaatcccagcactttgggaggccaaggcgggtggatcacgaggtcaggagatcgagaccatcctggctaacacagggaaaccccgtctctactaaaaatgcaaaaaaaaattagccaggcgtggtggcaggcacctgtagtcccagctactcaggcggctgaggcaggagaatggcgtgaaccctggaagcggagcttgcagtgagccgagatggcaccactgcactccagcctgggcgacagagcgagactctatctt

SEQ ID NO: 59948 - DNA, 2086 bp, Homo Sapiens
cttgcacttaacattgttttgatttaattggtatttttaaataactagactcaaagatgaagtgtctgaaatgttgattatgtatcttcagtgggtcatcgccagagagcggtttcagcaagctgcagatctgattgatgctgagcaacgaatgaagaagtccatgtggggtcagttctggtctgcacaccagaggttcttcaaatacttatgcatagcatccaaagttaaaagggttgtgcaactagctcgagaggaaatcaagaatggaaaagtaagtagaagaactcattaagagattgtttgggggttatgttgtttagtctttgtgggtgctgaggttttctgcttgtaaaatctggttttcctaaaggatagtaaaacttctaaaaaatacatttcttaaaattataaaagcaatgcctgcttagagaatttagagagttcagaaaagtataacaaagtaaacatcactataattggtcatccatagctggtagcactggtaacatatggatgtgtattgcgttaaggttttttcttttcggtgaatatttatctacttaaagcataagatactataaactgtacaagggcaggggcttcactcatgcttactactgtctgtaatcctatctcctgcctaaatttttgacaaataacctgtctcaaatatgtagaagaaataagtaaaacaaatttgtgttttataataatgaggacattcttgtttgaaatctttgtttagctaaatgtttaaaatatgtcttggtaagaagccacaaacattattattcataattaacatgttttcttttttctccagtgtgttgtaattggtctgcagtctacaggagaagctagaacattagaagctttggaagagggcgggggagaattgaatgattttgtttcaactgccaagtaatgtttttgttcttttaatgtttttgtttctttttgagttcttccttaccttagttccaatgtgggcatttcctggagacaaaacttttgtttcacctgcatcatctttaagttttcttgatctgagttttctgcttttctgtaacagtgtatctattggaaaacaataacagaaatctcataatcctaaaatgttaagcattttgctaatattacacagagtatgtgaactaacagaagggctagactttgtttatcttgtacatcttggaaatctgtgacagcttggcttagattcagttttagtgtactgtatttgaaattaccgttatccacaggaacagtaactatagtttgtcctaatataacgaagtctactttataggttggctgagcatggtggctcacagctgtaatctcagcactttgggaggccaacatgggcacatcacttgaggtcagtagtttgagaccagcctggccaaaatggtgaaaccccatctcaactaaaaataaaaaaaattagttgggcatggtggcacacgtcctgtagtcccacctacctgggaggctgaggcaggagaatccattgaacccgtgaggtggaggttgcagtgagccaagatcgcaccactccactccactcccctctgggcggcagagtgagaccctgtctcaaaaaaaaaaataaaataaaataaagtctactttaaaagttgaaaataagcatgagatcttcagaaatagattttaaaatgttttaggcattgtttttagtttgcctaacctccacattcaaactctggtagtaaactgagcaaaataaacttgctgctctactattttgtgcctcgggatgcattcagatgctcctttcaaaagcaatacatggggctcacgcctgtaatccaggcactttgggaggctgagtctggtggatcacgagagctcaggagtttgagaccagcctggccaacacggtgaaacctcgtctctactaaaaatacaaaaactagccaggcgtggtggcgggcacctgtaatcccagctactggagaggctgaggcaggagaattgcttgaacccaggcggcggaggttgcagtgagctgagatggcaccattgcactccagcctgggtgacagagagactcggtctc

SEQ ID NO: 59949 - DNA, 4034 bp, Homo Sapiens
tgatctctttgttattttgatgtgatgacatcatcctacacaaaacacaacttcaaatcatatgcagcttatccatgcacagttgtaattaccaatacaaaccaaaagagagagcaagaaagagagcgagctagagggtgtctatgacctataataattagcattttcagtaacaacatctgttgctgacaatattggcagtagcacaggaaaaagcaatcattaaaattagctaatgctcagtttaagtgctacacaatgtactgacattttcaatattttcattagttttgcattttctcattccagtaagtatctgttttcaagtttgcatgaatgccttgtattatattaaaaatgtttctcagaccttctctcaaattgatctgggtcttaaagcagtatttccagtgggtcaaagtagcactgatgcaaactcttagaaatatagtatccaacactctcgaattggattctataaatttgatcttacataatttagatactgaattagaaattctccataacctgcaacacacattttcttaaaatctcattgtcttagctttcttgagtttttatcctggaatttctgtttgaggtgtaagtgccaatattaactttaaaaatttagtgaagtgtaagtcaattagaataattttacaggtgacctgtaattccagcattttgggaggccgagatgggtagatcacttgaggtcaagagtttgagaccaacctggccaacatggtgaaaccccatctctactgaaaatacaaaaatagctgggcttggtggtggacacctgtaatcccagctactggagaggctgaggcaggagaatcagcttgaactcaggaggcagaggttgcagtgaggtgagattgcaccactgcattccagcctgggctacagcaagactccatctcaaaaaaaaaaaaaaaaaaaaaaaagaaaagaaaagaaaaaaaggaagtggtcaattctagatctattagaatttagactagactacgtgacagaatggatattgggaatgaaagggggaaagggggaggtatcaaggacaactccctgatcttgaagggtctatttactgagatggggaagaaaaaaaataaattggaggtagaggagggaattagttcagttttaaacatgtggtacctgtaatgccttccacgtaaatagcaatagtcagtcacctataagagggccgggctagagatacaaattagatagcgaccaacacacagatggtatttaaagccatgagaatggctgaggtgtctgtggagagaggggagagagaagagcaaagagacctccaggaccatcactccaaggaactccaacattgagggatcagctagaagacaatgagccagagagccgggaggaaaaacaggagagtgtagtattatggaagccaagaaactcttttcaagaaaggggcaatttactggaacaagtctgtgctgatcgggtcctataagatgtctactaaaaatcattggatttgaccacttagaggcctctgattttagcaagagcagttctatccaacagttgaatgaaagccactttggcatggatagaaaagaatggatggaaggtaaggaagtggaggcagaaattgaaagggtatttgctagagctgtgcttccaacaacatggtagccactagccacttatgactgtttaaatgtattaaaatttagtaaaatttaacatgcatttcctttgtttgcactagtcatatttcaggtgcttacttgccaccggtggtgtgaccaccatgttgggacagcgtagatttagtacatttccatcactgaagaaagcactgttggatagcactgttctagagaatgccagaatgtggtgagaaccatctcaggagagaaaatcccactagcaggcaagggtgggggaaggtaagaattggatccatgcatagggattgcctttctttggatgagagagacactcttcctccaaagtatcaatagaaaagaagatgggtgcagatccagatcttatgttgggaagatgagggagttatcttttggtttattttttttttctcaatgaaacaacaggccagcacattagccaagggtggaaagggaaaagaaccaggcgagatttttgaggaggctgcagatggcatgaataatcctagtaatagggggagagtgagtttaccaaagaagtgccataacattgtggcaggatttagtgcctgtgaatttatagtgattctagtttccctagttttgtgatttttctccagacatactcaactggagagtagtattaaggggctgtcataaggcagccattcttaggttgggttgtgtgtaatggcatatattaatactgctgaattggaacccttagggagatgtaaaactaatggagctcagcatggtgaatccaatccagacatgaattgagaaatgcattatttggtcctacagtaatatatcattatccctttacgtagaaatcattgagattccacctctgaaatactcgtgtatgagactcatcataatcatttggagaatctgtgtggtagattgttgttttctatacttcgtagttggtcttgttcattttagtctcagcagcagactagaatgttaagccaatttgctaaatcttgcctgtcctctgtaaaatgcttaaatccgtttatataatacaaagggatatgttggaatttaatgccttcttatggcatcagtactgaatatttaatcagaacaaaaagagaaacatgttagaattttcaaattacagagttaccgtgtggatgcttcacagaggtacgtgcagttcagtgtgcttatacacccgtatgaacttctcacatttattagctataaaatacttcgaaggtgtattttcttctagtttttatatttaatttatggaatattaagtaggaaaatattagcaactacttggatgcatgctgcacttattttctaagaattagtaaataatgttatcatgtgtgattagttgtgtttaatgctagagatgagatattacgaattagcaactcaccttctaagttcttttccttaccagttaccttaaacatatccatttcccaaatagagaccattttctcatttccagggactttcaggagattaaaaggttaacatttacaatgctctgatttcaagactgcaaggcactatgtacaaaattcgtatgttgtttgagcactttttttaaagcctctatgttcaaaccttttggaatgaatttagttcctatggaaacttatcgctgctgtagatagtgcccttatccaagagaagaaaataaaatcaattcagagaatgattttataattgtataacatagcttgggaatggacattaggaatatgtgcagttgcgctcttcggctgttatactggttcatattagattgtgtttgaaaacaaccttgcaaatgtcaccatctgtccttcactttgaggccagaataggtaatagtggtttaacagaaatttcagtgggtactctttcttgcaacatcacaagtaataccttgtgaggaggcaggggatatgataaatattttggaagtaaaattagctttggtaggtggaggagagggagaaggaagaatgctgttgactcctgggaaagattggcattttgcaggctattcattcactagaattcgtgtagatgaacacaaaaaggaggcagctgaggcagatagactatttgaaagttaagtaatagtagtgtatgcttgaagtgataacttagcctatggtaaggatatgggaaactgaggaatgttaaaagtgaaaggtattttaaaacaggaactaacaatctcagtgacttcttgaaaataaagaattagccggtgctgtggcttatgccatatcctagtactttgggaggccaagaagggcagatcacttgagcccagaagtttgagaccagcctgggcaacatggtgaaaccccatctcagcaaaaaaaaaaaaaaaaa

SEQ ID NO: 59950 - DNA, 2012 bp, Homo Sapiens
ttttttttttttctcctagtgctttctgggtccaggcaatcttcatttgagaaccactagtttacagcactctctgagccaaggaatttggagtcaaccagtgctcatctaggtatcaaaatggtggcaagccccaagtgcaactaacaacctacagaagacggaagtctaactttagtcaacactcagggagtggggatgaagaatgtagtcttcaaagctcctggccactatggaacactgttctcctgctgcaccctacatgctcacccctccatcgtcaaagcctcctcctcctggttctggaacaggtggtaaagcttttggaggccctgtgccaaccagtgctctccgcaccgttaatctgggaaccccaaatcaagatgctcgaccctcctgggattctgagaggtcagccctgtggcaccagaggctttctggaatgattcatcatattgtcagctgaaattctactgaagtggatgcccaagactagtttctcagtactgcagtatctcactcaatcccagtgatccgaaaatccatccatcctcccaggacagtctgactgtgtagctggttcaggaaaccaaaggcaagcgggggtcactcatccctccagagcctccagactgagaataaggaaaaaaatcgctaggtgcagtggctcacgcctataatcccagcactttgggaggctgaggtgggtgaattatgaggtcaggagattgagaccatcctggccaacatggtgaaaccccatctctactaaaaatacaaaaattagctgggcgcggtggcgtgcgcctgcagtccctgctactcgggaggctcaggcaggagaatcacttgaacctgggaggcggaggttgcagtgagccgagatcgcaccacaacactctagcctggtgacagagcgagactccgtctcaaaaaaacacccaaaaaaaccaacaaaaaaaaccccaaaaatcagctgggataggtcatgaggtcatgacaggccatcaactatttaagagatttttcaactaagaatataagaacatattgccataaaattttaaaatccctatattctagaggttctatctattttcagttgtatgctccttaaacttatctgtatttaggcttcccccaaaatgaattctaacagaaaaaaaaaacttcggtaaaaaaagaatccataaacactaaatattttaatacctttatttacctcctctctaacagaactaatcagcagcagataatatatttgttacgaagagaattaattttctagttaaacatgcacataaaaacataaaggtgacaatatttggcaatatatgacactaataaaggtaacatttattgggctatccactgggctaagcgcttgactcagatcacctcagttaatccttacagcaaacctataaagtaggtgctattcttatttccattttatagatgagcttataaatgaggaacctcattactgtaatttaatcttcaccaacccagaatttgagttcagtgtttactctggctattaaaaggttgaataagcaaattagaaattaaacgggatttcagaagatatatttaacctactagaaggtcgtacgttttaagacatactgaaaaacagatgctaactgcttccaacaggatgtgtttaggaagatcctgcctgacactataccacattaaaacacttgaagattcaaacttttactagttaaggttgagtgtcctctcactattatccccaatgactggtccaagttagtaaggtattattctacttctatgggtggtacagtatggtggatgtcagctgcggctcccaagttctatttccctcctaccctgacaaagtgtccagaactctacacacccccagcctccccacagcctggtgcaggagccagtctggtgcagaagccagcctgaggatgaactgacccagggaggaaggagtggagagattaaaaaaaaaaaaaaaaaaaaaaaaaaaaaaa

SEQ ID NO: 59951 - DNA, 2023 bp, Homo Sapiens
catttttaaaccatcagatcgcatgatggcttgatctcactcaccatcacaagaacagcatgggggaaatccacccccacaatccagtcacctcccaccaggtccctccgtcaacaccgtgtggattataattccagatgagatgtgggtggggacacagagccaaatcatatcaggatgttttctgttttgtttacctgagacaaagtgctgttcacctctcctctcccacataatcaggggctccctcctgcggctccggtagcttttcctcactttcctttcagccctcgggacaccttccttggctcctttcagagctcagttactacttgggcccaatgtcaatgccaccttctagattctttccggcagcacctcctctggtcgcacatttctcttccagttattggagctgtcaaaaaagctccccagtgatggacgatagcgatttcactgtgctcacagactggtcaggaaaccaaacagctgccacagtgaatgtgttgatagcagcggggcagcagtagcactcgctcacaggcctggtggttggtgctggcccccaccctgaatacctacatgtggcttctccatgtggcctgtgcatcctcactgaagctcagcctgtctctccaaattggtctttccactcacctgttccccaaacctgcccagaccttcctgctgtaggcttttcccttcacttggcacactctttcccttgtcttcccatggccccatctaagccccactgtcagctgaagtgttatattctttgaggggccacctgaagccaccttgcaatgagggcctccgttttctacctcagctcaccatttgttcacagcacttgtcactgtggcgagttacttgtctatggcctgttgtcgttctcctgcctagacccagtgggctgagtgggggcaagtgttggcttttatgtccagttttgatcttggtgccagcacattgcctgggtggaagcatgtcctactatcggttacagggatgtcattctgcccagtgctcaggggcatacacttggatcccagttgtgtgcccttggacacgttgcttaacctctctgtgcatcagttgggtgataatatctactcctggcacattttcagcgttggctgagttacatgtacagtgcttaggccacctgggggagagtaagagtgggatacgtgaggatgtggagtctgttgcatttctgtctgctgctggcatccttcttgtcttgttttgagttgctcgcctctgtctgctccctagggcgtagatttgaggaatattcctggttcttcccaggcagcaggggctcaggctgtgctggagtcagctaggctaaggggctggtctggcatccgcgttgtcctgtcacctccttggtgttttctccaggcctggatctgtgctgtgtgggcacctgtattcctccctcctgccctcactgattctccatacctttcttctcgagagtgccaagcccctcccatgtgttcttgttcatacctaggatcccgggaaggggctggggaagacggtgcccaggtgccctgggtaaacaaagccacctgactccacgggaatggagtgggtggaggggatctgaggtctgcattttgagtatctctggtctcagaggatgaagcatttggtgggggttgggggtggggggtagggtggaagaatctaaagtcttaaaagaaaatggcagttatttgtgggacagggctgtgttgagacttggcatgcttctttttaagagtcagtgttgtaatttaggtataagtgaagcagtactttgtattagtttcctgtaggcgctgtaacaaagcaccacaaactggttgacttaaaacaacagacatggccgggcacggtggctcacgactgtaatcccagcactttgggaggccgaggcgggcagatcacaaggtcaagagattgagaccatcctggctaacacggtgaaaccctgtctctactaaaaatacaaaaaaaaaaaaaaaaa

SEQ ID NO: 59952 - DNA, 628 bp, Homo Sapiens
tttagcaagaactttaaattgtttaatggatttatatgtatctatttgtatactttaaaatattttaaaatcacagagccattcaaataagtatttgaatcacttattgcatttcaaactttgtatgtaaaattatttagaaataattttagtttcacagaaaagttgcaaagataataagactttacactcctcagctaattttccccatggttaacattttacatttctgcagcatatttgtcaacactatggaaccaatattcatacattgccaccaactaaattccagactttatttggatttcaccagtttttccattaaggtcctccttctgttccagggtccaatgcagggtgccaccatgcatttagatatgatgtcttcccagtttcctttgctttgtgatattttcttagtctttctgtgtttttcatggccttgaaagtctggagggatattgtaggtgtcttgtagaatgtttcacaatctgaatttgtctgctgtttttctcatgattagaccaaagttatggatttaagggaagaatatcacagagatgaagtgccttgctcatcatatctatgagagtttacatatccatatgacatcactgatgttaacctt

SEQ ID NO: 59953 - DNA, 530 bp, Homo Sapiens
agaacagaataagctaatttaggaattcacacctttcgtagagatgcttatggtacaggtacctctgacggctaggctctaccaacactaacgtgtaacgtgtcacaaaagccaacgggcgttgcgggggccgggggtagccaacagctcaagtgggctgcttcactccgtggcagattcacctggggattcctcaccaagaatgttgttaagggacgaaccaaaccaaccacaaatgatacccctttaccgaggctgaaaaagcagagattcgcaagctataaacgaatctctggccctttagggaaggtgcaactcgctgcacctctttcccctatcctacaggggttaacagggggcatcctgaggccgagaccaagcccagccagctcctcctcacatcccacctcccaccacatattctccccagtacgccgggctccctcctcccctcgaaagacagttcaaaatcaaaacaataggtgcaaaactggtttcaggtggaaatggctgagtcctggtggctaact

SEQ ID NO: 59954 - DNA, 435 bp, Homo Sapiens
  misc_feature (272)..(272): n is a, c, g, or t
  misc_feature (389)..(389): n is a, c, g, or t
agtaataacacctaaaacagaaatttcagttgtgataaggattagaaaccagataacaaagataaaggagcattcaacattttgaggtaaatggcattgaatgggtagtaatgcagattagaattttgggaatgagaaagaaaatatacacaatgtaaggctgctaggaaatgaaaacaaggctaacatcatttttcatgtttttaaatgaaggctgtctaaaactctctcacacaatgcagagggaggaggaaatgttagtttccctttgnagggaggaaaaagctttaccaaatatttacatggaatgacaggaaggggagcctatgggggatatccggttatggggttgaggaggggaaccacttccatgggaaggccaggttaangcccccggaggagggatgccggttaaggccagggggttttccattt

SEQ ID NO: 59955 - DNA, 601 bp, Homo Sapiens
tctgattatagtcactccctcttttcttgataagacttttctgggaataaacaagactgatacaataatggcccaaactaatacgtacagggcttctatgccccatgaaattgactggcattaggccgtgaaatccgaggtgatgataaacacttgaaaggtggaaagttcttaagtgtatgactaaatgactcactggcccgtgaaacatgcaactattttagcaaagggctagtttctcttcacatataattaaaagcagttgcagtgagacttcagtggagggtattatagtgcaaactaagaaagatcagctcatgtttaaaaaaaaactgagtaaaggaaatctgcatttatggaaactgaaagctctaacactgactcattgaagaagtctcccgaagatttataagtgtaatcaacaaggctactctttgtgacaagcatttgtcatccccgatataagaaaaaacaattattggaaaacaaaactgccacaggaattgccccattcccagtatttgccaggcaaaacattcagcagtatggggcaaaaattactatactacctgcgtctggagctgttaaaacaaacaaacaa

SEQ ID NO: 59956 - DNA, 471 bp, Homo Sapiens
  misc_feature (103)..(103): n is a, c, g, or t
  misc_feature (109)..(110): n is a, c, g, or t
  misc_feature (168)..(168): n is a, c, g, or t
  misc_feature (178)..(178): n is a, c, g, or t
  misc_feature (195)..(195): n is a, c, g, or t
  misc_feature (198)..(198): n is a, c, g, or t
  misc_feature (209)..(209): n is a, c, g, or t
  misc_feature (213)..(213): n is a, c, g, or t
  misc_feature (217)..(217): n is a, c, g, or t
  misc_feature (230)..(231): n is a, c, g, or t
  misc_feature (236)..(236): n is a, c, g, or t
  misc_feature (244)..(244): n is a, c, g, or t
  misc_feature (251)..(251): n is a, c, g, or t
  misc_feature (254)..(254): n is a, c, g, or t
  misc_feature (257)..(257): n is a, c, g, or t
  misc_feature (260)..(260): n is a, c, g, or t
  misc_feature (263)..(263): n is a, c, g, or t
  misc_feature (272)..(272): n is a, c, g, or t
  misc_feature (277)..(277): n is a, c, g, or t
  misc_feature (294)..(294): n is a, c, g, or t
  misc_feature (298)..(298): n is a, c, g, or t
  misc_feature (300)..(300): n is a, c, g, or t
  misc_feature (304)..(304): n is a, c, g, or t
  misc_feature (312)..(312): n is a, c, g, or t
  misc_feature (319)..(319): n is a, c, g, or t
  misc_feature (332)..(332): n is a, c, g, or t
  misc_feature (394)..(394): n is a, c, g, or t
  misc_feature (415)..(415): n is a, c, g, or t
  misc_feature (422)..(422): n is a, c, g, or t
  misc_feature (430)..(430): n is a, c, g, or t
  misc_feature (467)..(467): n is a, c, g, or t
ttttgctggaacgttttattaagttaagaggttcagggagcagaagagaaacaccttttgggtggctctggcggttctgcacccagcacagcctcgaaggagntgtggnngccatggaggcagctgctagctccctctgtcctgagccccatggtacgggtccaaatngggcaggaantgttagtaggaggtaangcnggaaaaaggtngcangctnccggcttttcccnntaaanaaaccccnccattgntgnttnctnggncttcgccanaactnttgggcaagggcaccancttnanaaanccaagcanaagggtngctttgaagacanaaaggggacccaagggttttggaagggcacacaggcccacccaaggaaatttggcctttttntttttttttttttttaaaagnataaaantgtttttnggaaaaaaaagggaaaaaaaatttattataaaaaatntcct

SEQ ID NO: 59957 - DNA, 3633 bp, Homo Sapiens
gggggttttttattttgacctattagtatggttaaatttatggatttactatttattgaaccatttttgcatcttggaatgagccctaattgatctgttattattttaatgtcctgatggatttactttgccaatgcatatatttaggatttttatatcaatattcataagagatcagtctatagttgttgttttttaatgtgttttgtctagttttggtattcgcatctgattgctttgtaaaaacaattgagaagtttcatttctttttctgagtttcggaacagattaaatagccaagtattatttattcttcagttaccaaattcatatttactaaacactatgtgctaggaattggactggatgctgggtaatcagtagtaaacaaaacagatatggttcctgccgtgatattgcttggctcattaaggaaaatgacattaatgaagaaactacacatatgtaattataaatcatgcaagaaaaggacaggatgctttgagataatatcattgaagatctttagattgtgctttttatgcatttgagtaaatgactattgagtacatacatatacactaatagctaattatttaaattagtatgtattgatttggtgtgtaattagggctgtggtgggtgcattagtaaaatgaggtcttcataattacacaaaatataaaataatggcaatagtagctaccattgtaggaggtagctgcatcattttttaatggtagaaattaagacaggttaagtagacacttttagtctaacatgttcaattgtatacactctttggaagtctctcttaagattatagtaaaagaataaggatataaatccacaaagatcaagaggaggtgagaggaagatatagctgaaatcagtatttgggaaactagaaaggagatgggcaagtaataaatgatttcatgaattagagaatgctgaaagctgaagagaggtaacccagcaaggagcaagcagattctttccacagaatctggaaaagttttaggaattgggggtatcaagtacaggacttctgaagtcaagaattacaggatggggtgggaatagaagggttggttgatggtctttatcattttgataccctggaaccccttctccactcccacacacccagacaactactctctcctctaccttgacagaagactgaaggtttatacccaggagactaggaggctccagatggttaaggtgggggtgaagcacctaaatgaaaatgaggattgagtgaaagtcaggtcaacatgctgaacctagagcggttgtctttttttgattggcttccaaactatcaggcttacgtgcccctcaacaaaacattaacggattcttagctggggaaacttaccagcccatggcacagtatttaacagatatgaactatggaaattcacccgattgaacagttggatccatcagatcacctggagagtacagccgctggtcaggaagcattgttcacgtaccacagcttctagtcaacttttatttcattttttgagacagggcctcactttgtcacccagattgaagtgcagtagcgccatcataactcactatagcgttgaactcctgggctcaagccatcctcccacctcagcctcctgggtagccgggaatacaggcgtatgcccccacgtccagctgatatttttattttttgtagagatggggtctcactatgttgccaggctggtcttcaactcctgggcttgtgatcttcctgccttggcttcccaaagtactgggattacaggtgtgagccactggtgcctggccctagtcagcttttaaatgcctcacatttgagtataaatgtacagccaagggttgcctgccatagaatgaaagtctctaatgaaaaagagaccaagtagggaataaaaggagctgagtataaatagatttacttcagggaacagaagaaacttcaacaaataaaactagtatctttaaagagaagatattacatctgtgaaagatgaaaaagtttatataaaaaaaactgctgcgacagaagaaatttcttaaaaatttaatacaaggtttagataataaagctgaagaattctccccaaaaaaccagaagagcacaagaattagaaaataagagtgaaatgatgagaaaattagagggccaaccaaggaggttcttcatctaatacagtggaaggaaactatctgtgtcccagaactgaagaaggtgactttctagattgaaagggcctattaagcgccctgatcaataaaacagaaacaaacaaaaaataaacaaaacttcattgtaccgaatgtatagttccaaaaggaacaagaccagattgattttcttcctacttctgaaaagaagaatgggggcagagaacgaggtgctagctcttaaactgcattttaacaaattcagggaaaaaggaaaccttcttaactttaaattgtatgcaagtgctgttaggtatccccagtgggaagttccaacagttctgtgacaaagataaagttgcgcagaagaagcatatttcaggtatctccagcaacttattcatatccagaatcagccctatccaaagagagaagtctcgtatacctggctaagactgaggagccatatggtatcaaggaaggagaaagcagaatgagaaagtgcctgggtggggcatgggagaggcagagatcttagtgctaataaagtactcctagaaatgagtgcataaccttggaaagcaagggttgtgtctctaagaggcaagcagagctggcaataaaggccctcctgaaccagattacatttggagattagataaggaacaaggcaccatattataaaacagcagtcctctgatttaggaacagagggaaccctaaagaaacatgacaagtgccctacccctccctacaccctgaatcttctgataacagtccaggataattcatctcattcagacatgtataacaaaaatagtatgtacagcatccatacagtgactgtctggtagatggtattttttatgttttatgttggttttttgttcttttatattatttttattattgaagatataattcacatgccataaaattcaccattttaaagtgtacagttgactggcttttaatttattcccaaggttgtgcaatgatcaccactaccaattgcattattgaccctagtgctttacttttccttatgttcactccatgaccctatgcagttcctttcattaaagtgacagagatatttccctactccttgactttgtgtttggctatgtgacttgctaaggtaaaggtgataacatatcagtttcaagcctaagccttaagaggccttgggtatttttatttgttctctttctatctgtgccatttccatgagaaaaacatgtctctgctagctcattggttgagggaagatgagagataggagagtgagggccaccccagctgagttaagctgaattcaatgaacactgtagagatgtgagtgataaaaaaatgattgtggttgtaagccagtgaacttcaggatggtctgttaataaacattagttaaccgaacagttatatgattaaaaataaaaaaaaaaaaaaaaaaaa

SEQ ID NO: 59958 - DNA, 2416 bp, Homo Sapiens
aaattattcacaaatatgaaccatccaaagagggtcaggaaaagggctggctctccatagacgggttcactaattaccttatgtcacctgactgttatatattcgatccagaacataagaaggtctgtcaggatatgaagcaacctctgtctcattactttataaactcatctcataatacatacttaatagaggatcagttccgaggtccctccgacatcacaggatatattcgagctcttaaaatgggttgccggagtgttgaattagatgtatgggatgggccggacaatgaacctgtaatttacacaggccacaccatgacctctcagatagttttccgcagtgtcattgatattattaacaagtatgcattctttgcttcagagtatcctcttatcttgtgtttagaaaaccactgttccattaaacaacagaaggtaatggttcagcacatgaagaaacttttaggagacaagctctatacaacatcacccaatgttgaggaatcttatctaccatccccagatgtcctgaaagggaaaatactaattaaagcaaagaagctgtcctcaaattgctctggggtagaaggagatgttactgacgaagatgaaggagcagaaatgtctcagaggatgggaaaagagaacatggagcaacccaataatgtgcctgtgaagcgatttcagctttgtaaagaactgtctgaactggtcagcatctgcaaatcagttcagttcaaagaatttcaggtgtcgtttcaggttcagaagtactgggaagtctgttcctttaatgaagtgcttgccagcaagtacgccaatgaaaatccaggggactttgtaaattacaacaaacgttttcttgctagggtttttcccagtccaatgagaattgattccagtaacatgaatcctcaagatttttggaaatgtggttgccaaattgtagccatgaactttcagacaccaggactgatgatggacctgaatattggctggtttaggcagaacggaaactgtggctatgtcctccggccagccatcatgagggaggaggtctccttcttcagcgccaatacaaaagactctgtcccaggggtctcacctcaacttcttcacattaaaatcatcagtgggcagaactttcccaagcccaaaggatcaggtgccaaaggtgatgtggtagatccttatgtctatgttgaaatccatggaatccctgctgattgtgcagaacaaaggacaaaaacagtgcaccagaatggagacgctcccatttttgatgaaagctttgaatttcaaatcaacctgcctgaactggccatggtgcgctttgtagtgctggatgatgactacattggggatgaattcatcggccagtacacaattccctttgaatgtttacagacgggctaccgccatgtccccctgcagtccttaactggagaggtccttgcacatgcttctttatttgtccacgtggctattactaaccgaagaggaggagggaagcctcataaaaggggcctttctgtgagaaaagggaagaaatccagggaatatgcatctttgagaacactgtggattaaaaccgtggatgaggtattcaagaatgcccagccccctatacgggatgccacagatctgagagaaaacatgcagaatgcggtggtgtcattcaaggagctgtgtggcctctcctctgtggccaatctcatgcagtgcatgttggcggtgtctccccgctttctggggcccgataacacacccctagtggtcctaaatctcagcgagcagtaccccacaatggagctgcagggaattgtgccggaggttctgaagaagatcgtaacaacttatgacatgatgattcagtccctcaaggcgttgattgaaaatgcagatgctgtatatgaaaagatcgtacattgtcagaaggcagccatggaattccatgaacacttgcacagcataggcaccaaggaaggtttgaaggaaagaaaactacaaaaagcagtggagagctttacctggaatattaccatcttaaagataagaaagacaggaaggaggagtatttttgtgcctcagactcccataatggtatgagtaccctcctccttctcctccctcacactgcatgtgatttggaagaaaagtgtctgctggcccccagggaatggaaggtgctaatctttgctgtcttcaacatccaagcatgtggccattacacaggtggcagagggcaggggaagtcttagctgccgcactggatccctcacctcagaagtaagtcaactttttttctctaatagatagttggacaaaaggactttgaaaaaattagccagatgtagaatccctgttgttttgcccctacgtctgaataaaagcaatgacttgtgattgtt

SEQ ID NO: 59959 - DNA, 3642 bp, Homo Sapiens; identical to SEQ ID NO: 57361

SEQ ID NO: 59960 - DNA, 1825 bp, Homo Sapiens
ccaagaggtgggaacaatctaaatgtccaacagatgaatgaatttttaaaaagtggtatatatacatacattgagatattattcagccttaaaaaagaagaaaaatcatggccgggcgcggtggctcacgcctgtaatcccagcactttgggaggccgagacgagcgaatcacgaggtcaggagatggagaccatcctcattaacatggtgaaactctgtctctactaaaaatacaaaaaaattagccgggtttagtggtgggcgcctgtagtcccagctactcaggaggctgaggcaggagaatggcatgaacccgggaggcggagcttgcagtgagccgagatcgcgccactgcactccagcctgggcgacagagcgagactccgtctgaaaaaaaaaaaaagggaaaaatcctgccacatgatatggtatgggtcaaacttgaagacattaagctaaataaaatgtcagtcacaaaaagacaaatattatatgattccactcacatgaagtatcaagtaatcaaactcacagaaaaagaaagtaaaattgtggttgccaatggttcagggtgaaaaaaagggagttagtgtttaatgggtaagaggttcagtttcgcaagacaaaagatttctggatatttgttgcacaacagtatgagtataattaatgctacagaactgttagaaaagagtctctttcagatttagatactagaaaatgtatgagtaaaatacgatgtctgaaatttgctttcaaataatctgaaggctggttggggaagttgttggagtcatacatgaaataaaactggtattagttgacaatccttaaaactgagtgggtttattataccattctctctctacttttgtgtatgtttgaaattttccatcataaaggagtttttaaaaacccaacattatcaaaatgaaaaataatcaatacaagtgctggataagaaagtcaaggaaatatcacagaatgtataatttaaaagatttgctgaggtgtgtgtatcacctgagctcaggagttcgagactagcctggccaaaatggcataaccccatctctacataaaatacaaaaatcagctgggaacactggtgcacacctgtagtctcagctactcaggaggctgagacacgagaatcacttgaacccaggaggcagaggttgcagtgagctgagatcacgccattgcactccagcctgggtgacagagacagactctgcttggtcacttttttggcggaggagaatgcagttaaaaaggacatgtccccggggattcgactacacttctcaaagtgtactgctggccctctgtatccatgggttctgcatctgtagattcgatcaactcaactcctggctcaatactgatggaagtaatctgcttaacaatctcagaaggactgtgcaagtcaatgagtcgcttgtgaattctcatctggaaacgatcccacgtcttagaaccttcaccacaaggagtttttcttgtagtgattctcaaagtcttggtaggcattcgaactggtcctttcactttgagattcttttcttttgcgcctcttatcaagtcagcacacaccttttccaaggattttacgttgcggcttgttagggtgattcgaattcggtgaattgccacctccggctccacgggtgtttttccggtatccttaaaagccatggctgttgcgcgcgggcttcctgaccgacttgttcctcggcgagagcgaacagcggtgagtcaggagcaggagcgtgcggaccaaaaatcctcagcccttacgaccgcgtcttcctcaaaaaaaaa

SEQ ID NO: 59961 - DNA, 571 bp, Homo Sapiens
  misc_feature (109)..(109): n is a, c, g, or t
  misc_feature (123)..(123): n is a, c, g, or t
ggcatatatttttaaatacactataatgcaaaaatttatatacttgagattcacctttacatttagcaagctttcttccagagactaaaatgatatttgttaagcatanctgatgcacacaanccttaagcacattcatcctataatcagcttgagaagtagacacttcatataaaaagatacacaaaggctaaaaatgatactagtattcagaacactaacaatctcacttgggtcacaggcgacttgaggttcacatgtaatttatccaaaatactgcagtttcaaaagaaaatgtcttttacactaaatactcaccacagtcatcttatgcatgaatatagtttacctgaatatattttaaaaatttattccaggaaaaaacaatgattaacagtaggtatgaagggttaaaaaaaattagctaccaggatcataaccataataatggtaagttcatatttgagaagaactaaagaatccaaactttagatgctcaacatgctgccaaaataggccaaatgaaacccttgcaacctccagggtatggtctgtcggagatcttgcagca

SEQ ID NO: 59962 - DNA, 502 bp, Homo Sapiens
ctttctcttcctgcatttgttttttaataatagagacaatttaaaagagctggaattctccttaaaaacaaacaaacaaacaaacaaaaaacagagaaggcctgtgaatgttcccagcacagcttaaggtctagtaaagaaagcctaggggggacacgctggctgcatcttctcaattcaagccccgcagatctgagccacttcccctctccacaggcgtgatggttaatactgtcagcttgattggatttgaaggggtgcaaggcgtgggttcctgggtgtgtctgtgagggtgttgccaaaggagattaacatctgaatctgtgggacgaaccggcccatcatcatctctgtagttgtggtcagctcctccgagatgtggctggaatgcagcaggccttcccgtttccgcacgaccaccacctgcaccgttacatgctcaggaaggcggatgggggcctgaagtgcatagccagagagaccagcaggtggaggatggcca

SEQ ID NO: 59963 - DNA, 576 bp, Homo Sapiens
gtagttaaacaagttgggtcttttactctacgtacaaacacaccaggttgagacgttgaggtgtctcagcaacagggtgttcggaggaaactattacaggatttcacctgtagttgggtgatttgggggatgatctaaggaaggaggatttggttctagattagacgcacgctggagcccaggaggtcgaggccgcagtgggccatgatcgccactgcgctccagcctgggcgactaagcgagaccttgccacaaaaacataaaaaaagattagacgctgtgggaaggaagagggtaattctcagcttatgatcgctgcatgtgacagggtgagctgtgcgttccctgcttagaatcaagaagaggtcttagttcatctcactttgtcgtggtgtctgcgtggcgcttcatgcctcacagaacatgggccggctacgagggtcaaaccaggccacagcaacgcgtcaggggccgcttgctttcttaggagcaacaggtccagaggcttccgctccaagagggactggggcctgggccaggaccttgccgaaaatcaaacgaagcccagacaacctg

SEQ ID NO: 59964 - DNA, 514 bp, Homo Sapiens
catttattacttgggtttatttacactatttacatattgcacaatagctggaatactattttacatttataatacaaacgaccaacagaattagccacagatttacactccactgtctctaaaacatgaccgaaattttaatttttcatgccgttccaaataatactctgagaatttaacagtgaaagtaatacagaatatcaaattatgttatatgaaaatatactttaagattctgcttatgtttctaaagaaatattttttgcgatttcacctaatgaagacaatgaaatattctgtgttttatagcactacacgtcaaatgtggagcattccttttgtgttttttttttaaataagtgacagataacactgtcaagtacactgatttatcgaatatatctgcaaactgtcaacaacatacaaaactcaaaggacttatggaagagtctgtctgcaaaaataaatctcttgtccatgaggggatgtgtataaagatagttctgtttccctg

SEQ ID NO: 59965 - DNA, 1227 bp, Homo Sapiens
tgagccgagatcacatcactgcactccagcctggcaactgagaaagactctgtctcaaaaggaaaaaaaaaaaaaaaaaaaaaaaagaaaatgataagtctttattatgggacattaagaaaaacctaaatatcatgttcaaagtgattttggggaaacttgataaactaatgctaaaataaaggaacagtggtctcagaagacccaagacatccctggaaaagaacttttcctctagatatggaaacttgtaaagccatcttaattcctataggtttattttgtcaatgcagaatacaaaagttgaacagaacagagagcccagaaacagaccccacatgtgtatgaaaacatgtatatggaagatgacagatagcattactgatttatgccccatgcaaatctatttcagattgattaaagacttagggaaaccctatggtagaagaaatataggcagataactttatgactgcagggagggaactatttctaaaatcaagaatttctatttattaaaagttagtgaaagaataatccccaacttggaaaagacttttaccatgtatataactgacaaaggattagcatgagatatataaagaattaatatgaatcaataagagaatgatcccaccctgtccttggggcccgtggaacactgtgctagcaggctgaacaattttgcgggaatatgggaatttttctttggacgcagtcatctcattcctatgaatgtatccaaatggagcctccccctagaaagagagggggtatttgattaaagatgcatattgcagcagtgcagcaaaagtactgaagctttcatagtgtccactagtagcaggtaacaagtcctgcttggatactactctaagtacaggacacccactcaatggaataatatggagtcatcttataattatgaagacttgtcatgacatggcatcatattaagcagagcacaactcaaaattgtatcagtgttgtataaaaattatgaatcggcagaaatgtggaaaaaggaaaacttgtaatttgttcaaagagagtcttgttttttgtttttttttttggactgtcttggtacagttatgatttgtgaagtaaataagaaatacaactcagttgaaaaatggcagaagtcagataattcaaaagtaatattaataaaaatttctcagaagggaaaacactgtggctaaaagtaaaaaaaaaaaaaaaaaa

SEQ ID NO: 59966 - DNA, 304 bp, Homo Sapiens
gccaactcccctccgctccagtcacttgtctggagcttgaagaagtgggtattccccttcccaccccaggcactggaggaggcggccccccggggattccaggacctgagctccgggagctggactcgcagcgacgcggcagagcgacgggcgccgggaagcgaggagacgcccgcgggaggcccagctgctcggagcaactggcatggcccgagccatggccgccgcgtggccgctgctgctggtggcgctactggtgctgtcctggccacccccaggaaccggtgagtgacccccgcgcagt

SEQ ID NO: 59967 - DNA, 823 bp, Homo Sapiens
caaactactaaaaatatgtataaaattaccttcaggcagtgtgtgtagttatatatgaaacatgaatttcatgtttagacttgggtccatgcccaagatacctcattaggtatctgtaaatatccgaaatccaaaaaaaagtctgaaatctgaaacacttctggtcccaagcatttcagtaagtgatgctcaacctgcgtaaggtctgcgggccaggctcattttctgcctatgtgtacatactttaaatgtgtaaattaaaagtcaaagcaaagagtctatttttaaagaaacttcacaataatctaaacatatacttcttatgattatgaatcatcctgcaaagctgaatgaagaattttaccaaaaatacaatgaattaatcatatattgagagtcacagtgataggttcgactatatttgactgtgtgtagtggcaccgttaggtagtatgtttctgagcatggtgctttttatacttgaaatatattttggttattttatgatataattatattgcataatggttgctgaagaaacatattatagatgacatcctcggtatatatattcatcaagcggggaacccggccgccaggtttctcggacaagtgacacggtaagtaggacacgcttgggtcctcagcaaccggtgatgtccccgcctcacaaggctgatatgatcccaccagatccgccagggacccagagtaaggacgaccggagcatcaagccatacctgacaggagggcgcgaaacggcgacacacccgggggcaccaaactccggcacaaaacacaccaccaccccacaccgacaccg

SEQ ID NO: 59968 - DNA, 373 bp, Homo Sapiens
  misc_feature (186)..(186): n is a, c, g, or t
  misc_feature (320)..(320): n is a, c, g, or t
  misc_feature (332)..(332): n is a, c, g, or t
ttctgggggtttattttaccatttacctctgacaggatggctgaagaggaatcatcctgggagttggttataatattatttatttaaaaatatttatcatttattaagtacttcttaggtgacaagaaccataagagctttccatacattgtttcattcaatacttacacaattctaatgttatcnccatttttcagataggaaaatgaagttaatcagatgttgagcttagatttgaatcgaggactatttaatgccaaagcttaagattctttaagtcacacacacacagacacacacacacacacacacacgacgtngtttaaatttgngtttccaaggaaaaagaaaacatgaactatagaaaagaaaa

SEQ ID NO: 59969 - DNA, 558 bp, Homo Sapiens
ttgaatttaggtgacactatagaagagctatgacgtcgcatgcacgcgtacgtaagcttggatcctctagagcggccgcctactactactaaattcgcggccgcgtcgactttttttttttttttcttttctttctttctttcttttttttttttttttttacagttaattctgagcatattcatttctcttctaagttgtgaagtctctgaaggcataaattagttttaatttttcctggtatcctacagtgtgcactagcatggtgccttgaacacagaagacatttaaggatttgtgggatgattcagtcctacctcaaatagatttgtgaatccctctaagccaatattgacaagcaaacagagcaagattttatgaatgcattcactgaccagtaactcaccaagatagtctactaggggtttctttctttttgcaggacaactcttcaattacttggaaaaagtttatggctactatggtttcctcttcttcaaggaagatatgccctgtttcttcaactgtacctcaaattttttggtccctaactcttcc

SEQ ID NO: 59970 - DNA, 514 bp, Homo Sapiens
ttttttgttaatacaccacatagttgatggtattttattatagcagcctgaggggactaagacataagcaaatgcattgttgataaaacattctgtcaataacgtaaactgtgaaaattccaggaccaatcttgtaacatgagataaataagaatatttattatgcatgttttatacagtaacaccaaaataacgctcaataagttacacagctgttttctagaaacatggcaaaagaaaaaaaacagtaggaataatatgtattactcaaaattgaaaatatggtcatcttttaaacagatttgaattcatgatttctacgtaaacaaaaacatcataaatatctagaaataatcttttttaacaatgcactagatactatttaaaggctcaggtttaattggacattatttggtttaggcttatttgatcaatacatgcagaaaaataaattacaaacgtgaatttttaaaaggaatcaggatgtcattttgtactacaaaaattagatgag

SEQ ID NO: 59971 - DNA, 291 bp, Homo Sapiens
tttttttttttttttttttttttttttaagatgaataaattgaagacatttatttcctccaagaaaaatgtctggcacttggaattttcaagctgcaagtagatgtacacattttcaaaagatctttcttttccttcgcttcctcacactgggcacagcaaaacatctctgccttcttttcacgggaagtgaccctcctccccatgggtcaataagttaacgccaaatcgcggcaaaacggcgaattccatctctgaggctctagaagctcaatcttctgggcccctggct

SEQ ID NO: 59972 - DNA, 1299 bp, Homo Sapiens
caagttacgcggactccgtgaagggccgattcaccatctccagagacaacgccaagaatatattgtttctgcaaatgaacgaattgagagccgacgacacggctgtgtattactgtgcaagagggggggatcatatagtaccggctgctgtcgctcccttccacatggacgtctggggccaagggaccacggtcaccgtctcgtcagcatccccgaccagccccaaggtcttcccgctgagcctctgcagcacccagccagatgggaacgtggtcatcgcctgcctgcctggtccagggcttcttccccaggagccactcagtgtgacctggagcaaagcggacagggcgtgaccgccagaaacttcccacccagccaggatgcctccggggacctgtacaccacgagcagccagctgaccctgccggcacacagtgcctagccggcaagtccgtgacatgccacgtgaagcactacacgaatcccagccaggatgtgactgtgccctgcccagttccctcaactccacctaccccatctccctcaactccacctaccccatctccctcatgctgccacccccgactgtcactgcaccgaccggccctcgaggacctgctcttaggttcagaagcgaacctcaggtgcacactgaccggcctgagagatgcctcaggtgtcaccttcacctggacgccctcaagtgggaagagcgctgttcaaggaccacctgagcgtgacctctgtggctgctacagcgtgttccagtgtcctgccgggctgtgccgagccatggaaccatggggagaccttcacttgcactgctgcccaccccgagttgaagaccccactaaccgccaacatcacaaaatccggaaacacattccggcccgaggtccacctgctgccgccgccgtcggaggagctggccctgaacgagctggtgacgctgacgtgcctggcacgtggcttcagcccaaggatgtgctggttcgctggctgcaggggtcacaggagctgccccgcgagaagtacctgacttgggcatcccggcaggagcccagccagggcaccaccaccttcgctgtgaccagcatactgcgcgtggcagccgaggactggaagaagggggacaccttctcctgcatggtgggccacgaggccctgccgctggccttcacacagaagaccatcgaccgcttggcgggtaaacccacccatgtcaatgtgtctgttgtcatggcggaggtggacggcacctgctactgagccgcccgcctgtccccacccctgaataaa

SEQ ID NO: 59973 - DNA, 428 bp, Homo Sapiens
  misc_feature (291)..(293): n is a, c, g, or t
  misc_feature (296)..(296): n is a, c, g, or t
  misc_feature (300)..(300): n is a, c, g, or t
  misc_feature (312)..(312): n is a, c, g, or t
  misc_feature (322)..(322): n is a, c, g, or t
  misc_feature (329)..(329): n is a, c, g, or t
tagaaaccattcctttctttattaaacatagcttgcaagtgataaatattacaaagtttttttttcttttaatcctttctccaaaaattagcttattatttgaatctgtcactgctgaaatgctcagcagcatctgaaacagatgggagtgtatttgcctttttgaaaaccagtttctattggtcttagttttttcattttatttcccaaacacaatgcagaaaatcagaatgagttaaaaaagaaataaaggaaacttaaagagagttgtgcaaaaagggcttggttccnnntcncccnacccttatcaangaaggccatnccccatncaacctccctgctccccaccccccaaccccaatctatcctttcaccttcaccagggcttcacccatcaccctgtaccctctccaggctttatcagccca

SEQ ID NO: 59974 - DNA, 1723 bp, Homo Sapiens
ctcgaccctggacgtctaccttccggaggcccacatcttgcccactccgcgcgcggggctagcgcgggtttcagcgacgggagccctcaagggacatggcaactacagcggcgccggcgggcggcgcccgaaatggagctggcccggaatggggagggttcgaagaaaacatccagggcggaggctcagctgtgattgacatggagaacatggatgatacctcaggctctagcttcgaggatatgggtgagctgcatcagcgcctgcgcgaggaagaagtagacgctgatgcagctgatgcagctgctgctgaagaggaggatggagagttcctgggcatgaagggctttaagggacagctgagccggcaggtggcagatcagatgtggcaggctgggaaaagacaagcctccagggccttcagcttgtacgccaacatcgacatcctcagaccctactttgatgtggagcctgctcaggtgcgaagcaggctcctggagtccatgatccctatcaagatggtcaacttcccccagaaaattgcaggtgaactctatggacctctcatgctggtcttcactctggttgctatcctactccatgggatgaagacgtctgacactattatccgggagggcaccctgatgggcacagccattggcacctgcttcggctactggctgggagtctcatccttcatttacttccttgcctacctgtgcaacgcccagatcaccatgctgcagatgttggcactgctgggctatggcctctttgggcgttgcattgtcctgttcatcacctataatatccacctccacgccctcttctacctcttctggctgttggtgggtggactgtccacactgcgcatggtagcagtgttggtgtctcggaccgtgggccccacatcttgcccactccgcgcgcggggctagcgcgggtttcagcgacgggagccctcaagggacatggcaactacagcggcgccggcgggcggcgcccgaaatggagctggcccggaatggggagggttcgaagaaaacatccagggcggaggctcagctgtgattgacatggagaacatggatgatacctcaggctctagcttcgaggatatgggtgagctgcatcagcgcctgcgcgaggaagaagtagacgctgatgcagctgatgcagctgctgctgaagaggaggatggagagcaccctggctgccctacacatgctcttcctgctctatctgcattttgcctaccacaaagtggtagaggggatcctggacacactggagggccccaacatcccgcccatccagagggtccccagagacatccctgccatgctccctgctgctcggcttcccaccaccgtcctcaacgccacagccaaagctgttgcggtgaccctgcagtcctctttcccgcagctgcagagaggaggaagactattaaaggacagtcctgatgacatgtttcgtagatggggtttgcagctgccactgagctgtagctgcgtaagtacctccttgatgcctgtcggcacttctgaaaggcacaaggccaagaactcctggccaggactgcaaggctctgcagccaatgcagaaaatgggtcagctcctttgagaacccctccccacctaccccttccttcctctttatctctcccacattgtcttgctaaatatagacttggtaattaaaatgttgattgaagtctgg

SEQ ID NO: 59975 - DNA, 438 bp, Homo Sapiens
  misc_feature (52)..(52): n is a, c, g, or t
  misc_feature (247)..(247): n is a, c, g, or t
  misc_feature (252)..(252): n is a, c, g, or t
  misc_feature (263)..(263): n is a, c, g, or t
  misc_feature (277)..(277): n is a, c, g, or t
  misc_feature (367)..(367): n is a, c, g, or t
  misc_feature (401)..(401): n is a, c, g, or t
  misc_feature (410)..(410): n is a, c, g, or t
  misc_feature (417)..(417): n is a, c, g, or t
acaaatatttattgagtacatactatacagtaacactgctgttggccctggngataaaacagtcacaggtcagcccttgctcccatagggcttacactccagtggggacaccccaaagcatgaaaataaaagcagtaaaaataaaacagggcattatgttacagaggggtgggggaaaaggctctactatgttgaaggcagaaaaaggcctcccaaaagagggagcatttaagctgagatgtaaggncaggnaaatgccaaantagggttacaaaanttgaggtttatacccccataagtgtataattatggatttgtcaatcaaaaatatttatattttaaaaagtttgggggggcctctaaaaanttgagggttaattaataagttcccctttttaacntaggggggnaatgttnctagtagggttggggtttctt

SEQ ID NO: 59976 - DNA, 306 bp, Homo Sapiens
ttttttttttcttttttttaccatcacagggtctgctgcataaaaagtgatttaaatcaggaaaagtaaattccctatttgatccaaaacaacttggcaatagtttttacattttgttctatatcacagggcctttttctacagccatcaattcacactcccttgtttgcaaatctgaaacccaaaaagctctaaaaactcagatggcagcaaaacttgacccatttagtgtacacagctacacagcacagctgtcatatatttcactacaaaaatatcactgttacatagtacagccccagtctc

SEQ ID NO: 59977 - DNA, 500 bp, Homo Sapiens
ttttgtgatccattctataatatgatgctatgagaacacagaggagatgagccaggatggaggtcaaaatggcttgttcttcattgtggttgaccggtctctgcgcctctattttcagactccatttttcggttccttatttaaaatcctccaatggctcttcattgactggcttccagggagaggtgcttccaaattggccctgtaggcaaattcacttttttcaccctctaagcgagtaagtgcttgttcccaatttccatggtttagtcttcagtttcagtctttggtctcctctgaccatctctctcccatctctctcccagtctttttctttattctgtgacaccattaagagccgaccacgggccagtcctcttactagattctgctgtcagtttacgaattcttcaccagttatgcaaggtggctatcttttccccatttcacagacgaaataaattcagaagggtttaacgacgtagttaatgctaggagca

SEQ ID NO: 59978 - DNA, 586 bp, Homo Sapiens
ttacagcaaagtcaaagtttattaaaacaaatacagttactagaaattcctaggtatctttacataaaaaataatttttaaggttgacaaacccccattgataacaataacaaatatagtaaaatctaggctgctttcaagttttcaaatcacattcattgcactcttaagagtgcttttctaataattggatctaatctagttcatttatcatttaccaattagtcaagaacccaagcttgcacataaaagttaataattattaggtttaggcatcaagtgtctatgcaataccaatattttttatttatgtctatgttcgccccttgtaatgtccaacattttgacagtgtggtgctgatgagtagaagactgaggcagaccaaggaaacctgagagttccacactgcatttgaatgaagttcactgtgcctttagtattttgtgtaaagctaacttacagaacatagccacaggcaaaaagtacttcacaatacataaagttctgaagatgaaataattcaagatccatcatttcagttgaggactctgaggtcaaaatactggtgtggtgagaaagatagta

SEQ ID NO: 59979 - DNA, 402 bp, Homo Sapiens
tttttttgggagtatagattatgtttattttctctataatttccagggttttccaaaattttacaacaaacatctataattttatgaacactccccatcttatttttaaaaagaaaaaagttggggggcagagaaatgcccagctcagtactgagatccatcaagtgaggccagccggtatctgtcacaccaggcagaggcccgtgctggaaccctggaggttaccagctccaagcctggtatccaaggcctcctgggcagccttagcctcctccttccctttcctcccaccagaccctgctcctgggatgtccttctcccattaccaccacaaaatcggactaatttttcagggcccaacaccaattctgctaatttttttttggctcaatcttggctcat

SEQ ID NO: 59980 - DNA, 607 bp, Homo Sapiens
  misc_feature (542)..(542): n is a, c, g, or t
tgtagagacagggtctctccatgtttcccaggctataaaacggggttttatagatgaagaaagagaagcacagagaggacagggaagctggattggaaccataccttaagctcacattactagggtctcagaatccactcccaagggtgatcctgaagggttcactgtcaccctccggggtaagccacctcttttccccaagcgattcattccccacatgaaactcaacagtccttctatcccttcttcttaacctttcaggagtcacccaagagtcctgcctgcctccgcttacccctccaactcacttcctgctcccagggcccaagggccctggcctcactcacagaaactctgtctttttcttctcttctttatccttagtcctcagctttgtcttccagggagagcctggtgatggggagccctcatggtagagaccactcgaatctgccagctctgcctcttcctcatcccctggagggtagagtttcaggagggatagatcatctgggataaggcgaaggctgcttttaaccttncccgagtacacccgaaccagcggcgccttcccccgatccagcaccagccggcgccgccgcctgac

SEQ ID NO: 59981 - DNA, 318 bp, Homo Sapiens
atgtcagacgcagccgtagacaccagctccgaaatcaccaccgaggacttaaaggagaagaaggaagttgtggaagaggcggaaaatggaagagacgcccctgctcacgggaatgctaatgaggaaaatggggagccggaggctgacaacgaggtagatgaagaagaggaagaaggtggggaggaagaaggtgatggtgaggaagaggatggagatgaagatgagggagctgagtcagctacgggcaagcgggcagctgaagatgatgaggatgacgatgtcgatacccagaagcagaagaccgacgaggatgactag

SEQ ID NO: 59982 - DNA, 527 bp, Homo Sapiens
cctgtaaagatggggtctcactatgttgcccaggctggtcttgatctcctgggctcaagccatcttcctgactcggcctcccaaagtgctgggattacagaaatgagccactgtgccctgctctccttgtgaattttaggagcataggttcaagagactctgggtgaaagtatgttttacaaagaggaaaggcagtgaagaaacaggggaagcaggcttacatcaactgttctggaatgaagagctgtgcataggcagaggggagagagctgctatacaggagagaggatcaatgaagcagcgatatgtctgaagacccaaaaaggtggattagctgggcatgaagagagattgaggcaacaggagtgggaggaggcatgttaggagaggcagagaagctttacagccgctacttgcaaggaggatgtaacagcgaggagggagagaccaaagcgcagcctcaactctccctgacgggggtctgtgtccctctgctccagtgttttcctcactctctggcccagcct

SEQ ID NO: 59983 - DNA, 484 bp, Homo Sapiens
tttttttttcaatttgtgaatctatgattttttgaaagtaaaaatattttttaaagttctaataaggaatcaggaggtaagacctccataaaaagctttattattgaatgatacctgatctcacaaaaaacaaacaactaagcagaaaatattcttgaactaacccagaccctttcttcccatttgatgacctagtattgctggtaactcaacataaaattacatccctagggaaaaaaaataaagtcactctaaagagaaattgaaaatgagaaaaaggagagtaaactttaacacaatatgctaatatgaattaaattattagatatttaaaaaatctgaaatagcaacttaaaaactcagaactggacaaacaaaatgcagatgtgaatgactggctaaaatcaggaaaaaaattcggagaaaaagacaaacacatatccagatgtgaaggcattataaagtatccaaggaagaagagata

SEQ ID NO: 59984 - DNA, 502 bp, Homo Sapiens
ttttttttctgctgggccttaacattgcagaaattgtttagaatgacataattgagaggagattgtcagaaacatacttattaattttcatgagaaaatcagattgaatatcaccaactagtcagtaacaatttcaaatgaataatttcataggtgaacacacaggtcatgataaaaacaattagaataaaaggagtctgtatgattccatggaaccaaagtttaaaaacacagttttctattgcttgagataaatccagtaaatccggatgtgaccttgacttgtcaggtcaagacaccaattaatgtttgctccccttcactccgacccatgcctccaggcatgagagcaattaagcttttgtgaaagatctgttatctcttcacttatatgagggacctagaacaggcaaattcggagggacagaagtgttatagaggttacagggcctgcgagggaaaggagcagggaatgaggagttattgtttaatgggtacggtt

SEQ ID NO: 59985 - DNA, 560 bp, Homo Sapiens
  misc_feature (470)..(470): n is a, c, g, or t
accagatccctacaatggtataaaggaagaacatcaacatttaggtttagattcactagaacaactgctaagcatggaactgtctccaaacttttaaatataatataaactttttttcaaagaggaaaggtttcctgtgcagaataaataaatgcagatattgggtgagggtgagaaggagaaaagggttagagcccagcttgctgaaatgtcccttagtcctacccttaatctgtacagcagccctgggtctcagcaaaacacaactagaaacccactgccaaaatgggcactcagataatacataattgcaaaacactatctttttaatactgtaatagctacctaacactatcaactcaaatctgtgatcttaaactcagtattgatataataaactaatagttaaaccaaggcatactttaaccagtgagtctagatttgctaaatactaataaacttctcagttntgaagaatggagaacataaccttctttcactgatttactattttggtcacacaaaaatacagtgttttttaagcatagtgaaaagtacat

SEQ ID NO: 59986 - DNA, 531 bp, Homo Sapiens
  misc_feature (269)..(269): n is a, c, g, or t
  misc_feature (271)..(271): n is a, c, g, or t
  misc_feature (279)..(279): n is a, c, g, or t
  misc_feature (282)..(282): n is a, c, g, or t
  misc_feature (497)..(497): n is a, c, g, or t
aaaattaaacttttaattttgccatcatcgtacatttgagtgcggttgttagaaataatatagagagatcctgcgtaccctgaatgtatgcgatgtccccaacagtgacctgctgtgtacacacagtgccacgccatggccgggatgcggacgcggtgccatcccccaccccactccctcctcagctctacccaccctcgcacgccctgtgtgcaggttttgtgcaggttttttattttacttttttttttttttttttgagacggaancncactctgntgnccatgctggagtgcaatggtgtgatcttggctcactgcaacctccatctcccgggttcaagcgattctcctgcttcagcctgggaggcagagcttgcagtgagccgagattgcgccactgcactccagcctgggagacagagcgagactccgtctcaaaaaaacaaaacaaaacaaacaaacaaacaaaaaacaacaaagcaatcaataccaganacatgaaagaaaaatgccagttctcagagctgtt

SEQ ID NO: 59987 - DNA, 570 bp, Homo Sapiens
tttttttttttttcaataaataggtagttacacgagcaggaatataatccccggtgtgcatccatagcttcaccatgctctgagcagtttgcagtcacatgccagtgactggctatctgctggttgttgaacctattctgtacaagagaaaacagatgtctgctcttactgccaagtccccgttcttgcattttaggaaccattccacacgcacggggaggtttttgttaatttctttcggatgatgactgagtgctttacgctgtgcaggacttccgatcctggcttttctactcacgtgaacgttagtagctgtttatcactcttacggccaatgtgagatctagttttctacttgttatggaagcccttgaacccttccatgcctagggacaaaggaggcctgttgaccctatttttatgtttggtcacctataattgaaagaataagtgtttttttcacacatagcattgtaaataataaaccagttatggttgtcactgattttaaagatactaaactatcctcatttcaagaaccaccaccagttatcacatgcattatatgtc

SEQ ID NO: 59988 - DNA, 3636 bp, Homo Sapiens
tggcaaacatctacactctctttctttcaccccatcttgtgatgtttttgttatgtacagtggaagagattaatgatatccatcaaatgaaatgatgatagtatacctatatcttgaaaatccatacacatatcagtgtatattttgtgtacaagatatgagtacaaggtaatgaaactaggtattctaagacatacatatatacacatacacacaagcatatgtgcaaatgagtgtgggccttttcaaagtagtcactttacgaggtcataatgtttattcctgttacatggctattgttcatattggttttagaactttgataacttcagcatattcatgtctaagcaacaaaatatttagtttttgtatgtggctttgggttttggtaatatccataggctattcaaaccttagtctacaaataatttacatgatgaacaagctgaggggtataattttaaatccaagataaggtgcatactaataaaatgaaataggtattctgttaattgaaataattctaaaacaattacaaaaggagaattcagaaatgtttgagcagtgtcagtgtctttgaaataagcgcagaacttctcaagatctagaaaggcagtttcatatgcaggaaggaacactggattaagttgcaaatcttagggtcagttcctaggcttccacttattaactgtttgggagctacttcagtgggactctgggttttaatctttgaagtgggttgatgctctcttagatccattagcgttaaagtccctgatgttgcgattctgctttgaaagtaattacaaatacatgtaaatgatgtcaggactgaggattggccacattataaaattgcaaagttttgccactattttctttaaataggtttttgtatgtttgttaaattttatctttttggccaggttcaatggcttagccctgtaatcccagcactttgggaggccaagccaggcagatcacttgaggtcaggagctcaagaccagcctggccaacatggtgaaaccccatctctactaaaaatacaaaaattagctgggcatgatggtgtgcgcctgtaatcccagctaccttgggaggctgagacaagagaatcacttgaacccaggaggcagaggttgcagtgagccgagatcacgccactgcactccagtctgggtgacagagcaagactctggctcaaaaaaacagtttatatctttttgctttatatcaagcctattcctggttggatcattttgtttttacaggtgaggattcaaggatcaaaattaagtgactggctcagaaacagagcagtttacaaatcaagttagattggaagctttcagacttagacctacagttctgacttcacaaccttgaaatggccatttttcccactagtgggtagaaaatggatgaaaaaactttaacaaatggatgaaaataatggcgcagttttcaatttcataataatgtccattccccacttcctactaccctccatttatacttgtaactgaaaattttgtgggttagtaacaattagatgttcccattttacaagactaaaagcaaagagtttttacatctctgtctagaagaaactgtcacacacacgtaaatgtgaataatgcccatatagctgagaatattactaagggaaaccacataaggataatgttttgttattaaaattaaaatattttatcaggggtgcaacatcgtccattgaaaatgtccattctaaatacagctcttaatgtaattacagcaataatttagtttgtacattcaaggttgtgaacttttttatatttgctggatgcagttctgaaatttagtacttgtctgtcttaaggagatctgccctgcatgcaaatctataactagacaaatattacttcctttcccagcttgctcttgggaggtttccatatcctcaggtaagattgttcattactgctgtttgccactgtgacattcattcctatgtatgaaggtgcagggagcaattgtgaacatttgagtcacatacaaataaatctgtcctgttaaattgaaaagtggtatcttaaagggttcatttagaaatctctattgatttttgatttttttaaactcctgattttttcttcttgttaaaggttgagagtgatcattgtgcttttcctttgtgtgacattcgggattgttttttttcctggtccaataccatgtactcattttgaggttggaggagagagccagctttttcttgatacactttttaagctcttaaattcacttaaaattttttgagttaaaagattaagacaaagggtgaaagcatctaatctaggtcattatttttgctaggcaaatatataggcccccaattttatgagtgtaattttgaacatattatttaaaaatattttgctccctcctgtctacatttgtaaggaaacaaaacagtccattatagtagcattgctgactctaatctttattaaaatttctttaagatttttattatagaagggtaccagcactaaaatagaaagctattttgtggtttgaaaatgattccccagtttgtgggggaaataagtgaaatgtctagagggatgaaaaatgaatggtttgactgttttcctctggttgatgttcactgtttttctggcatcttggtctgtacaggccaaagtgcctagaggcatgtctgatttaaaggtggtgttggtctctgctctttaagcatctattaacttgctattattatgcaaataagtgttgtattacacatactaatttatgcatggttagattatgcagatgcatcacaaacatggttattgaataataggatggggctcattctctctaccatctttataagcagttttaagcaaattctcctggtaccaatgtggacatttaaagaccctttactcaatgaaatgtctctttcgtattcttttgctttcatagttaaagccatcagataagtggaagagaaatcgtccaagttgttaggttcaagagtgttagtctcacttttcaaattcgtagacttttttgtttaaatgtaatcttttccttatagagaaaatctaaaatgcagttgcttggcatgaatgctggcatttagtgagattttagtgtatatagccttgctgcttagctctaggtaacccatcaaattaaaattacattttcaggatttatagctcattagaatatttatcttggtaagcttcttattctgtcagtaatttctaaacaattcagcttggccaatttgtgaaatcccctaaaattttgaaagtgaactcacaagccctatgcagtatatttctcaaacaaatcttagtagaaaacttataagccatccagtaaaaattccaaaggttgagaatgtagcaatattcttgagattcctaatgtctagagtagttaatcagtgagatttgatgggtgatgagtctaagaaatggattttgccatggccaggtgcagtggcttacgcctgtaatcccagcactttgggaggccgaggtgggcggatcacgaggtcaggagattgagaccatcctggctaacatggtgaaaccccgtctctactaaaaatacaaaaaaaaaaaaaaaaa

SEQ ID NO: 59989 - DNA, 628 bp, Homo Sapiens
  misc_feature (132)..(132): n is a, c, g, or t
  misc_feature (527)..(527): n is a, c, g, or t
  misc_feature (539)..(539): n is a, c, g, or t
  misc_feature (545)..(545): n is a, c, g, or t
  misc_feature (574)..(574): n is a, c, g, or t
  misc_feature (624)..(624): n is a, c, g, or t
tcgtagagatagggtttctccatgttgcccaggctggtctcgaactcctgggctcaagtgatctgcctgtctcagcctcccaaaatgaggcatgagcggattacaggcatgagcaccgcgcctggcctgagntaaactgaaatgtttgccaaagatttgttggaactggtattttgaaatgaaagcatcttatactgtgtttagaacatactagatggtccatagttggaagctgctatcacaatattactactgttatagcaaattcagagattcacactgaatttggttcccacaattctgcattactttcgaatagttggtaaaagaattttttttgttttaacagatacatgaaaagcaaagaatttatgaatgaaatcttctaaggatgggctgccaatttttcaggtgtacacagaaatgtatttctctttagaacagtaagctgggggagatgaatcacctctgggtgcagaccctgcctggggtgggccaagccaacaaaccctggcatccattaaacntaatggcatacntgggcnttctcccggaatcccctttggataaggancatcctgccaagggtgaccctgatgaggggccttccaacccaaggaattncctg

SEQ ID NO: 59990 - DNA, 2100 bp, Homo Sapiens
cgatgatgaggctgaagaaaaggaagacaaagaagaagaaaaagaaaaagaagagaaagagtcggaagacaaacctgaaattgaagatgttggttctgatgaagaagaagaaaagaaaccaaagactaaaaaagttgaaaaaactgtctgggactgggaacttatgaatgatatcgttcataaactttcctatttatgtatggagcagcaagactgaaactgttgaggagcccatggaggaagaagaagcagccaaagaagagaaagaagaatctgatgatgaagctgcagtagaggaagaagaagaagaaaagaaaccaaagactaaaaaagttgaaaaaactgtctgggactgggaacttatgaatgatatcgttcataaactttcctatttatgtatggagcagcaagactgaaactgttgaggagcccatggaggaagaagaagcagccaaagaagagaaagaagaatctgatgatgaagctgcagtagaggaagaagaagaagaaaagaaaccaaagactaaaaaagttgaaaaaactgtctgggactgggaacttatgaatgatatcgttcataaactttcctatttatgtatggagcagcaagactgaaactgttgaggagcccatggaggaagaagaagcagccaaagaagagaaagaagaatctgatgatgaagctgcagtagaggaagaagaagaagaaaagaaaccaaagactaaaaaagttgaaaaaactgtctgggactgggaacttatgaatgatatcgttcataaactttcctatttatgtatggagcagcaagactgaaactgttgaggagcccatggaggaagaagaagcagccaaagaagagaaagaagaatctgatgatgaagctgcagtagaggaagaagaagaagaaaagaaaccaaagactaaaaaagttgaaaaaactgtctgggactgggaacttatgaatgatatcgttcataaactttcctatttatgtatggagcagcaagactgaaactgttgaggagcccatggaggaagaagaagcagccaaagaagagaaagaagaatctgatgatgaagctgcagtagaggaagaagaagaagaaaagaaaccaaagactaaaaaagttgaaaaaactgtctgggactgggaacttatgaatgatatcgttcataaactttcctatttatgtatggagcggcaagactgaaactgttgaggagcccatggaggaagaagaagcagccaaagaagagaaagaagaatctgatgatgaagctgcagtagaggaagaagaagaagaaaagaaaccaaagactaaaaaagttgaaaaaactgtctgggactgggaacttatgaatgatatcgttcataaactttcctatttatgtatggagcagcaagactgaaactgttgaggagcccatggaggaagaagaagcagccaaagaagagaaagaagaatctgatgatgaagctgcagtagaggaagaagaagaagaaaagaaaccaaagactaaaaaagttgaaaaaactgtctgggactgggaacttatgaatgatatcgttcataaactttcctatttatgtatggagcagcaagactgaaactgttgaggagcccatggaggaagaagaagcagccaaagaagagaaagaagaatctgatgatgaagctgcagtagaggaagaagaagaagaaaagaaaccaaagactaaaaaagttgaaaaaactgtctgggactgggaacttatgaatgatatcgttcataaactttcctatttatgtatggagcagcaagactgaaactgttgaggagcccatggaggaagaagaagcagccaaagaagagaaagaagaatctgatgatgaagctgcagtagaggaagaagaagaagaaaagaaaccaaagactaaaaaagttgaaaaaactgtctgggactgggaacttatgaatgatatcgttcataaactttcctatttatgtatggagcagcaagactgaaactgttgaggagcccatggaggaagaagaagcagccaaagaagagaaagaagaatctgatgatgaagctgcagtagaggaaaaaaaaaaaa

SEQ ID NO: 59991 - DNA, 570 bp, Homo Sapiens
tttttttttttttttttgaatccaagacttactgttatgatagaagcaagaagcaattagggacctacccctgacatccattaaagtcaacacctacatagctatatcacaagaggtggaaaatgagattaaaatgtatatttgctagcacttaatagtttatagccagtctaaataaattatcaatctaaatagattatctcatttgattttcaaaagcaagtaaaattatgtatggagatactaaccctgtcttagaatgaagtcagaactttgggaaagatcataattttccttcaaaacactgacaacaatttgtacttttctatttttctctgtaactccacttcatccattcattccacaaatatttattaagtatctactacatgtcaggtactgtactgggtgctagagatacagcaatgaatgcaacagacaaagactgtgacccctacaatccagtaaggattttttttgtttaatatctgtctcatccaaccagactataaactccacaaaggcaggacaagtgcctgtttattcacctctccttcccagcacttatgc

SEQ ID NO: 59992 - DNA, 2199 bp, Homo Sapiens
cagaaataagttggaggaatcttaaacgttcattggtgggagaagggttaagcaaattacgatatatttttagagtagaatattatgctgtcattaaaaatatttctgaagaatttttaaataacatgggaaaattactttgttaatgaaaagtgaaaaggatgatttatggatgtacagtacaatctcaactatatattttttaaagtatgtatagaaaaaagactggaaggaaaataccaaaaagttaatagcagttgcctctggatgatggggtaatagattttccccctttatatatttctttatttatcaaatgttcaacaataagcatgaattatttttataatgagaaaagcaaaacaaaacaatacaacacaaagcaaagaggaagaatcaggcagccaacaccaccagttttatcagaggtgaacgatagaatgatggctgattacatgtgatcattttgaagtctaagaaaagaaatggataaagaatatccttgtggattttatctggatttaggataatgagagtcttgttgatgagagtcttgttggagagtcaaggtttcagaaacatatgtatgcacatgtaacgctggcttcctaaataagcctgtttggtgaacttgtttttctcctctcccagtataaatgaggtgtgtctcttccaggcatagagaggagagacatggggtgggtcagggtagagcaggattaatgaacaatatggaaactaaataattctttctgaccttgtactttcacaatgaacttgcagctggcccggttgtaggctcggtcataggcagtgtaacgaatcacatgctctccttcgggaaagtgagagccaggctcagggccccgaagtgtcaccctgcatgggacagggtgaaataaacactgaggaaagagacccttagaattgaagtctgaggcacatccccactgtcaccttagcctgtgcagtttcaatgtgaccagcctgaatgactgagagaagccgagggaaggcataaggggcatccattattcaggctcacctggtgatggtaccatcagcagaatctttcaccaacggtgggtcccagtatactcgagcagtcaatttctctggctctgccatcttctcacgtgagtggggacagcggatcttggggggatctatgtctgccaagatgaaaaatcaagtgctgactcgtgggccccttgctttccctggagggaatccactgaagcaatgccacacaccactgggtagataaaaagttcaaggtgctcaaggaaactggggaaggaagcgcaacttcaggggagaagatcattttgtttagcaaatacccagggtgccaccctcatagctaagaggaatgccttctgtggtgagaattccacatcttttgtcgatataatgctggggtggctctttgcaccaggacaactgggagcaaccagcatttacctacacatacaggctcgcctccactccatctcccatcttccatgcagattcggctgcgatcaccttccaggtggtagccactggaacagctgtagtcacagcgagagtcaagaagcactccatttgtgcaggtgtaagtgccactagtgatgaatggtagtgcgtggcatctcatctctaagagaaaaccaagtggcaagctcagtggcttgtgtgactatctggaggtgatgcctgggcatctagcacagggagaaacatcagaagagcagaaaatacagaaaccctacctgaactgcccttacatttttgtgcctaactgcctttttccctaattgtctttgtattttcataaagtatagcagcacccttgggcaggggggtgtcaaaaaagtaaattacttgtccaagcatatagacttcaaaatcagacctaacactgtacattgtcaaaatccatagaatatacagcaagagtgggccttaatataatctatggaattcaggtgacaatgatgtattaatttatgttcgtcaactgtaaaaaatgtaccactctggtgggggatgttgacaacaggggaggctgtacatgtgtgggtgctggggataaatgggaaatatctgtatctttcattcaattttgctgtgaacttaaaacttctctaaacaaatagaatctattttagagggggaaggaaaacaacttatcaagagtaaaaaaaaaaaaaaaaa

SEQ ID NO: 59993 - DNA, 35944 bp, Homo Sapiens
gatcacgaagtcaggagatagagaccatcctggctaacacagtgaaatcccgtgtctactaaaaacataaaaaattagccgggtgtggtggcaggtgcctgtagtcccagctactcgggaggctgaggcgggagaatggcgtgaacctgggaggcaaagcttgcagtgacctgagatcatgctactgcactccagcctggacaacagagccagactctgtctcaaaaaaaaaaaaagaaagaaaagaaaagaaaaaaaagaaaaaccaaaggtaaagtggtaagatcttccacacctgaaccagtttgtagccaccagagcctgctgcgaaggggcccctcaagcatgcattcatcttgtcacctggaatttgagagatcaagaagccccatagcaacctaccatgcaactgcccatcagtgctgatcctttcaagggattatctcaattctgactctgcagacactggcagccacaggtgacaaaccctgtgtatctgtgggctttcctcatcacccagggccacaatggggtgcctgccctaggcagagacacagcaacattctcttaaactgaaattaagcataaatccacttcaccaataatcatctgagggctcagtccctgtctccttcctcggggattttaaaacacacatttctctgaccaaacaggtaggtgagatctgactttaaaggggggaaattgggttgaattgaggtatcaggaatggatcacaagtgtttttgtgtggggacaggcatccacatcccgaactgtacctggagatggagaaaaatgcaggagaggagaagagaaaaaaaggaggaaaaagtggctgaaagtatttgaaagcttctctcatggttctttctggctctggttgcttttccaaggtcttgagtgcaggcagggccagctctggctgggagctgctgctctgggacatggaagagtcacttcacctccagaaagttcattcgatcatctgtaaaatgggcaagcccataggtggttgtgatgataaaatgaaaaaaaaaattcttaacttacatgagttacatgctgtatagtaagttatgtgctatataggaagcacacagaaatgattcactgttatcataatagaaggacagtggcttggtgtgctaagcactaaatacaagccagaaaaaatgtcttagagaagtagacaaagaaatctatagttcagaaccaacagtaccaagaatgacatgtcctccaaattgagcttgggcaggtagatctgaacctatcctacacatctgagtctatgatatgaggtaatagtctccacctatagctatcttctctgcctgtgaggtcattcctttttgaagaaagctgacctcagactatactgtgatcatttaaggaagagcacaaaatactggagaaggctagtcttcaagctctagatacagaaaatcctcatattcttgggtgttccctttcagacagagaatcagagccacaagcactaatccagaaaccccctttcccaaaaacgttttccatctcctaccaaggttcacatccctattgagtgctcactagtgtctatagttgctagagcaagagtctctccttattctctaaggcaggagttctgtgaaggccccatgacaaggggacaaaatgaaacaacatgtttagggacaacacaggaaaaacccatattatcaaagctccaaaacctggctacctcaggcttggccagttattcatgagcagagaggtttctcatctacatggcagtcatggcctggatgggtctggaactgtggcaagataaggctctgagacaaggtgccaggagaaagatgaattcaatcatccatttctgccaggaagaaaagcaccaggaaggaatcagatgtacagtttgtcctctggggacctctgccttgatccgcaataaatctccttttagatgccacgtgcagcaattcccacactttacaatgctctccatggcttctgttggccttatggtcagctctgccaagatctgtattcttgggcaagacagaatccttctgaatctcagtctcttcctctataaatggaaacaatttggctctacacaaatcacaattagcatgtttgtgggaagttaaaccgtgaaactcagcatcaatgaaaagcaatgtaccactgttgcttatgaaaactcttgtaaagttgtcaggcaccatgcaccatctaagtacagcagtgttaggtataagcccatcagtgattagagggggtatggggtggagagggggtctctgagcagtgggtctccgggctctggggaagctggctgggtggccatactaggagctgaacccgaaggtactctgtgtgtcctctcaactccacgggccccactttggcattttctccaattccctctcgtttccatttgcttcctccctctagccccctggctgtgtccaatttcaacaccaagtttctgagcttttctcattttgttcactgtctccagaacatccctgcttcttttacctttcaaagaattcaaacttgaactctgctcactcctgcccatcaccaacctgagctcagagttcctgagaagggaaagcaccctcataaggaaactcctccttttcttacatcattagacttgagcacagacagcatttccatctccacactgctctggccaggttgtgcctcagtcaattacacaactgtgtctcagtagccttggtagggcccaaatcaggatattctttgggaagtttcactttgtactgagccaagcataatctcccgggatctaaaatagaaaattctagacccacccctccacatcttcgttattgaacccaatatgtcacccatttaccatgtgctcaaatctctacctactgctgattctcagatcaaatcgtaacccaggtttaccatggtccaaactctgacatctgattggggccatgtcatcctggttcaggctgtcagccccaagcaggtgggtcagtttgcctcaccctgagagcaggttgccagggcaaccatgaggctgcataaaaagaacctatgacaggatgcatatgagagagacaaatgtcttcacattgaagaaggggaggagtgcaccattggttttccatcctccagatgcactaagctcctacctaaactgtgccccctccttctttgaaacacatcccatccttaagccttggtaggaaggagagccatctggaagccctgaatcctatggaatgctgagtctcccttctccttaccccttagtgttggaattctcattccccaaagtcttggatttgaccttgcccgacactgactggagagaagcatcttcatattcacaggaatgagccttagatcagactttgctcctctcctgggagctccaggacactgaaaagccaagcttgttaccaatacttgcccttccttaagtacattaaatacatcccaaatagttaaacagattcctaaacagccaggccattctccctccttctaaccctcatctcctcggcctacgaaagcccagatgtgtgatccagggcttggcttcccctgtcttccccatcccagcatccttgcgggaaagggctgctctctctctctgctttcagaaggcaaatttccttatcacctatgagtcacaaacccagagagtggccaaacatagccaagctgatgcaagaccctgggaaggggaaagctgcaggtgtgtttgtgctgggaggagtgctgaccctcacctcagagacacctcctctccagatcctcaggaggtataaagacaggtcctccaccaccagtcaggcacactctaccaccatgaatccactcctgatccttgcctttgtgggagctgctggcgagtttcatgccatgcctcaggccccaaccaccccctttcctggcagacacttgccctgccattcttgccacctttcccattttgactgtgttctgatattctatttcctccatctctccttcccatcctccttcggctctctttaagcctcacctgtttcagcttctccatgatttcactcccaccactgtcattcatccatatctgagctgtggctggagaagctgggaagggagaccaggtggggcgggcccacaaaatgaagcagcagccttcaggcttggctccatagcaccagtatagcaccattatatctgctcttaacctcaaatgcacctggggaggttgaaaaattactcatatcagagactcagctttagaagttctaacttcattctctggggtgcaacctgtgtactgggcttttaacattcccgggtgatttttaacatttccatgcatgcagccaaggttaagaattgctgttctattggccaataacaatgtctacctttgttctgccaaagtgagcctgggggctgccctcaactctgccctgactacacaaatctgagctatgggggaagctggtcatggccaggtctacgcagccagggggttttcctagcttggccaaagtatactgacaatccagggctcaaatcgccaggggaagtacacaggtgatgaataaaagagagaagcactcagtgggtgagacaaccacatcccaattcctatcccactggaagcattgtgaggacattccttgaatcctcagcctggtgaccccggggagaactgagcccctgcagggtacctagctacatgccctgcagacacagagacttgggagccacatgcagtgatgcttaccaggggtgacagcgctccctcccttacctagcctcactgtgctcgttaaggatttctaattagcaggaagcaaccgaaggctgggagcgctacccctaacatgctactgacttgccttctcctttcccatctccactccagttgcttcccctttcgacgacgatgacaacatcatttagtggtatacctgtgaggagaattctgtcccctaccaggtgtccctgaattctgggtaccacttctgcagtggctccctcctcagcgaacagtgggtggtgtcagcagctcactgctacaagtagtaagtgtggggcccctgactgcaaagctcccagccaggctgcctgggagagcttggcttcagcccagggaactactgaggttgggtaagatggatgggagaggtggtggagaagaaaacttgttggcagcagcggactctccagagcagagagcgaacacaagacaggaagctctcacacccaggcaaatccatgaaacagcaagggttgtggtcataaaagcaggcagggatgatcttggtgtttggcagagctagtaagaacagcaggcaagtaccctttgctggttagctacacatcaaagtcacttaagaaagagtttttaaaagtactgatgcctgtgtcctatcccagggcaattatcaggaattttcaggaagagggtgtgaatatcagtgagtattaaacattctacctctggtaactgtagattgtatagacagagctgagaactgctccctacaccaagaactctcaaacctgagtttgcctcagaaccacctgcagggttgttaaagcacaaatcactgggacccatccccaaggttctgagcagtaggtgggggtaaggaccaagaatttacatttctaacaagttcccaggagatgctaatgctatggctacccttaggttagattacacagaagggtggtgctcaccaggccaagaaaggagggaggaacaggcactgtgcacagttagcaaaggcctggggtgaagaatgctgggaaaacttcaaagagctccttgtgcccacagtgctagtgactgtggagattgtgggaaagaggctgggaaggagggttaaggagcatcctccggtggaatccttttgactcttcccaaccccattaccaccaacctctgaaacagaaaggtcctgggtctcacaacttcactgacccccatccctctcctgcccatgtgatatggccacacaccccacccgatgcctccagagctgcccatgagcagggagcttgaggaccctggggaaagtaagatgggtgtcccagctgtgggagaaggtcttcaccatgcctgccctgcccatcagccgcatccaggtgagactgggagagcacaacgtcgaagttctggaggggaatgagcagttcatcaatgcagccaagatcatccgccaccccaaatacaacagttggactctggacaatgacatcctgctgatcaagctctccatgcctgctgtcatcaatgcccacatgtccaccatctctctacccaccgcccctccagctgctggcaccaagttcctcatctctggctagggcaacactctgagctctggtggtgagtgggaccctttgtccttctccttccctccatcctcacaatttccagaacaaaccatgccccttaacttgaatcctctcacctccaggcttaagacacatttctagtgcccattacacacaggctgtacagtggatggacatcagagagatgcaaagtctcaaggacttggctcctaaaatcaaaagacaggacatatagagaacttgctttgatcacgtcttggaaggggttcaaaaatgatcattctgggaactaaaagccagagtcccttgccaggacttaggtttcggagtcctctccagggacagtgttcctcttcaatgttccatcctagattattgtctccttctctggcctgatctacacttctactttctttgttctcttgctgatcctcacagccaactatccagatgagctgcagtgcctggacactcatgtgctgacccaggctgactgtgaagcctcctaccctggagagattaccaacaacatgttctgtgtgggtttccttgagggaggcaaggattcctgccaggtggtttgaccccttcccatgctgaggttcccactgatacccaggccccacccaggaaaaagatttgaactcccaaggtggcggggctcaggaggctccctgcactgcccccatggagaagtgaggaagactcccttgggctgcatcctgtctgcttaggaagaacagagaatgggccactgtgcgaaggacgtggagccaaagagctggctggaaaggagtcttttaaggttcagagcaaatgtagctatattcttcctctttctctctcttcatacagcttgtcccttcttctccccagggtgactctggtggccctgtggtctgcaacggacagctccaaggagttgtctcctggggctatggctgtgcccagaagaacaggcctggagtctacaccaaggtctacaactatgtggactggattaaggacaccatagctgccaacagctaaagcctctggtacctctgcagtctctataccaataaagtgaccttgctttcactgtctgtgtctgtgcctgctccctcacactgcttcacactggaaagcatcctccaatctcaggtcagccacgactcccccccttaaaggtaagctgaaccctcatctcccaaaatgtgttgcatggtacactagattagcacatacaaatagatggaatccaaaaattataagaaacttgggagaaaggggggcactgttttctagagaaatgtgtgtttcagaaagttggtctttggtgggggggtactgatttttatttgggcttctcacagtgggtagagctactctgccttcagaacaatcacagcacagaaaatgttgtcagcatcttcgaggcagcccaaaaaatccgaccagctgaatcttcttgctaaaatacatcaaaaaagacaaatgctgttggtgatgacgtgcctctcacaggaatatgtcagcaccaaaccctcaaccaagccctccctcctcattcacctggaaaattagactcaagcaaagctccctggcctcctacctcttccctcagttccctagttccatctctgtgagcaggctagagagatgttccacctaccatagcgggagctagactgcgacttgggaatcaagccaggtctgcacgctgcattttcatcttctttgcctttggggtaggacgccatatgaatcccacagttaacaccagctccccactctgaccagggaaagaaactagagagggtcaagattcacccatttgatcaattaactgaggtaggtttcattttcatataacttgcttgcctttgagatacttcaagtgacttacgtgggactccttaaaaaaaagtggagggaaagacatctgagcagccactctggccacatgttggctggcttgcacccactggatgcagcagagggaggcaggccccctggcacctctggcacctgccaaagcctcttccaggcaattctgagagggaccatgttggggctgtagctcatccaagcttgtcaccgaagatccaagcaagcttctctttgaaattccaccttcatcttctgtcccaagtggttgtggacacccctgggagctggtaacaagggccaggagcagccaaggaagacagacaagttcagagcacatttccagttacagggaacagagcacaggcctccaagtgtccacagagcagtgtgcaaattgcagggatgagtagaggaaaacctctacatggagcacagcattcctggcaaacacaagggaccgcagtccacatgctgtggaataaacccaagtatgcatcggacacttgtttggtaaacagtaaatgtgtaagatcaattaccttgagagggccatctgggctccagatatgtagttcatgtgaggagacggctaccactcactatcttcagaggaaaacagggctcagggcttgcacacaatggagatacacacaggtcacccagaacgtcaatacatacaaacatcactttgttcaacatggattttgtttttatggagtccaaacgcagaccgtagttcaccttacagccttgggtttgtctgcttttggagacatatatccagtagatagatagacaacacagatacatttttttccctttcttactgtaacgtcagtgcctcgtctgaatatcatcatcactcaagaatcaagggaagaacaaaatgcttcatataaacagggctgggcaaggagtcttagtttcccctgttttctgtctccattcagatcattcctatcaaagcccagctggttacctcaagccaagagacagacataaggatcccaatggccttctagatggctgcttccacctcctacctgggccacatagagtctttacacagaaatctgagttagccctgtgagaagggttgacagcacaaacagtgcatgaaaatcacagataaccatggtatatctcgcaagtggtcagtgtaaaataaaccaccaccaccaccacaaaaaacacaaaacaagcagaaaaatgcttattcaaaaatctaagacaaaatactgtgtgagaaacaggccacggggttgccttttctcaggccacacagctttcccattccatgtgctcacatggaccgtgagatgtgaaagtctgcagggcgtgtgctcgggatcgaggctggtactgttcacctgtgggtccagaccaaatggcaaagaggcagaaagctataactctgtccaccgccacggcttagggcctccttctcacagaggctccaaagagcccccacctcagccttcacacaaaacatctccttctggctgaacaacagccaggctggagtgccgtggcatgatctctgctcactacaacctccacctcccgggttcaagtgattcagtctcccaagtacacgggattacaggcactcgccaccatgcccagctgattttgtttgtttgtttgtttgtatttttagtggagacagggtttcaccatgttggccaggctcattttgaactcctgacctcaagtgatccaaggtactgggattacaggcatgagccaccacttctggcccaggacccattttttaaaaaaattttcaacttttattttagattcagggcatacgtgtgcaggtttgttacatgggtatattgcgtgatgctgaggtttggggcacaaatgttcttaccactcaggcagtgagaatagtgcccaataggtagttattcagccctttccaccctccttctctcttccctctagcagttacagtgtctactgttcccatctttatatccatgtgtaccaaatgctcagctcccacttatacagaagaacgtgatatttggttttacatacctgtgttaatttgcttagaattatggtctccatctccatccacgttgctgcaaagacatgatttcattttttcatagctgcatagtattccatggtgtatatgtaccacatttcctttatccaatctaccgttgatggccacctagattgattccatggctttgttattgtgaatagtgctgtgacggacatgcaagagcatgtgtctttttggcagaccaattattttcctttgggtatatgcccagtaaaggaattgctgggtggaaaggtagttctgtttttaattatttcagaaatctccaaactgccttctgcattaatttttccataaactaatcgacagtcaggccaagagtgtataagcattccctttcctctgcagccttgacagcatcttctatttttttttttttttttttgacgttttaataatagccactctgcagccaagctctttcaaggccaatgtggggtagagccacaaacatcccttttccggaagagaattcttgcctgcccactggtagaattcttgttttcatctgtcttttattatttgtttttcaaagaaaaactggcctgtaatcccagcactatacgtggccgaggcgggcggatcacgaagtcaggagatagagaccatcctggctaacacagtgaaatcccgtgtctactaaaaacataaaaaattagccgggtgtggtggcaggtgcctgtagtcccagctactcgggaggctgaggcgggagaatggcgtgaacctgggaggcaaagcttgcagtgacctgagatcatgctactgcactccagcctggacaacagagccagactctgtctcaaaaaaaaaaaaagaaagaaaagaaaagaaaaaaaagaaaaaccaaaggtaaagtggtaagatcttccacacctgaaccagtttgtagccaccagagcctgctgcgaaggggcccctcaagcatgcattcatcttgtcacctggaatttgagagatcaagaagccccatagcaacctaccatgcaactgcccatcagtgctgatcctttcaagggattatctcaattctgactctgcagacactggcagccacaggtgacaaaccctgtgtatctgtgggctttcctcatcacccagggccacaatggggtgcctgccctaggcagagacacagcaacattctcttaaactgaaattaagcataaatccacttcaccaataatcatctgagggctcagtccctgtctccttcctcggggattttaaaacacacatttctctgaccaaacaggtaggtgagatctgactttaaaggggggaaattgggttgaattgaggtatcaggaatggatcacaagtgtttttgtgtggggacaggcatccacatcccgaactgtacctggagatggagaaaaatgcaggagaggagaagagaaaaaaaggaggaaaaagtggctgaaagtatttgaaagcttctctcatggttctttctggctctggttgcttttccaaggtcttgagtgcaggcagggccagctctggctgggagctgctgctctgggacatggaagagtcacttcacctccagaaagttcattcgatcatctgtaaaatgggcaagcccataggtggttgtgatgataaaatgaaaaaaaaaattcttaacttacatgagttacatgctgtatagtaagttatgtgctatataggaagcacacagaaatgattcactgttatcataatagaaggacagtggcttggtgtgctaagcactaaatacaagccagaaaaaatgtcttagagaagtagacaaagaaatctatagttcagaaccaacagtaccaagaatgacatgtcctccaaattgagcttgggcaggtagatctgaacctatcctacacatctgagtctatgatatgaggtaatagtctccacctatagctatcttctctgcctgtgaggtcattcctttttgaagaaagctgacctcagactatactgtgatcatttaaggaagagcacaaaatactggagaaggctagtcttcaagctctagatacagaaaatcctcatattcttgggtgttccctttcagacagagaatcagagccacaagcactaatccagaaaccccctttcccaaaaacgttttccatctcctaccaaggttcacatccctattgagtgctcactagtgtctatagttgctagagcaagagtctctccttattctctaaggcaggagttctgtgaaggccccatgacaaggggacaaaatgaaacaacatgtttagggacaacacaggaaaaacccatattatcaaagctccaaaacctggctacctcaggcttggccagttattcatgagcagagaggtttctcatctacatggcagtcatggcctggatgggtctggaactgtggcaagataaggctctgagacaaggtgccaggagaaagatgaattcaatcatccatttctgccaggaagaaaagcaccaggaaggaatcagatgtacagtttgtcctctggggacctctgccttgatccgcaataaatctccttttagatgccacgtgcagcaattcccacactttacaatgctctccatggcttctgttggccttatggtcagctctgccaagatctgtattcttgggcaagacagaatccttctgaatctcagtctcttcctctataaatggaaacaatttggctctacacaaatcacaattagcatgtttgtgggaagttaaaccgtgaaactcagcatcaatgaaaagcaatgtaccactgttgcttatgaaaactcttgtaaagttgtcaggcaccatgcaccatctaagtacagcagtgttaggtataagcccatcagtgattagagggggtatggggtggagagggggtctctgagcagtgggtctccgggctctggggaagctggctgggtggccatactaggagctgaacccgaaggtactctgtgtgtcctctcaactccacgggccccactttggcattttctccaattccctctcgtttccatttgcttcctccctctagccccctggctgtgtccaatttcaacaccaagtttctgagcttttctcattttgttcactgtctccagaacatccctgcttcttttacctttcaaagaattcaaacttgaactctgctcactcctgcccatcaccaacctgagctcagagttcctgagaagggaaagcaccctcataaggaaactcctccttttcttacatcattagacttgagcacagacagcatttccatctccacactgctctggccaggttgtgcctcagtcaattacacaactgtgtctcagtagccttggtagggcccaaatcaggatattctttgggaagtttcactttgtactgagccaagcataatctcccgggatctaaaatagaaaattctagacccacccctccacatcttcgttattgaacccaatatgtcacccatttaccatgtgctcaaatctctacctactgctgattctcagatcaaatcgtaacccaggtttaccatggtccaaactctgacatctgattggggccatgtcatcctggttcaggctgtcagccccaagcaggtgggtcagtttgcctcaccctgagagcaggttgccagggcaaccatgaggctgcataaaaagaacctatgacaggatgcatatgagagagacaaatgtcttcacattgaagaaggggaggagtgcaccattggttttccatcctccagatgcactaagctcctacctaaactgtgccccctccttctttgaaacacatcccatccttaagccttggtaggaaggagagccatctggaagccctgaatcctatggaatgctgagtctcccttctccttaccccttagtgttggaattctcattccccaaagtcttggatttgaccttgcccgacactgactggagagaagcatcttcatattcacaggaatgagccttagatcagactttgctcctctcctgggagctccaggacactgaaaagccaagcttgttaccaatacttgcccttccttaagtacattaaatacatcccaaatagttaaacagattcctaaacagccaggccattctccctccttctaaccctcatctcctcggcctacgaaagcccagatgtgtgatccagggcttggcttcccctgtcttccccatcccagcatccttgcgggaaagggctgctctctctctctgctttcagaaggcaaatttccttatcacctatgagtcacaaacccagagagtggccaaacatagccaagctgatgcaagaccctgggaaggggaaagctgcaggtgtgtttgtgctgggaggagtgctgaccctcacctcagagacacctcctctccagatcctcaggaggtataaagacaggtcctccaccaccagtcaggcacactctaccaccatgaatccactcctgatccttgcctttgtgggagctgctggcgagtttcatgccatgcctcaggccccaaccaccccctttcctggcagacacttgccctgccattcttgccacctttcccattttgactgtgttctgatattctatttcctccatctctccttcccatcctccttcggctctctttaagcctcacctgtttcagcttctccatgatttcactcccaccactgtcattcatccatatctgagctgtggctggagaagctgggaagggagaccaggtggggcgggcccacaaaatgaagcagcagccttcaggcttggctccatagcaccagtatagcaccattatatctgctcttaacctcaaatgcacctggggaggttgaaaaattactcatatcagagactcagctttagaagttctaacttcattctctggggtgcaacctgtgtactgggcttttaacattcccgggtgatttttaacatttccatgcatgcagccaaggttaagaattgctgttctattggccaataacaatgtctacctttgttctgccaaagtgagcctgggggctgccctcaactctgccctgactacacaaatctgagctatgggggaagctggtcatggccaggtctacgcagccagggggttttcctagcttggccaaagtatactgacaatccagggctcaaatcgccaggggaagtacacaggtgatgaataaaagagagaagcactcagtgggtgagacaaccacatcccaattcctatcccactggaagcattgtgaggacattccttgaatcctcagcctggtgaccccggggagaactgagcccctgcagggtacctagctacatgccctgcagacacagagacttgggagccacatgcagtgatgcttaccaggggtgacagcgctccctcccttacctagcctcactgtgctcgttaaggatttctaattagcaggaagcaaccgaaggctgggagcgctacccctaacatgctactgacttgccttctcctttcccatctccactccagttgcttcccctttcgacgacgatgacaacatcatttagtggtatacctgtgaggagaattctgtcccctaccaggtgtccctgaattctgggtaccacttctgcagtggctccctcctcagcgaacagtgggtggtgtcagcagctcactgctacaagtagtaagtgtggggcccctgactgcaaagctcccagccaggctgcctgggagagcttggcttcagcccagggaactactgaggttgggtaagatggatgggagaggtggtggagaagaaaacttgttggcagcagcggactctccagagcagagagcgaacacaagacaggaagctctcacacccaggcaaatccatgaaacagcaagggttgtggtcataaaagcaggcagggatgatcttggtgtttggcagagctagtaagaacagcaggcaagtaccctttgctggttagctacacatcaaagtcacttaagaaagagtttttaaaagtactgatgcctgtgtcctatcccagggcaattatcaggaattttcaggaagagggtgtgaatatcagtgagtattaaacattctacctctggtaactgtagattgtatagacagagctgagaactgctccctacaccaagaactctcaaacctgagtttgcctcagaaccacctgcagggttgttaaagcacaaatcactgggacccatccccaaggttctgagcagtaggtgggggtaaggaccaagaatttacatttctaacaagttcccaggagatgctaatgctatggctacccttaggttagattacacagaagggtggtgctcaccaggccaagaaaggagggaggaacaggcactgtgcacagttagcaaaggcctggggtgaagaatgctgggaaaacttcaaagagctccttgtgcccacagtgctagtgactgtggagattgtgggaaagaggctgggaaggagggttaaggagcatcctccggtggaatccttttgactcttcccaaccccattaccaccaacctctgaaacagaaaggtcctgggtctcacaacttcactgacccccatccctctcctgcccatgtgatatggccacacaccccacccgatgcctccagagctgcccatgagcagggagcttgaggaccctggggaaagtaagatgggtgtcccagctgtgggagaaggtcttcaccatgcctgccctgcccatcagccgcatccaggtgagactgggagagcacaacgtcgaagttctggaggggaatgagcagttcatcaatgcagccaagatcatccgccaccccaaatacaacagttggactctggacaatgacatcctgctgatcaagctctccatgcctgctgtcatcaatgcccacatgtccaccatctctctacccaccgcccctccagctgctggcaccaagttcctcatctctggctagggcaacactctgagctctggtggtgagtgggaccctttgtccttctccttccctccatcctcacaatttccagaacaaaccatgccccttaacttgaatcctctcacctccaggcttaagacacatttctagtgcccattacacacaggctgtacagtggatggacatcagagagatgcaaagtctcaaggacttggctcctaaaatcaaaagacaggacatatagagaacttgctttgatcacgtcttggaaggggttcaaaaatgatcattctgggaactaaaagccagagtcccttgccaggacttaggtttcggagtcctctccagggacagtgttcctcttcaatgttccatcctagattattgtctccttctctggcctgatctacacttctactttctttgttctcttgctgatcctcacagccaactatccagatgagctgcagtgcctggacactcatgtgctgacccaggctgactgtgaagcctcctaccctggagagattaccaacaacatgttctgtgtgggtttccttgagggaggcaaggattcctgccaggtggtttgaccccttcccatgctgaggttcccactgatacccaggccccacccaggaaaaagatttgaactcccaaggtggcggggctcaggaggctccctgcactgcccccatggagaagtgaggaagactcccttgggctgcatcctgtctgcttaggaagaacagagaatgggccactgtgcgaaggacgtggagccaaagagctggctggaaaggagtcttttaaggttcagagcaaatgtagctatattcttcctctttctctctcttcatacagcttgtcccttcttctccccagggtgactctggtggccctgtggtctgcaacggacagctccaaggagttgtctcctggggctatggctgtgcccagaagaacaggcctggagtctacaccaaggtctacaactatgtggactggattaaggacaccatagctgccaacagctaaagcctctggtacctctgcagtctctataccaataaagtgaccttgctttcactgtctgtgtctgtgcctgctccctcacactgcttcacactggaaagcatcctccaatctcaggtcagccacgactcccccccttaaaggtaagctgaaccctcatctcccaaaatgtgttgcatggtacactagattagcacatacaaatagatggaatccaaaaattataagaaacttgggagaaaggggggcactgttttctagagaaatgtgtgtttcagaaagttggtctttggtgggggggtactgatttttatttgggcttctcacagtgggtagagctactctgccttcagaacaatcacagcacagaaaatgttgtcagcatcttcgaggcagcccaaaaaatccgaccagctgaatcttcttgctaaaatacatcaaaaaagacaaatgctgttggtgatgacgtgcctctcacaggaatatgtcagcaccaaaccctcaaccaagccctccctcctcattcacctggaaaattagactcaagcaaagctccctggcctcctacctcttccctcagttccctagttccatctctgtgagcaggctagagagatgttccacctaccatagcgggagctagactgcgacttgggaatcaagccaggtctgcacgctgcattttcatcttctttgcctttggggtaggacgccatatgaatcccacagttaacaccagctccccactctgaccagggaaagaaactagagagggtcaagattcacccatttgatcaattaactgaggtaggtttcattttcatataacttgcttgcctttgagatacttcaagtgacttacgtgggactccttaaaaaaaagtggagggaaagacatctgagcagccactctggccacatgttggctggcttgcacccactggatgcagcagagggaggcaggccccctggcacctctggcacctgccaaagcctcttccaggcaattctgagagggaccatgttggggctgtagctcatccaagcttgtcaccgaagatccaagcaagcttctctttgaaattccaccttcatcttctgtcccaagtggttgtggacacccctgggagctggtaacaagggccaggagcagccaaggaagacagacaagttcagagcacatttccagttacagggaacagagcacaggcctccaagtgtccacagagcagtgtgcaaattgcagggatgagtagaggaaaacctctacatggagcacagcattcctggcaaacacaagggaccgcagtccacatgctgtggaataaacccaagtatgcatcggacacttgtttggtaaacagtaaatgtgtaagatcaattaccttgagagggccatctgggctccagatatgtagttcatgtgaggagacggctaccactcactatcttcagaggaaaacagggctcagggcttgcacacaatggagatacacacaggtcacccagaacgtcaatacatacaaacatcactttgttcaacatggattttgtttttatggagtccaaacgcagaccgtagttcaccttacagccttgggtttgtctgcttttggagacatatatccagtagatagatagacaacacagatacatttttttccctttcttactgtaacgtcagtgcctcgtctgaatatcatcatcactcaagaatcaagggaagaacaaaatgcttcatataaacagggctgggcaaggagtcttagtttcccctgttttctgtctccattcagatcattcctatcaaagcccagctggttacctcaagccaagagacagacataaggatcccaatggccttctagatggctgcttccacctcctacctgggccacatagagtctttacacagaaatctgagttagccctgtgagaagggttgacagcacaaacagtgcatgaaaatcacagataaccatggtatatctcgcaagtggtcagtgtaaaataaaccaccaccaccaccacaaaaaacacaaaacaagcagaaaaatgcttattcaaaaatctaagacaaaatactgtgtgagaaacaggccacggggttgccttttctcaggccacacagctttcccattccatgtgctcacatggaccgtgagatgtgaaagtctgcagggcgtgtgctcgggatcgaggctggtactgttcacctgtgggtccagaccaaatggcaaagaggcagaaagctataactctgtccaccgccacggcttagggcctccttctcacagaggctccaaagagcccccacctcagccttcacacaaaacatctccttctggctgaacaacagccaggctggagtgccgtggcatgatctctgctcactacaacctccacctcccgggttcaagtgattcagtctcccaagtacacgggattacaggtgcatgccaccatgccaagctaattttttttttcttttttgtatttttattagagacagggatttacgatgttggccagtgtggttttgaactcctgacctcaagtgatccagagtgctaggattacaggtgtgagccacagcttctggcccaggccccattttttaaaaaataatttcaaattttattttagattcatggggtacatgtgcaggtttgttacatgggtatactgtgtgatgctgaggtttggggcacaaatgatctcctcactcaggaactgagcacagtacccaataggtattttttcagccctttccacactccttctctcttccctctagtagttgcagtgtctactcttcccatctttacatccatttttacccaatgctcagctccgacttatacatgagaacgtgatatttggttttctgttcccatgttaatttgcttaggattatggtctccagctccatccatgttgctgcaaaggacatgatttcattcttttcatggctgcatagtattccatggtgtatatgtaccacattttctttatccagtctaccgctgatggccacctaggttgattccatggctttgctactgtgaatagtgctgtgatggacatgcaagagcatgagtctttttggcagaacaattactttcctttaggtaaatgcccaataaagcaagtgctgggtggaaagatagttctgttttaaattgtttcagaaatctccaaacggttttctacattaatttttccatgaactgatttacactctggccaacagtgtacaagcattccctttccactgcagcctcatgagcatcttctattctgtggacattttaataataaccacactgcagccaagctctttcaagcccaatgtggggaacagccacaaacatcccttttcccaacgagaattcttgcctgcccactggtagaattcttgttttcagctgtctttcattgtttgcttttcaaagaaaaaccaaaggtaaagtggtatgatcttccacacgtgaaccagtttgtagccaccagagcctgctgggaaggggcccctcacgcatgcattgatcttgtcatgtggaatttgagagatctagaagccccacagcaacctaccatacaactgcctatcagcgctcatcctttcacaggattagctcaattctggctctgcagacactggcagccacgggtgagaaaccctgggcctctgtgggcttccttcatcacccagggccacagtgggctgcctgtcctaggcagagacacagcaacattctcttaagctgaaattaagcataaacccacttcaccaataatcatctgagggcacagtccctgcctccttccttggggattttaaaacacacatctctctgaccaaacaggtaggtgagatctgactttaaaggggggaaagtgggatgaattggggtatcaggaatgaatcccaagtgtttttgtgtggcgaatggcatccacatcccaaaatatacttggagatggggaaaaaagcaggagaggagaagggtaaaaaaggaggacaaagtgtctgaaagtcattgaaagcttctctcatggttctttctggctctggttgctttgccaaggtcttgagtgcaggcagggctggctctggctgggagctgctgctctggaacatggaagagtcacttcaccttcagaaagctcatttgctcatctgtaaagtgggcaattccataggtggttgtgatgataaaatgaaaaaaaagttcttaacttatatgagtgacatgctgtatagtaagttacatgctatataggaagcacacagaaatgattcactgttatgataatggaaggacagtggtttggcatgttaagcactaaacacaagccagaaagatatcttagagaagtagacaaagaaatctatagttcagaatgaacagtaccaagaatgacatgtcccccaaattgagcatgggtagctggatctgaacctatcctacacatctgagtctacagtatgaggtaacagtcttcacctatagctatctcctctgcctgtaaggtcattcctttttgaagaaagctgacctcagactatactgtgatcgcttaaggaagagcacaaaatactggagaaggctagtcttcaagctctagatacagaaaatcctcaattcttgggtgttacctttcagaaaaagagtcagagctacaagccctgatccaaaaatccctttttccaaaaaaattctccatcttctaccaaggttcacctccctgtttagtgcacactggtgtctatagttgctagagcaagagtctctccttatcctctaaggcaggagttctgtgaagaccccatgacaaggggacaaaatgaaataacatgttcagcgacaacacagcaaaaccccatattatcaatgctctaaaacctagctacctcaggcttggccagttattcatgagcagagaggtgtgtcatctacatggcagtcatggcctggatgggtctggaactgtggcaaggtaaggctctgagaaaaggtgccaggagaaagatgaattcaatcatctatttctgccaggaagaaaagcaccaggaaggaatcagatgtacagtttgtcctctggggacctctgccttgatcctcaataaatctccttttagatgccacgtgcagcaattcccacacttcacaatgctctccatggcttctgttggccttatggtcagctctgccaagatctgtattcttgggcaagacagaatccttctgaatctcagtctcttcctctataaatggaaataattttgctccacacaagtcaccattagcacgttggtgggaagttaaactgcgaaactcagcataaacaaagagcaatgtaccactgttgcttacgtgaaaactcccgtgaagcagtcaggcaccatgcaccatctaagcatagcagcgttaggtatcagcctattagtgattagagagggtaccggggagagagggggcctcagagcagtgggtctcctggctgtggggaagctgcctcagtggccatgccaggagctgaacctgaaggtactctgtgtgtcctctcaacaccatggaccctattttggtatttttttccagttacctctggtttccatttgcttcctccctctagccccctggccatgtccgatttctccagcaagtttctgagcttttctcattttgctcactgtctccagaacatccctgcttcttttacctttcaaagaattcaaacttgaactctgctcactcctgcccatcaccaacattagctcagagttgatgagaagggaaagcaccctcataaggaagcccctcctttccttacattattagacctgagcgcagacagcatctccatctccacactgctctggccaggttatgcctcagtcaattacacgactgtatcttagtacccttggtagggctcaaatcaggatattctctagaaagattcacttagtactgagccaagtataatctcactacatctaaaatagaaaattctagacccacccctccacatctttgttattgaacccaatatgtcacccatttaccatgtgctcaaatccctacctactgctgattctcagatcaaatcataacccagatttaccatggtccaaactctgacatgtgatcaggggcatgtcattctggttcaggctgtcagccccaagcaggtgggtcagtttcaatcaccctgagtgcaggttgcaagggcaaccatgaggctgcataaaaagaacctatgacaggatgcacatgagagacaaatgtcttcacattgaagaaggggaggagtgcgccattggttttccatcctccagatgcactgagtaagctcctacctaacctgtgccccctccttcttctcatccctatgccgtggtaggagggagagccatcttcaagcccagcatcctatggaatgctgagtctctcttctccttaccccttaatgttggaattctcattccccaaagccttggatttgactttcccactgagtgactggagagaagcatcttcatattcacaggaacaagccttagttagataagactttgctcctctcctgggagctccaggacactaaaaagccaagcttgctaccaacacttgcccttccttaagtacattaaatataaccccaatagtaaaatatattcctaaacagccaggccattctccctccttctaaccctcatctcctcggcctaagaaagcccagctgtgtgatctggggcttggcttcccctgtctttcccatatcagcatccttccaggaaacagccggtctccctctctgctctcagaaggcaagtttccttatcacctgtgaatcacaaacccacagagtggccaaacatactgatgcaagaccataggaaggggaaagctgcaggtgtgtttgtgctgggaggagcagtgaccctcacctcacagacacctcctctccccatcctcgggaggtataaagacgggttctccaccagcaatcaggcacactctaccaccatgaatctacttctgatccttacctttgttgcagctgctggtgagtttcacgccctgcctcaggcctcaaccaacccttccctggcagacacatgccctgccattcttgccacctctcctcttttgactgtgctgtgatattctatttcctccatctggcatttcttcttcccatcctccttgggctctttttaagcctcacttgttccaccttctccttgatttcactcccaccgctgttattcatccatatccgagctgtggttggagaagctgggaagggagaccaggtggggctggcccatgaaatgaagcagtaggcttcaggcttggctctgacagcaccacaatagcaccactatagctgctcttaacctcgaatgcacctggggaggttgaaattactcatgcaagacactcaactctagaaattctcacttcaattgtctggtgtgcagcctgtgttctgggcttttaagcttcccaggtgatttttaacatttctaggcatgcagccaaggttaagaattgctgttgttttgaccaataataacgtatacctttgttctgcaaaagtgagcctggggcttccctcaactctgccctcactgggcagatttgagctgagggggaaactggtcatggccaagtcgatgtcgccagggggttttcctagcttggccaaagtagccagacaatccggggcttaaataaccaggtggagtacacaggtggtgaataaaagagagaagacttcagtgcttgagacagccacatcccaaatcctatcccactggaagtattgtgaggatattccttgcgtcctcagcctggtgaccccaggagagatctgaacccccacagggtacctagctacgtgccctgcagacacagagacttgggagccacatccagtgatgatcaccagggctggcagcgctcccccccttgcctagcctcactgagcttgttaaggttttctaattagcaggaagcagccacaggctgggagcgccacccctaacatgctactgacttgccttctcccttcccatctccactccagttgctgccccctttgatgatgatgacaagatcgttgggggctacatctgtgaggagaattctgtcccctaccaggtgtccttgaattctggctaccacttctgcggtggctccctcatcagcgaacagtgggtggtgtcagcaggtcactgctacaagtcgtaagtgtggggcccctgactgcaaaactcccagccaggctgcctgggagagcttggattcagcccagggaagtactgaggttgggtaggacggacgagagagatggtggaaaagaaaacttgttggcagcagctgactctccagagcagagagtgaacacaagacaggaagccctcacacccaggcaaatccatgaaacagcaagggttgtggtcataaaagcaggcagggatgatcttggggtggtgagagctagtgagaagagcaggctagtacttttgctggttagctacacattaaagccacctaagaatgagtacttaaaaatactgatccctgtgttctatcccagggcaattaactcaaaattatcaggaagagggtgtgaatatcagtgagtatttcacactctacctctggtaactgtagagtgtatagacagagctgagaactgctgcctacaccaagaactcttaaacctgagtatgcatcagaactccctgcaggcttgttaaggcacaaatcactgggacccatccccaaggttctgatcagtaggtgggggtaaggaccaagaacttacatttctaacaaattcccaggagatgctaatgctatggctacccttggattagattacacagaagggtggtgctcaccaggccaagaatggagggaggagcaggcactgtgcacagttagcaaaggcctggagtgaagaatgttgggaaaacttcaaggagctccttgtgcccacagtgctagtgacatggagattatgggaaagagtctgggaaggcagattgaggagcagcctctggtgggatccctttgactcttccccactccactaccaccaacctctgaagcagaaaggtcctgggtttcacacctgcactgacccacattgctctcctgcccatgcaatatggccacacaccccaccccatgcctccagagctgtccatgagcagggagcttaaggacccatggaaaggtgggaggggtgccctggctgtgggagaaggtcttcaccatgcctgccctgcccatcagccgcatccaggtgagactgggagagcacaacatcgaagtcctggaggggaatgaacagttcatcaatgcggccaagatcatccgccaccccaaatacaacagccggactctggacaatgacatcctgctgatcaagctctcctcacctgccgtcatcaattcccgcgtgtccgccatctctctgcccactgcccctccagctgctggcaccgagtccctcatctccggctggggcaacactctgagttctggtggtgagtgggaccctttgtccttctacttccctccatcccacaatttccagaacaaaccatgccccttaacttaaatcctctcgcctccaggcttaagacacatttctagtgcccattacacacaggctctgcactgggcaccagagagatgcaaattctcaaggatgtggctcctaaaatcaaaagacaggacaaatggagaacttgctatgatcacttcgtgggagaggttcaacaatgatcattctgggaactaaaagccagagtcccttgccaggacttatgttttggagtcctctccaggggcagtgttcctcttcaatgttccatcctagactattgtctctttctctggcctaacccacatttctttctttgttctcttcctgatcctcacagccgactacccagacgagctgcagtgcctggatgctcctgtgctgagccaggctgagtgtgaagcctcctaccctggaaagattaccaacaacatgttctgtgtgggcttcctcgagggaggcaaggattcctgccaggtgatttgaccccttcccatgctgaggctcccactgataaccaggccccaccagggaaaatgatttgaactcccaaggtggcggggctgaggaggctccctgcagtgccccatggagaagtgaggaagactcctttgggctgcatcctgtctgcttaggaagaacagagaatgggccaccgtgagaaggacgtggagccacagagctggctggaaagggctcttttaaggttcagagcaaatgtaggtgtattcctcctccatctctctcttcatacaacttgtcccttcttccccccagggtgattctggtggccctgtggtctccaatggagagctccaaggaattgtctcctggggctatggctgtgcccagaagaacaggcctggagtctacaccaaggtctacaactatgtggactggattaaggacaccatagctgccaacagctaaagcccctggtccctctgcagtctctataccaataaagtgaccctgctctcactgtctgtgtctgtgcctcctccttcacactccttcacattggaaagcatcctccaacctcaggtcagacagggctctcccccttaaacataagaagagcctccagctcccaaatgtgttccatggtacactagattaacacatacaaagaggtggaatccaaaaataagaagcttgggagaaaggggggcactgttttctagagaaacgtgtgtttcagaaaggtggtcttcggcaggggctattgttttatttgggcttctcagagtggttagagctactctgccttcagaacaatcacagtacagaaaatgtgtcagcatcttcgaggtggcccaaaatatttgaccagctgaaacttcttgctaaaatacaacaataattacaaatgctgctggtgatgacgtgactctcccaggaatgtgtcggcaccaaaccctcgaccaagccctcccttctcattcgcctggaaaatcagactcaaataaatcttcctggccctccgactcttcccttaattccctagttccatctctgtgagcaggctagagagatgttccacctaccacagcgggagccagactgcgacttgggaatcaagcccagctcttcatgctgcatttttatcttctttgcctttggggtaggatgccacagtgaatcccacagctaacaccagctcctcactctgaccagggaaagaaactacagagggtcaggattcacccatttgatcaattaactgagaaaggattcattttcataaaacttgcttgactttgagacacttcaagtgagttatttgggattctttaaaaaaggtggaaggaaagatctgaggactgtgacacaaccagccactctgaccacacattgactggcttgcacccactggacacagcagagggaggcaggcttcatggcacttgcggcacctgccaaagcctccttctggcaattctgagagggcctaagttggggccgtagctcatccaagcttgtcacccaagatccaagcaagcttctctttgaaattccaccttcaccttctgtcccaagtggttgtggacatccctgggagctggcgctaagggccaggagcagccaagggagacagacaagttcagagcacatttccagttacagggaacagagcacaggcctccaagtgtccatggagcagcgtgcaaattgcagggatgagtagagtaaaacctctacatgcagcacagcattcctggcaaacacaggggaccacagtacacatgctgtggaatacacccaagtatgcatcagacacttgtttggtaaacagtaaatgtgtaagatcaattaccttgagagggccatctgtgctccagacatgtggtttgtgtgaggagacggctaccactcactatcttcagaggaaaacagggctcagggcttgcacacaatggacagatacacatgggtcacccaaaacgtcactgcatacaaacatcactttgttcaacatggattttgtttttatggagtccaaatgcagaccctagttcaccttacagccttgggtttgtctgctttgggagatatatatccagttgatagacagacaagacagatacattttttccctttcttaccacaatgtcaatgcctcatctgaatatcatcattactcaagagtcaagggaagaaccaaacgcttcatataaacagggctgggctgggctagatggggagtgttagtttccagtgttttctgtctccattcagatcattcctatcaaagcccagctggtcacctcaagccaagacacagacataaggatcccaatggccttccagatggctgcttccacctcccatcttggccactaagactctttacacaggaaagtgagtcaccccagtgagaagggttgccagcggaaatagggcatgaaaatcacagataaccatgggatttcttccaagtggtcagtgtaaaataaaccaccaccaccaccaccgaaaacacaaaagaagcaaaaaaagtgcttattcaaaatccaagacaaaatactgtgtgagagtcaggccacggggttgccttttctcaggccacacagctttcccagtccgtttgctcgcatggaaccgtaagatgtgaaggcctgcagagcgtgtgcttgggatggaggctggtactgttcacctgtgggtccagaccaaagggcaaagaggcagaaaactgaaactctgtccaccggcacagcttaggcccttctgctcatagaggctctgaagaacccccacctcagccttcacacatatccttctggctgaactacagccaggctggagtgccatggcatgatctctgctcactacaacctctgcctccagggttcaagtgattcagcctcccaagtagctggaattacaggcacccaccactgtgcccagctaatttattttttattttatttatttatttatttatttatttatttatttatttattttgtatttttagcagagacagggtttcaccatgttggccagactggttttgaactcctgacctcaagtgatccaaagtgctgggattacaggcgtgagctaccgctcctggctcagaccccatttttaaaaaatattttcaacatttattttagattcatggggtacatgtgcagatttgttacatgggtatattgtgtgatgctgaggtctggggcacaaatgatctcctcactcaggcagtgaccatagtacccaataggtatttttttagctctatccaccctccttctctcttccctctagtagttgcagtgtctagtcttcccatctttatatccatgtgtacccaatgctcagctcccacttatacatgagaacgtgatatttggttttctgttcttatgttaatttgcttatgattatggtctccagctccatccatgttgctgtaaaggacatgatttcattcttttcatggctgcatagtattccatggtgtatatgtaccacatttccttcatccagtctaccgctgatggccacctaggttcattccatggctttgctactgtgaatagtgatgtgatggacatgtgagagcatgtgtctttttggcagaacaattattttcctttgggtaaatgcccagtaatggaattgctgggtggaatcgtagttctgttttaaattatttcagaaatctccaaactgctttctgcattaatttttccatgaactcatttacactctgaccaacagtgtataggtgttccatttcctctgcagcctcaccagcatcttctgttttttgacattttaataatagccactctgcagccaagctctttcaaggccaatgtggagaagagccacaaacattccttttcccgaagagaattcttgcctgcccactggtagatttcttggtttcatctgtctttcattgtttgtttttcaaagaaaaaccaaaggtaaagtgataatgatcttccacacctgaaccagtttgtagccaccagagcctgctgggaaggggcccctcacgcatgcattgatcttgtgacctggaatttgagagatcaataagccccgtagcaacctaccatacaactgcccatcagcgctgatcctttcatgggattagctcaattctggctctgcagacactggcagccacagttgacaaaccctgggcctctgtgggcttcctttgtcacccagggccacagtgggctgcctgtcctaggcagagacgcagcaacattctcttaaactgaaattaagcataaatccacttcaccgataatcatctgagggctcagtccctgcctccttcctcggggattttaaaacacacatttctctgaccaaacaggtaggtgagatctgactttaaaaggagggaaaatcgggttgaattggggtatcaggaatgaatcccaagcatttttgtgtggcgagaggcatccacatcccaagctgtacctggagatggagaaaaatgcaggagagaagaagagaaaacaaagggggacaacgagccctggttgctttgccaaggtcttgggcacagacagggccggctctggctgggagctgctgctctaggggttgggagagttctgttcatccatggtgctcagcagcagggactgggggccgtggtaggtgcagatgcccagactctcaagcttgctccttgcatggctggcaggggcattgctccttgtcaccaggtgactgcacagggcagctgtcatggacatccagggggccatccagagcatcactgatgagcatgttgaatgctttggggccatcgtcatgttggccccagttgcacacatggtatcttctctttgcttggggcgaagggggcggggaggggcggggatagtctgccatgctcagagttgtaatcattcagcagctgctccatatattctaaatccttgcacaggaaggctcctcggcccaactcccccaggctggccacacagacactgggctccattcccaagtctttggtggctgctgtgtcagctggtgtcagaggccccagggtcagcaatgagtgggggtcttgtgctgcttctgctaggcccagccaaggggctgctctgtgcctcctgggagtcccagggtcactgccaccttaagggccacatgccatagctggaagtcactatatgtttggggaagagttggagatcgggaaaccattccctcataacaaggtagtaaatagtttggcaaaaaactgaagataaagtggcagtgctgagtaatcatgggcttcctacaggtgatcgggttgatttcttgttgccactgcctggcctgaagacagtgcttggctcagcggtggcagcagacgaagcagcagctcaagaggatgatgatggtggcccacaccagccagagccacagcagtgttttttgtcacaggtgtagcttggattgttggtaccacacaggcttatcccatgggggttcaccctgggttgacaggggctgggcagcacctggaggaccaggaacaccacccacacccccacacacacaccacccagaccatctcctctgcaagcccctcctgctcctgctcctccatcacagcactgccctccttctgcttcctctcctcctctgccctccagaacagtggtcttaaagaggtttcttggccttggcacttctgtgggctcccaatgtgctgatgtgtgacacgctggcatgcttggcaagacctcactgctgcctttgactacacagggtcctctctgtacccagagcaaacatatgcaaggaaaccccagcactgaccgaatcagcttcctcggaggcccctctccacatgtgctcctgctaacccagtctgtactccccacaagctgatgtcctgcttggagatgatcgtgctggccctcttgcccaacaactggctcctgtgtctggaggggagaagacaaatccttggtctccatccctcatgttcttgagaagtctgccttttattcctccacagaataataccaacatgtttacactattcctatgtatagacattttcccatttagttttctctcccctccggagtggttattaatccagcggtacagataagaaaacaggttcaaagaggcttattagtttacccacgtcccaagcccagcagatggtaggtctggggttgactcctcatttgcctggcttcaaagcccacgctctctgtgccccgcctcacatcccgctatgactgtggtctgaggtgatgacaagtccgtcagcgctgacctctgatgtttctccagccccctgtcactatcacccattcccttcctccctgcatctcctgaggggcacctcccaattgtcccattccatgcggcaagacgactgctctcagagagctcctggttatggcattgctccctaccctcccacagtgatcaaactagaattcaagctccctggggaaatgtagggttctcctggcaccacccttgcccccactcccagtctcatgcctcttcactgctctcctcccctgtcccctcccctgctcagaagccctggtggcccatccaacaagccatgcgcctcctgcctctgtctctggacactatggcactctcagactggaagccgttcctaacctccccttcacccttttcagaaaagtcttcctgattcttccttgtccccacctcccttgggtctggctctgctggccctccctcgggtctgaggcagccatcctcctcctgtctccgcttgcctctgtcctagtcctgctcaggtgctcaggtgcaatagatgcgtccatcctggcaatcaactgtgtgctcctcaagcgggtacatcttgtcttacatatcctgatatctccagtgattaagcaaagcctgggatgtaataagcacccagtgagtggaggaataaacatggagtggagggaaatgtgctgagaaaagaaagacccttccagaagaatgattctcaaagagtggtccctaagccagcaacaccaaaatctcctgggaatttaggagaaacacaaaagctaggccctaccccacacccaccgagtcagatctcctgggacagggcccaacaaacagcatatttttttatttgagatagggtcttgctctgttgcccaggctgaagtgcaatggcatgatcactgctcactgcagccttgacctcccaagctcaagtgatcctcccacctcagcctcccaagtagctaggaccacaggcgcacaccacaaacccagctaatattattattatttgtagagatggcaacctcatatgtcgctcaggctggtctcaaactcctaggctaaagtgatcgcctgcccctttgcctcccaaggtgctgggattacaggcgtgagccaccacacccagacagcaacctgcattttaacatatcttccaggtcttctgatgcccgctgaaaacttgagattggatacggtaatgacatccttaggccagtattgaaaccgccattgcaaaattgtaactgagacagtgaaacagatc

SEQ ID NO: 59994 - DNA, 210 bp, Homo Sapiens
cgagaacccgctggtttattgcgacgggcacggctgcagcgtcgcggtgcatcaagcttgctatggcattgttcaagtacccactggaccgtggttttgcaggaaatgtgaatctcaggagagagcagccagagtgatacagtttatgtaacttgatggaagaaaatggaattactccaaaaagacaagtgctcaagcagcaaaatcctt

SEQ ID NO: 59995 - DNA, 324 bp, Homo Sapiens
gggcgcagcgttcattcagcaccagaggattcacaccggggagaagccctacagatgtgccgcgtgtgggaaggccttcagccagagtgcaaaccatcagaggactcacactggggagaaaccctacaagtgcagcgagtgtgggaaggccttcagccagagtaccaatctcataatccaccaaaagacccacaccggggagaagccatataaatgtaatgaatgtgggaaattcttcagtgagagctcagccctcattcggcatcatataatccacaccggagaaaaaccttatgagtgtaatgagtgtggtaaagcgtttaa

SEQ ID NO: 59996 - DNA, 1778 bp, Homo Sapiens
gggtcctaagtataatttttgaaatagcttgataatttcctcaaatgagaaattgatcctagtaagagattgattataactcaactcttacaaaagaaggattaatggaatctatagagaatcacagaaagctaaaactagtcattaaaagcttgcccaaatcaatttcacaattggtacataattatactaataaaaataattttaaaatggcatttattttgaacaatgtataaccattcattctcataatggtgaaaaacggccttaataaaggattaaaagctggagagagacggagggattctcagagcaccagcccaagtgaagattgctgcttactgcaatggaaaagggagacagttagcattgggttaatatttaccatgttttactctctgggataggcattttatttacaatatctcttatgggaatgttttatttatttcattttctctagactgagatccttgcagagaaactggcatgcacaaaaaaatgtcctttgagttaaattggtcactttataagagatccagatttctccccaagtagagaaatttgcgcagaatgtggaagacaaactgcccattggaaacacatgcaaaatcactcagtagggatactctcctaccctgggcaagtgaggtcttcttgcagtaaatagtttccactgaggatggacttagaatgaagctaccttgaggggacacgtaggctactagtattcaggaacaacctgccagagacaatgcaggaagtgtgtgtgaaatgaccgaaaagataagagggtagagaaaccctaatggaaggacagatagtgtgaataaaggtagattctgaaaagaatgagctagcacattgtgtaaagatgaggagagaattagggctctggaggagagatctgaggaaaccacacagaatatagcacagagagatacaaagaagaagaatttggatgagtcatgaaaagcttggaggacaggctgagaaggtcccgcagtgtctaactgaattctagaaggaaaggctagggagactggaatagaggccatatgtggaggaatgtgggtgagaacttgctaaactgaggaaaaacactcttccccaggtggaagaggcacactgagttcagagtagtgatggtaaataacaaccacatccaccactagacactctttggtgaactatagggtattaaagacaaagagaaaaattctaaaagcagactgggacaacaaatctgtatttgtagcaggaaaaagcatgaggttcaggttttgactgtactgcttgctgcctgtgtcatcttaagtaggtcacctacctgcttcgagcctcagaggacatctgtcattggctaatgggagtagaagtggctaataacaagaacaatgactaccacacgaggttttgtgagccctgaaatatttccagagaataaatgtaaaagcattttaagtcattaaacaaatgggccgggcatggtggctcacacctgtaatcccagcactttgggaggccaaggcgggtggatcacctgaggtcgggagttcgagaccagtctgaccaacatggagaaaccctgtctctactaaaaatgcaaaattagccgggcatggtggctcatgcctgtaatcccagccactcaggaggctgaggcaggagaatcacctgaatgggaggcagaggttgcagtgagccgagatcgcgccattgcactccaacctgggcaacaaaagcgaaacttcatctcaaaaaaaaaaaaaaaaaaa

SEQ ID NO: 59997 - DNA, 344 bp, Homo Sapiens
cgagaacccgctggtttattgcgacgggcacggctgcagcgtcgcggtgcatcaagcttgctatggcattgttcaagtacccactggaccgtggttttgcaggaaatgtgaatctcaggagagagcagccagagtggctggagtggagtggcgcaatcattgctcactgcagccttgaagtcctgagctcaagagatcctcctgccgcagcttcctgagtagctgggacttacagagatgtgaactttgtccccataaggatggagctttaaaaagaacagataatgggggttgggcccatgtggtttgtgccctgtatattccagaggtacaatttgccaatg

SEQ ID NO: 59998 - DNA, 529 bp, Homo Sapiens
  misc_feature (484)..(484): n is a, c, g, or t
ctcccaggaatttcctagacggatcctgtaataactttcattcttagttctaagcctagatataacagacccctctgtcatcgcaatggtgttttccccaagatgagacattctttttaaggtatgtgactctaagaatgggaaagtgaggggaacaggtacagtcatgtgccacataatgacgttttggtcaataagagaccacatatacaacagtagtcccataacattaataacacaaagctgaaaaatttctatcacctagtaatgtcacagtggaagcattactcacgtttgtagtgatgctggtgtaaacaaacctgcacagccagttgtataaaagtattgcacatacaatacatgaaatacataatacttgaaaatgataacaaatgaatatgttagtggtttattgtccacgaagacctttcagtgggacggcatggggaggggaaagccagtgataatgacgatcctaaccctncacaggcctagactaacatgtgtttttgtgtcttaatgtttaaca

SEQ ID NO: 59999 - DNA, 318 bp, Homo Sapiens
gttaaagagacagggtctcattgtgttacccaggctaacgtgcaataatgtgatcatagctcactgtagcctcaaactccaggctcaaacaatcctcctgactcagcctccccagtagatgggactacaggcatgtgccatcatgcccggcttgtattttcttactttataattaacaaatattactttaaaaaaccatggttgaggagtcaataacatttatgtaatacaacaatttgcaggaatagttttaagacttgtaaacattgttagagctaactgtatgagtattttaggttgctgttcttgaaaaaataa

SEQ ID NO: 60000 - DNA, 497 bp, Homo Sapiens
  misc_feature (8)..(8): n is a, c, g, or t
  misc_feature (285)..(285): n is a, c, g, or t
  misc_feature (432)..(432): n is a, c, g, or t
aatcttanctatagacttgcatgattcaagataaaatgctttttaaaggagaaaaggtacagaaaataattttaaattctgccggaaagactggtataatgttctaaagtcactcactggccataacctatctttgctccttaatttctcattaatcctaacatcacccttagacacagcctggtatctccaacgacactcctcttaaataagccttgcctagacctgcttctcagcatcaactgttctttctacctacaatgccctcctctcccatccaaaggntctctcttttaagacctaaattgagttcttccagtaaactttccacaacagtcacagcccattgttttctctcctctcaactgccaatttactatctgtacatctcattatttggtagtggatcatatacttggcaactaaacctgnagaaccctgtcttagccacttcccaacccaatggccagaagagtggctttctaggagtagggtct

SEQ ID NO: 60001 - DNA, 585 bp, Homo Sapiens
aaagaagaaatgaaatgctccaatcattcacccaaagggaatatgtgatctggccagatgctgaaggctattcaacttggtttgatagtttcttattaaaatcagatgctaactagtgctctgattatttgcatgtttgcttttcctagtcacgagaattgtcattgctgaaaaatgtgtgcaaatatatttatttggcttaacagtcactttgctgatgtttcaatttccctgagaatgccacagccatgttaaggcaaattttgcagcttgacacaatctaaccaatcttaaaaaacatccccctcaagctcacatccccttttgttgtttgctatatatttctcattttccctctcaaccaaacatcttaaaagaagatgactacctcctctcctctcatttactcctcaaccacatgctatctaaatcccagctacgtggcttccctaaagtcataatcccaaaggacaccaatgatgagttgtctatgcccaccggacaccatcttgtcaagatctgccagggtggactcttctttctgaaactctctcctctgttcaccgagaccaccagtccctcctg

SEQ ID NO: 60002 - DNA, 113539 bp, Homo Sapiens
gatcagtgtccttataagcagaagttctttctgtgtgctctctttcttttactctcctgtacctttcctaccttgagagggcacgctaataagaggtcatgcgaggacatagtgagaagtcatccatctgcaacccaaggggaaagccctcatcacaaaccaaccctgctggcaccttgacctcggacttccagtctccataactctgaaaaaattaacttctgtcatttaagccacccagtctataacattttgttgtggaagcctaaaaagactaataaaaactcaacaaacattattttctagtattattattataattgctaccattatcatcatcatagggtcattgttattattatcattgttatttttgacatagtacatacagtccttgatattttaggcagttaataccttttgttattattaaaattgatattaaatttaaaaattatctggactacttaaaccaataaccattttctaagtttcaggaagtcatctgtatatttgagacaaatatgaccttgttttaaccacagctccctgagatgaacagaataaggggtatttttcctgtttttcagaaaaaaaaatgaaaatagaggataatggaagtaaaggcatgtgtctatggtcaactagctaggtctggctggagccaggatttgaactgtatcatttaaatcttagaccaaaacagaggcctcgactgtgtcatcatcattgagtcttaaaactaacatggaagcagatgtcagaagacctggatttcaagacaaattctgccaattcctaatcatgtgacattgtcctagatatttaacttattcatgctttaatttctcagaccattaactggaggttgcaatagtcaatgtcctagcaggaaactgatggtgcacacaaatgggatgagtgaagacaggttaatgaatagagtactgcaaaggtgtggacagggttggggaaaaccaacacaacatggtgaattatgtggagaagggggcagctagcaacagcagggagccacttccactcctaggccccaaggtttgagagttgtacctggaaggagctctagctggaacctgaagcgtaggacctcctagaagaagctgtgacctttggaagaggtgtgcagccaacccagagtctaacattatggatttcaaagaaatgaatactcggacctcacgttcttttttttctctaattatctgcttgtgttccccattaacattaaccaaacaaataaggagccgaagacattggagcccactgtgttctacagatcagtcccctggggcacagagcagggtagagaagagtaagagtagatccagaggggaaaggaaaatacccaacatgaacgataattactctatctgctcccccagagttattgtgaatgtacattgtcatttctcaggtactaagaaaacataaagcattgagagtgtttctaaaacactctcaatataaacaatctcaagataagactgttcttaccttgttaattttgccattctatcaacctgcaagatagtaatttccatcctctattttgccagtgaagaaatacataattaatctcagaaaggttacttttcacccaactgattgctgttcaagtgttaatctctacagctctaaaatctttcctcattttcctatttcaggcccattttcctttttctctttacatatgaacccatcagttgtagctctaatgaaacctttatttccagaatctttggactttctgtatatccctttatacctggcagcacaatagtatgtgcagacaagttttatcaggcatttttgatgagctttcattcttaaatttacccctgcagacctcccaaagacaagtgctgaatttgtttttgaagccctccctatggctggagctagccggtctattttgatacagggtgtggaggcttccctggctgtatcacacccacctagataagggagacaggatgccacacgaccttctgatatttgccaaagaacagaccagtaggggaatcaagagagcatgggtgtgcctagttaatcaggcaacgcagactaaacaagcctccacatttccttcctctgggttttaatgaaagttctttctaaccaagaatgaaaacagtcatttgttcattcaacattcgctgagcacctgacaggccttgtgctgggcacaagagatgaagagacaaatgaaatacaattcttctcctcaaggagttcaaagtcaggcaggcaagacaaacacataaatagacaataaaaatacaagatggtgagtattctaacaactttgaacagaggtctaagaaaaagcaaggtcctttgtctggtacttggagaagcctcatcaaagagctaacactggagctgggttttaaaggaaaagtagggaattatcaaaaacagataagaattatagtaataattctagaaacttattgactgcctttcatgaactaaaacataggcctttatcattaactctcacgtcaatcatattctagaaacaattaagctggagctcagaaaagaaacagcatgtccagattcacaaaggtaggaaatggcagagctaagtctcatgccaggtttttctggctctaaaaactcttttatttcaatactgctattccaaatggagataagagaggcagaatgataccttcagggaaaagtgaggttttgagactagctgaaacataaagccctgggggaaagggctgggaacagaggctggaagatggcagtaagctcagatattaaaaggcctcacatgtgtcaccccatttagattgttttgtaattattgggaagccataatcatatttctaatttataaatgtcattctaacagaagtgaagagaaaaattggaggcatatggaagacaaggagaccaatcaaaaagctgttgtcttcttccaggccagagacatttgagacctgaatgaagaatgtatttagtgagcatacagattgcaaaatcaatatgagttggagcaattctggaatgggtccccccataaaacatgactgtgcattcctagaaaagctctttgagatcatctgcattttgtagatggaaagttgaggcccagagaggagacaaggaagtgcacagagagtgtcagcttcagagctcactccatctcctgacccagatgggatctgatgcccttacctgtctttttggcagcctctcatgggagctataacacaggcccacaccaccacatcactggacattcccgcctgtgagatgcagccgtttctctttcccagcaagtcattctggaatatctcgcagtacatggacaagatccagccatctaggaaggctgatgggaggaagccctaacaatgaacaaatgtgcagggaaaacccccagtgattccccaaatgagctgaagcaaagcaaaccttccggacctcatgcttcactgagcaggcagattgtctgagcaggaccaggtgatgaggaaaagcaggatggtataacttgcaattcctgagacaagctttgaagcagaagcccaggtgcagtcattacattactaggaatatcacttaccttcctctgtgtgccagcagcccatgaggggaaagaaggagcactgtgcagaagtgccctctaactagagacctatagcttgtttttgggtttttttgtttgtttgtttttgttttgttttatgagatggagtctcgctctgtcacccaggctggagtgcaatgatgcaatcacgtctcactgcaacctccacctcccgggttcaagtgattctcctccctcagcctcctgagtagctgggattacaggtgcccaccaccatgcctggctaagttttgtatttttagtagagatggggtttcgccatgttggccaggctggtctcgaactcctgacctcaggggatccacctgcctcggcctcccaaagtgctgggattacaggcatgagccactgcaccctgccacatgtggcttgttaaagatcttactttgtgttaacaatgaccacaccaattccagcatcctgcacagactcatattgacctcctgtggccacctgtccagcatcccaggaggctctgctggctagcttggatttcctcctagctaaccctttagctctccgatcctcagcagaccgaggcctgatatcatccttacctcccagttagctcctctcctctgaagggggaagccaggagcagggagagcacagtctacgggccaatgccggggcaccccttcccaattagccagagcctcatccctgaaaacatcttcagcctgctggcgagtgcagcctggtgtgatgctatacccatattccctagcttgtatggttacctgactgccaagagccagcatcctattggtctagtgagtctacaccaggtggccaagtgagtggcaaagaacagagaaaaaatatgaagctacagtaaaaatggtccagacaactttgaagacagacaggaaacagggcatccagaggactttcagatgcagggtataagcacatgcagcagcattatatgtatcgtcagtgccagctaattcaggcgaggcagtttcttctcaagaggctaagaaaggaagacaattacctttctggtgttctcctcacagcttaccaccaagagccttctggggatctggcatgttgaaaatgctctagccggttctacctccctacctttggtcattttcttttcctgcctggcatcctctctgacctttcccttaactcttatccatagttaatgttccagctcattttacaccttctttcccacaaagctttctgccttagtttgagttactcagaaaacaaaagcctgagtcagagacccagatgctggtcatttacttgagaacaatcccaagaagcagaagtgagagtgtgtgatgagtgaaatgggaaaggaaaaaccaatataaggtatattgtcaaggtcgccattgccaggacctcctgagaaatgtaaggcatgccttccacaattatccaccagttgtataggaaactggagcatttatccataggcttcttcactccttgttccccttcccttgttcctgaatgagggttgcccccacagtactgtcttagtttatttaggttgtcctagaagcagagcctgagacaaggattcgagtgaaagtcatttaagaggtgatgcaaggaagcacctgtaggagagtgggaacttgatagtgtgaaggaaggaagccaatcaagggtgtgagagcaggcaagttaccactataggcagctggagctgaatcctgctggggagctgccagtgtagaaacatgcctcagatttatccctgcagagagattggctggagggactttatccaccactttcataagtcatcacttgaggtttatgccatgggttgggggtgggagtttaatttcctggcacttccttcattcccagcatatagacagagtggggtcttgctgtcagagagagcctgcaggcaaagatttacagctactcacccattggaagtaaagtgtatagactttactctctacaaactagaaaacataggtgtaacatctcccccaggttgtgccctccagcaggctgaagatgctcccagggtcctgaaggaagaagctgaaagacagggactctggcagagggaagtgattctgaactgcctacaactgtagttgaagttagaggtgggtgaagggcaagggcaaatggagcaccaagggtgtgtctaacaccatcactgactatgccaagccacactgattgtttctgtccttcctctgagcaccctttttttagtatccttagacatgcataggttgccctatatatacatgtaagttgagcacttgaaagtagaatgcaaacttttgggattaaggctctgtgacttagcctttttagcacttagcagaaagttttgtatccaactataactgtctacttttgcaagaaaattgaagcattcatcatgatctccctccctcccctatctataaagttatcttcatatttatgttatatatatgaagttacttcatatatatgatgtaagatatatatatatatatatatacacatatatatatatatatatatatatatatgaagttatcttcatgtcttacatctgttactcctatcttggaaataacaagaaagaggtttctcctttcgctgattaaggtaaacccatctatctgctcatgttttctatgccattgatttcactcctcttctgggaatcctcactcctttagttatctcttcttgcaaattgtctgtgtagcaggtatgtgggccaagtggtggtcctgaaatctggaccatcctactccatttcttctttgcttgaagcctcagagtagctgaagaaacaaacccttgggataaactgcaggatctgtagtgagcaatcagctgtggctctaccagggcaaccaaaaaacctgcattccatctagcttggcaagggactccattctgtatgatcaattgtgtaatattagactgggaaagggggcacctgctttctccttcccttcagtcctgacagggtgaggaaaaacagagctcgtgggataggaatgaagcgtgaaaatgccctagtcatgcccaacacacgttctgtcctcagcttccctctctaattccaaggcctgccattccctaatacccagcttagctttcagaaaataaactgctccttgtcaaaatcatttgaattcctttacaatatagaacgttcctgttgacctccatggaatctagaaaattaaatgcctcaaagatgcggaacatggattggagaactacaataatatttttgccatgttttctgcctcctgaaatccttttgggaacatagttggaataaataaccctacataacttaaaaacaattcattcatggcacttctcttgacccattctatcttttccccctgtctgattcctacttcccttcttgccacaggccttcatgttaatgagtttgaaatatgtccttaaatatttatgcttacttgtaaaatatgtagtgttggcttgggtgtgtatatgtctttaacttatataaatcatatggtattataaatttcattctgtgtcttttgtgactcaatgctagagatttgggaggtgaaatgaggtagtgtttgtttaatctttttttcatttgaaacacatcacacatatgaaagagtgcatgaactttaaaaccctcgtgtatggtcatccctgatatcatctccccctccacactagaggaactttttaagctaaacttaatgttaatcactttcttttttgttgttttgtccatttatttttcctggtctcggactttatgtagtgaatcatacagaatgtattcctcaatgacttgcttttttggctgaacttttttttagatttatctatgttgctagtatagctgtggtttattcattttcattggtgtacaatgtgctgctataccatactttatttatctgtctaccacaggtagacatttggatttgttgctgttgttgtttttgctattctgaataacgctgttttaaacatattgaccttgtttttgtgtgcagctggacagaaatttatcagtggaacatatctagaattggctgtgctgagtcataaggagtgtcactcttctgttctaagcaaggcaaaattacgttctaacgttagtatactcactcacactctctcccatggagtttgataattttcttcttcatattcttggaaatagtgacattgtcaaactttttattgtcaacctagtggtcataaaaaggtattcaatgtgcatctcctcaattgccaatcagcttgaatatcttcataactttatgaaacacatatgttttctcttatgtaaaagtcctgtttgtattttttgcttatttgccctttaagtttttgatctttttcttaagaatttttaggagaatgtgtgtgtgtgtgtgtgtgtgtgtgtgtgtgtgtgtatgtgtattatggatactaatcctttgtcatgtatatattacaaatatcttccagctttggattttaattttagccctgtttatgatatctttagtaaatagaaatctctaattttaatgggatagaattgatcaattgtgtgtgtgctatgttatgcataaaaaattattagcccagtatggtggtgcgtgcctgtaatcccagctactcaggaggctgaggcaggataatcgcttgaacctgggaggtggaggttggagtgagccgagatcatgccactgcactccagcatgggtgacagagtgagactccgtctcaaaaaaaaaaaaaaaaaacttttttttcttgttgtccttaagatttttctatgtaaatcaaatgctaaaatggtacaccatcaaggccttattcatgttatttgccttctctgaaacttgatttgtgaaataattttgtcccgagggtttcatgggggttacatgtaataagagtgtacgaaagagcctagcaaagtacatcacacataattggcactcagtatatgttagttcatccactggaacatagttctagttctatattttgaggcttaggtatttgcaagtaacttagtttttaacaggaaatatttagtccgtgttatttatatgctggacattttgtaaatgttttattcttcacaaaccatgtaaggtaaataatattatcattaccattgtacagaagaggtaatttagactcagaaagaataagttacttaccttgggtaacacacactaaagggcagtgccattattatatttgctatatgcctttctacctagactgtgaaataccttatgggaggatctgcattcaaagaatggcaagaatcctatagcgctggaaaataaactatatctgtaggtgtgtggtgtgaatttgaggatgtggtaaactggaaaagataaaagtggtctacttattgcttttcactttgcagagcatataatatgatttcccatggtacatatcctccattcattccctcagacctgactcagagtctcttaaaaccacccattcccctaagtgtctaccttgagcccactgccttcctgatttgcatcctaaagacagttgcccataatttaactaaccacattgttcctctccaaggaattccacatccagtggaacattgctccagtcgtaaggtaacgggacgccagagactatcttcctgtcagaatcttgagtcacccagggcacacgtgtcaacagggtttaaagctttgtttgtttgcctccccagacagacgttgaaacagaatctcccaccaccaaactgcctagacaaccaagcaactcagtaaccacttactaaagctaacagtcttttggcattcagtttcccaccagatgaattatagcatagtgtacagtgaattcattcagatcactgaatgttaaatgtggaggcccttagtaattacctagacaccattgtagcaggaagggaacaaaatgcaaagaatgaatgcaagcaaatccctttaccttaaatgtacatcatgggttgaaggatctagtattactgagtttccctcatctacaaaatgaagatttaaaatatctatccttcctacatcatagggttgttgtgagaatcaaattcaataataaataatatccatgcctctgtgatgacctgctttaaaccaagtataaagttgtatatgtaagagaaggagagcaaatgcaaatgtgttgaattagtcaagaaatctaaaaaattcaattttaagtaaattgtcccataaaatgcatagctaaatattacagatttggacattgctattgtttgaatatgatttgtccccaccaaaactcatgttgaagcttggtctccaatgtggcagtgctgagaaagaatatctttaggaggtgattagttcattaagagggattagtgcctttcttgtgggagtgagttttcatctctcacaggttatcatcagaagcggaccagatgcctggccctggatctgggacctcccagcctccagaattatgagcggcataagcttctttcctttataaattaccaaatctcaggtatcctgttaaaccaacagacaattgactaagacaggtatgtgttttttgtattggatagacaatatggagcaagtacacagggcatgcggctgattccacaaaaaaaaagggccagtaattctgttttaagttgtgtctacatagaacataagggccattattctacaatattccaagatgtcatcaacaataatttcttgaaataaagcttttgatattattgagaaacaacaagttcaagactatactttatataaattgttacaataaagtttgttttgtcttttgctgcttaacttacaaccccataacaatagcaactaattgtgtaggttggcttgaaggttcctctggcaaatgtgccaaggcttgcttgcatagccacactcagctaaagatctgcctgggctggaagttggcgtcattcacaagtctgggagaggctattggctatcagttggggtgcctgagttcttctccatgtggcctctcaccttctaggtgactggactgactttcctagatgccttctcagggcagccatccaagaggacaaaggaagaagcagcaaggccttgcaaggcttagtttcagaagtcacataaatttacttctgccaattctatttagaaaagtgattcactaggatgtccagattcaataatttttctttttttttttgagacagagtctagccctgttgcccaggctggagtgcaatggcacagtctcggctcactgcaacctctgcctcctgggttcaagtgattctcccacctcagcctcctgaatagcagggattacaggcgcctgccaccacacctgcctaatttttgtatttttagtagagacggggtttcaccatgttggccaggctgctcttgaactcctgacctcaagtgatccatctgcctaggcctcccaaagtgctaggattacaggtgtgagccaccacacccagcctcaataacatgcttttttaaaacaaaggtccatctctggatgggagagccagaaatgttacattgaaaagggagcatgcatgcatactgggaggagaggaatttgtggccattaaacaatctatagattctgccctcttgccacaaattattcatattcctcccacatgtaaaatactctcacatccaaactaagacctccaaaagtctaatcccaattatttcagttacctattgcttcataacaaataattccaaaatgtagctgcccttgttaaaattgaacaataaccatgtattatctttcactgttctgttagtcaaaaattcaggaggtgagtgcttctctcttagggtgtcccacaaagtttcagtcaaaatgtcagccacgaagtttcagtcaaaatgtcccatgtgaaggcttgaataggactggaggacccactatccagaaggctcactcacgtggttgtggacaagacacttccattcctctctaagtcgacctccctgtaaggttggaagttggctttcccagagtgagtgatatgacagagagcaaagaaaaatctaaagtgtcatttgtggccttgctttgaaagacagacatagttttttctctagtagttcgttaactaccaaggccagccctattcagtatgggaggacactataaaactccataggaggccattttggaggtttgttatctcatagattatggcatcaagttcaaagtccagaattttatgatgttcttcaggtctgtatgtaaatgaagtttcttaagtgtgggtttcaggcacagcaaatcttgaacagtagcaactccagagccctgtaaattaaaaagacaaggtatctttcccaggcacacccaacatataacactgagttaggggaaaatgatctacaaaagacaatcccattcctaatgggataatgggagacacatagaagtcactaactcttagcagtcttgaaatttagatgtcgcatttgtcaggcttcctgcattgagagcagaaaatgttcctcgattggaaacaggttctttacccctggagtgggctcattcttctcctcgaatcttcaccttgctctctgagctctttgtctagctttctaaaaggctcttctttttctaaaggaaatgaatcttgcttgtatctgagtagctttctcaagaagcctgtgtgctctgcttctcacaagcctcttgtcatgtgaactgtcttcatccctttcagttcaaggtaccaaaattcaggttactaattctattgcaacataattcttttaaaatctttgtggttctcccctttcatcttaacagcacttactccaagtgcccaaaagccaaatccacaattctttttttgagacagacctctatccactttagaaaagttaggcttctttgggacaatgccactgagatgattagaagtttttttttctagctaaaaggattaggcatcttaaatcttatgagatcttaacaaaagatattatagctacacctttggtttgatctgatctttgccctgaagccattttttactttgataatcttttgccagctggagagacataaagtataaaacagttttattttccaacccagcaagtacttgttctcttacattttctcttaattctgcttgcaaatgctacagttctttaattagctaatctctcttttcatactgtattatatggagttaaagttaaaaatttagtatttttatccttctgcttgaatctttctttagaccgatccaacaagttcaatcggtacttttttttatcttccaaattactataattctgccagtctataccaaggttgtcccccacctcttttttgtcttcaatcacagtttcctttctgctcctctaacttctcttctctcttctctttccagcccctatccaccatctggttccaaagccaatgtcatagctgagatttttgttatggcagcattatacttctagttaccaattcactttagttttctatttctgtataacaaatcaaccgagagttagtggcttaaaatagcagtaattcatgatttctcataattttatgttttggctagatgattcttctggtagttttggaggggttcattcatacgggtgcattcagcaggattgctggctgagctagaaggtctagggtgacctcacttacatgtacagcatttggtgctggctgtcagctaaggataggccagtatttatcaaatgggggaaattatgcctccatgggacatttggctatttatagaaacatttttttatggccacaactgggtcaggttacttgtatctagtgggcaaaggccagagatattaacatacatgctacaatgcccaggacagtcccccacaaaaataagttatctggcccaaaacgtcaatagagctaaggttgagaaaccttgtgataaatgtttttatatgcattatcttctttaatcttcacaattaccctattagacaagttagattcttaagtaacttaaacaagatcacacaattagtaaagggcagagttgggacttatatattctgagctcttaaccagtatatactatatggtgtgcattccacccagattgttaatctaagattgatttgctaaataccaaaaccacacccaggcaatagtctaattctccaccatttatttcttctttgatcttttcctttctagcttaatggctttcctagaaacagagcctgaggtaagtattgaatgctaatgctttatttaggaggtatgtttttatggctgcaaaattgagcgaaaagggaagcgaggcagtttgaagcagaactataaacgtaaggtgttgcatttcagcaggggcatcagtctacctatatgagatatttccacatgggctgttccgggaggaacatgctccttggttcagtctattgcatggaggaatggaaatgtgtctgccagctccttcacatctcctaaattccattgctcaaactttaccttccagagatttaactcccccacaatcctaagttgcatcacctggctcctatagcagctgctcaggaagccaggtctcgtgcccgcagcttggtctttgtatgagtccaaaagtgttgtgagccactattgatttcaggagtgatgttggttggccttaggaagtttaacactgtgagttatcacagaatcagactgctgcagcagctggggtagaataagcaatctgggattcaaaaggcaggtaaggccaagagactctgaggtgggacataagatgtgtctgatccattcttcaacatgactcactactcccatgcaccgtcatcgaaaggaaacctttctggcttggaagagctggtgtatcagttgagattcattaagcttaaagaagcagaaaacctaaatgaaactggctaagataatgaggaaagaagggaagttattggcttacatgcctacgagtccagaaggtcagcaggtttcagatttgacggctccactgtcctgaagttcttttgactcagtctttctccacaggccaactttctattcaggctatcactaaaatggctgcagcaactctaggccattagtgcacacatgaccacattccaatatccagaggaagacagaaactatctcttcatttgcttctttcttacaaatgaagaaacgtttcctaaagggtgcctcagccaacatccccttgcagctctcattgcccaagctgggtgatacattcattccttaacaatcctcattacagggattctaaacactttgattggctggggcctgggctcctgaaccaatcactgtgaagaaagatggatcaccatgactgcttaacccaatggggacccacctcctgcactggggtaatcctcaaactgcatgacaaccacaaaatgcaagggggtggggaggtggacttggtgttaaagagaaaaccacactgtcgacaagagccagacttcaaaagcatctaaagaaacaaagacaaagctgccatcatcatttgttagtagacagttgtcatggagtggggattgactcactttaagcaaagtaggtttcagccagtctgtgtagttctccatgactcttactgtttctttcactgggactctctattccccatccctgcctttgatagtgcatctcatccctaagcttattccaaaagccttccttgttgtttcacagccagaaaacacaggctgagtgatatataaaagctttggaattagtagcaattttagaaatctagatcagggtttttcaaactccatggctctggagagctctctcagttgtgaaacttgtagggctgaaaagaagagctaagtagtcgaggctctaggcctcctaaaccccccaaccaaagcagctgtaaattcatttattttgcgtagctatatagctttattcaagattaatttttattcaggggattaaaaatcaaatccccttattataaaaatgagaaaactgaagctcaaagagaggggtggaagcgtgtgttgaaggtcatggtgcttatctgtacctcctcctcaggacacctatgctaacatttgaaaagtttcacctgtgcctcatgagccctctcttctccagaatcagtggccccagcttcttcaaatctcactccagtgaagagattctaagccatctcaccaattcattgttcaactccttgttaaaatcacttcacttcaagtgtagtgccaagaaataatcatgatgagtcaaatgcatctgagcagcagagagaagagcaggactgccctatgtcccatcagaatgttgcactcttaataatatagccagggatcacattagctagttggcaggcacagaacaccattgcctcatactgtccgttaaaactcttaagatgtttttacaagctgctgcaaagactgttctcctcatcctgttcctatcctcttgtttacttagactcaattgcagggtttaacatgtatttcatttattctaaaattccacaattctaagtgcccaccgtgtgcatttctgggcattccatgagcacatggagaattctaggacaggaggagcaaattcagctaccttgaggagccaggcaggtagggacagaagtcatataaataaatgaagatggccaggtatagttcaaatttgtgagctatgaagtctggttaaaggagaactaggcctcatctaaagaaatagctttattcagcctcagctagccattgccatgcaagaatcaagtccagagttgctagatcttatgatttaaaaaaaaaaaaatctggaaatgtggatgttgattggaaatatccagtcttttaaatgttggccactaactctcaaagttctaatacactctattggccaaacaaaacacatctgcaggctgagttcaggccatgaacttcaaatttacaaactttgccctgtgaggatgagggagttgggcagcactagttaatgagacaaaagtataaaaatgactcgtgttatcttggaattaatagcacaacatttatttttaatattaccctattaatcatacgcttgaactttttaaagctggaaagaatctctgggattatattgtttaatcctcttgttttataaaaaaggaatctatgattcacagaggagaaatgagttggattttaattaaatgaatccaaatgaattcatgaaatgaataaaaaaattcaagttcttagaaattgaggagataattggtacattagctcctcaaaccttagtccatggtttctcaatctaagcattattgacattttggactggataattctttgttgtgtgtgtgggtggggtggagggggaagagttgttttgtgcattgtgggatgtttagtaccatccgtgggctctacctactagaagtcaatagcacactcctgcaagttatcagtggcaaatgaaggcaagaatgtttttagatattacaaagtgtccctgagggacaaaattgccactgcccttgaaaatcactataccctcttccaatccctttgtcttatggttgagaggactcagaaaactcgagagctttcctcaaagtcacatggggaattattggcattgctggtaccaacacttgaatctcatcttaactccttctagagtgccctattaacaaaagcctgcaaatatgagccacaatttgatcagtaagttttgtaaaactgcatattttaaattaagaggcagcatggcataatggtgaaaagcatggattccatgactgacaaatctgcatttggttctcagctcttctacttacttgctttgtgacattgaccaaattaacctctctgaatgtttgtttaccacctcacctgaaaaatgagtggtaaaatgtatatagtgcttgtcacaagatagggattcatcaaatggaagttgttgttattattattattattattactattatttaactggacctggagtcagtaaactgtagcccacaaactgaatttggcctgcctgtttttgaatagcctgtgagctaagaagttttacatttttaaacggttaaaaaattttaaaataacaatgccattttatggtacatgaaagtcatgtgaaattcaaagatcagggctcataactaaagttttattggaacacagccacgtattcatatgcacgtagtccatggttgctttcatgtaaaagcagcagagtcaagttgttgcaacagagatcagctgatgggcaaagactaaaatatttattgcctggccctttacagaaagattaccagtctcttaactaaacctgtaatctccaagtagaaaagcaggcaaccacaatttgtgcagagccctctggtgtgcaggaggtaacatagcaaaataattcatttttccttctgatgccccttgcagttctagcatctataaccattgtattttactctgctcacttgagacatttcttagcatctgtgtatatccagtattttcagaaaacataggttcccaagttatccgggaaacatgaaaaaactttttatagatgtcctctcctgaataaatctcattgtagaattgctacttaaggcaatttttttttcacaatctggaatatttatcaaaaagaaaggaaatggcttgctcagtgttaagccaagcacatattttaagtgttgtatgatttggacaggacaataaaaagggatatccggtaaaaaggaagaatagataagaactatctgccaaaactaaactttaagagatgtcgtcatgttacctctttttttaataccttgaacatcttggttacaatttaatcttactatagcctgagattttaaatgccaatacatgtttatagccctagccctgacactaagtagatttgtggtcttcagaattcctttacaattcaatacaatacatatattgattgtctaatacatgccaggtgctgtgatgggcattggaagtatgaagataaattaaacatggttttgccctaaaggatttcactgaggatctggttaagtcatcaagcttctttgagtgccaccttctcatctgtaagagtggggcacggaaataaatatttcatctgctccagaaacttttattgagcacgcttgtcttgccatacactctaggagatatcaaggaatgaaaataggactgtatcactataacaattcaattacaaagcatgcctagtctctgcccttcgaagaggtcacaattataatacaacataataaatgcaaaatgaatatgagaagcaagtgaaagggagccactattttttcttaaataagggaggacagactccacaaaagaattaacattagagtaagtcttaaatgatattttcatttatgacatggcatgttgggagctcccatcactaaaagggataaacaaatttagagactgggaaagaagactgtgaccaacaaaatcagcccctcgcccaatggacctggcaattcaaaatcaagtcaaatggagatgggcaagactcagtgtaatcttaagtttaaaaccagggagaatctgattcaaaggaaagaggcgtcatgtgattcacgcttcagagcatttgctgttcttggttctcaagtacactaaaacgactcattctaaaggagatgatggaagtcaggcaccagtttccccaagggaaaggacatattagtactaggaatgagtcaggccaacagtcaagtgctcagtttttaggatttcactctggaccagtaggacagaaacaggtatctaggatcaggatcaagagagagcagtaccacatgctcgccggtgtctagaagaagctatctatacacatgtaaaattacagattaattcaagtcctcatgtacatgtagcaagagagctttgtacagcttgtcactcctgagggaacatgatcttgcaagcctgggtatcatggcaggaagctcaggcactgaagaagcagagggagttggtcacaaagagaaagaaggatgagaggactttgtaagtggaagcacaacatgcacaaaagcacaatggtgcacttctactctcaaacagtctccatcttccctttcttgccctccaagttgccatatgcaattgtttctccaatgccaaagagagagccccatcatgactctccatttagtgagtcttcagtagtttggcaagagaagtaggatttgtacacactgttttatgctgttctcattaaactaaattaaatcccaaactctcaatcccattgcacaaggcacaaaatagagccagacctgctttcctcagaaaaaaacatcccttgacattcggacttttgaggactcttcaaaaattttggaagcctctgcctgactcagtgaccacatcttttccctgtttcccaatacaacatcattctactcactccttcatttccaagggtcctctataaaggtctgtcctactgtggccagtatggagcacacctagtcacagctagttattgacccctgacgttcaccccaccgcttctcagggtacccaggttttactaagttacctggtgtgctgcaccaaagccttcctctctgccccactcccccccttccaccagcctccaatccactcctagaccacagtgcatttgagggaaattcaatccatatgtttccttttctttctagagaatgcatccagcattgtttaaagagggaggcaacagccaagaagagctatgtgaggcctctcttggccctccagttcttcattagggagcaaagaaaggaggactttgccaagagcaaacctgaaacattcctttgggttcagttcaatcgcctgcaagtcacgtttccacacaaacatgtccccaggactgaggatgcaaggcactgttcaaggcgtctcttggatgaagacatggcaaaagctaccaccaccatgcagctctgtgatgtatgtgaagagaatccgtttacaggagatgattgtaaattattaccctctaaaactgacatatgcctctctgagaatataaactccataattatgagcactcactttcagagaaccaatgactttagatctgaaccaatgactttagagttcaaaagaccagagatatctgtcagatgtctcaatcacatcattttaaaataagagaaagtttaggctaagagagagcaagggatttgtctaagatcaaggggctgatcagagtttcatgtagaaccaagacttgtgattccaaattcagcagctttgacctctgctctttatgccctggacttacgcaatactcagtgcctgacacagatacattttcacacttcagcctttctgacttactctgaaccaatccttttgaaagttttctttatttatcatatctgcttttcttgcattttaaaaataaacattgtggcagtcagagatccaagattctgttactaaagtacaactggaaaatcttaaatatatcacgtagaatctgagaaatcactaataagaattatagtaaaaatttatgacatcaatataacaatttcattatttttagaaagcaaggtccttgtgtgtctttttaaaatatgtttatctaacatgcattcatttggcaccttcttaaggtcttccaagtattcatgtggagtgctaaagattttacaaaaaccaacaacattcattatcttctgcctttatgaaggttcttgctggtggcccctttcagctttaaacctccaaagttttgtttttgttttgttttgttttgttttgtttttttgagatggagtctcactctgtcgcccaggctagagtgcagtggcgcgatcttggctcactacaagctctgcctcctgggttcacgccattctcctgcctcagcctcccgagtagctgggactacaggcgccagccaccacgcctggctaattttttgtatttttagtagagacggtgtttcaccgtgttaaccaggatggtctccatctcctgaccttgtgatccgcccgcctcggcctcccaaagtgctgggattacaggcatgagccacagcgcccagcctaaacctccaaagttttataataaaatatatatataaaaaaataataataataaataaaaatacaaaaaaaaaaaaaagaaaaaaaaaacctcagatgtcaagggaggccactgctgagagaagcagataacaaggatccaagaatgaggtagttgagagtaggagaatggaggaggatgctggaggttttgaaagtacgtaggtgacagaagtgagggggaaaaggtagaagccaggattcaaggagccctgcagataatactggttatggaacataatgtcataaaagaccatgtctgatcatggacttcagaatcaagccatggaagtccagatcccaaattccccagaactagttagagaagttaactttcaaccattcaccattctaagctcctatctcttaatctataaaatgaggataagcacacatacttccaaggataaaatgcaatcgcagcaaatttaaagagactgacacaaattgaccaggtatcataaaattccctcctctctatgtaagacaaagcctagaaagacggactgttgctctgaccttctctagtctattttgagaccagatgaccttttcctcttgacaagggagttttggagattggaaccacaaaagaatcaaatcccgtgggcacaagctccatttgactcttacaaaaggatacattccttcccttctcatccagtcaacctggttttattcttcctatccacaccttaccttgggcaaaagtgaaacaaacccagttatcaaaatgttcatggggtgagggttgggaaggggtgggggaacatcagtctcctagggttctggtctgtttgcacagctgcagtcaattaggtaaaattgtaattgttttatacttttgctcaatgcttaatcctgaagaaagaagaatggatggttggttttcctttttcatcttgttttgtttttatttcttgtcataatatttagatagtatttgtgtaaaggaaggcaatcataatgaaatggataatcaaacagagggctctaaggcacatttacaaaagccatcacctcagaaatgcttcatttacccagacagtgggcagcagagggcatgggaaagtctgtttctatggacagggaaatgattcatgtcaatcagctcgagagtccctcttccaaaacacgttatatgtaagacatagcataataaattgccccaataagcaaacagtcaggatgcatcacataccttggaggggctgaacctatgctaaggactgaaggtgctaacatgagtgagacaccggccttagagccaagatgagggtgaggtgagcaaggcacttgcctccagagcaaaattttaagagatgtcagcaagataaataagactgtaatgcaatatttttaaagaatcaaaattaatgccaaaaaaacctatggtgcacaaaatatcaaaacttttgtttgcttttacctttgattattaattaaatatgcatttagactatgaaaaactttaagaaagccacaaaaagagcaaaaaataacaatgttaacctaattgtaaaaggaagcttacactgaatgtggaaaaaaaattagtagcaaaagccatatgaaacaaaacaattatgaaaataactattaatgttttaaatctctccttttttaatagaaaacatttttgctaaatatttttaatttttaaaaatagacatttagggataataggtttgctttaaaaaatgagacttatattaccctctaaatagaatcctttaatttgaaatttgagaatattattgagagtcaaaaagtattcatttccttttatctaaaaatcatactttaggaaatctgtcatagatataaccaaaatatagaaacagcatcatttgtaacttgaaaaataaattaaaacacccccaaatagtccattatccaatcattaaaaatgatgttgatagagaccaggcaatgttaaaaataactacttaataagcataaatacatatataccacagtaatgactacataaaaattgcatttaaaaagctaaaagtaaatacactataattgtaataataatttcattttggtggtagaaatccggttttccttctttgtttctttttttattctttatttcctttcttcctttttgtttttaggaattgtattatctattgtattttacattgtatattgtattgaacattatttattatactgtatcactcagggtccaggcacgaaacaaacaggtggtatactcaaagaaatagctcaaaaagtatttaattactggactattttcagagctgtggcagggttaagggaagtaacaagagatgacaaaatacacctggggtctaacaacagctgggagctgtggctactcctaggtcagaagtggagaaagcagtttctggaaccaggagagaactgtagttataggtggaagctgtccaataggaagaaccatcactacaaaaactgtagtatgagatgggaataaatattccaatctttctctcctctatccttccagtcttctactagtgtcttccattggctgaactcagctgaacactacagggtaaagaagcccagatgatgctgtctgttgaagtcagtttcttgaagcacaaagcaggtaaggggaaaggtgaaaagtggatctggaggaacaaacaggatataccctgcaaaatcattgatattactatttctaaaatagaaaaaatacacaaatttaaaaagtgatggcatttgaaacttacttctgtcatcaaatgtgataaaaataattcccatctaataaaattattgggtaaccttgaaaatcaacaatgtctgttaactttttgtccttattattattatatacatgtttatggtgatgatggtggtggaggtgatggtgttggggtgctcatggtggtagtgataatgatgctggtgatggtgatgacggtatatataatggtgatagttgtgatgacggtagtgggggtggtggtagtggtgtaatgatggtggcgatgctatacatgttggtgatggttgtgatggtgataatgatggtggtgatggtaatagcaatagtgatggtgatagtggtgttagtagttgtgttattgatgtgctattcttttacataaactttgagtttcatgtgatatcagatgctatctttaagtgatatatgtctctattcaaagtaatgccattagacacatccacttctcctatgagatcagggatgatcagttggtaaaacatggctccttcagggcccatctctatgaaagatctttaatccatagaaaaatttaactcaccccagggtacattcactgaataactactatgtgaggacttcagaatgaatggaagtgcctatcttcatagataggatttgcggcctgagaacaaggacaggagtcaaacatacaatactataaacacggcatcctacactgtgattatcttcctcacagagtgcctagcacatataaccttgacaagtatttatttaagaaatgcatgaaggctgtaagaattattatagaagtccaaatcaacttgattttatagagaagatgatattgaacacttaactaatctaactacttcacatcttttaactcagtaagtattctcaaaagttctatgaaatagacataaatattattcccactttacagatatggcaactgagacaatgattaagcaaatacctctaagttgtatagctagcaagtgaataacttggaattcacctccaccaccatcatcaccatgaacatgtatataataattataataataatgacaatctccaggtaatcccagttctagagcatgggcttttacacttaatttcctccaagaaggctttatggtggaggaggtggaattagaactgagcctagaggaatgggtagtaacacaaaaaccccggggaaggccattcaagggcaaggaaacagcaataagcaaaggcccacagaaaaaccatggaagtagtttgaatgacattctcagaaatgcccttcagggaggatgattgggaagatgatctggaattcaacttgcagatggaatggagggaatcatgcttggaacaatgaaataaacagaaaacaagctggaataaattactttatattccttttcttctttccttttttttttgagatggagtcttgccctgtcacccaggctggagtgcaatggcgcaatctcggctcactgcaacctccacctcctgggttccagcgactctcctgcctcagcctcctgagtagctgggatcacaggcgcacgcctccatgcccagttaatttttgtatttttagtagagacggggtttcaccatgttagccaagctggtctcgaactcctgaccttgtgatccacccgcctcggcctcccaaagtgctgggattacaggcatgacccaccgcacccggccaattaccttatgttctttcgggtctttgatggatgttctgtttgcttcagagggactcctatcctggattaccttcaaggtgagcaaataatggtgggggcgaggggggtggtgcggggaggacacaactcttcagatttgatgctgttttgtcacaaacctgatcagtgatctcagcaatcaagatgcagaaatgagtcatagcgatagcactgttctgtacatgggaggcagtgtcgttgtgggcaaaggaagtcttgcactagggagcaagaaggaccaacatgggagggccctctcaagcccaggtgggaattcagcccagaggcctggtgcagcttcacaggagagcacagcggggctgcagcgcaggccaagtctgggaaatctctctgcagtttcctgttccccagctgtattttattggccaagcccacctgccccagccctccccttttctaatacaccaaaagtcacagcagcacctctgattgtttctgctacattaaaactggctggaaaatgtgaaaattccctctatctcaggagagcaagatgaatgagtacagggaagttatttttaaatctcctcaaaataaaaacaatgtcagaggtggtcaggagaatgaaagaaaagtaaataaataaatatcccaggcaaggaaaggcatgagaagaaaatactatgtgtttttatttggcttggtttctttcaaataaaaatgttgtttggccaatattctgagtgagaatttcttttttggcagtgagttggctgtgttgaggctctctttgcagatcaccagagcacttcaaacccggcacaggatgtgaagtgtggttacctgcattaagcctcactgtcagcctaggccaggcatgtggtttgaattcctccccaactttccttgactagtccatttatcttctttgacaggtagtcctgagactctgttctagctcagccaagttgtttcactgtatgcttgcctcagtttccttgtatataaaatggggctacaatggcttgcgcagcagccctctccaaagtgaaggaagcagacctcccctagagggtgggaggccagagagtgcagggatggacaacttacaggtgcatgggcaggaggtgggcattttcagatggagcgttttaggtgctcatagatgggccaattagcaccttccagttactgctaggtgagggaaaggtgagaataaaaggatattcacaacctataaaaatacaggccgggcacggtggctcacgcctgtaatcctagcactttaggaggccaaggcaggtggatcactggaggtcaggagtttgagaccagcctggccaatatggtgaaaccccatttctactaaaaatacaaaaattagccaggcatggtggtgggcacctgtagttccagatacccaggaagctgaggcaaaagaatcgcttgaatccagaaagtggaggttccagtgacccaagatcacgccattgcactcctgcctgggcaacagagtaaaactctgtccatatacaaaaagtatatatatatatgatatatatatatcatatatatatatcatatatatatgatatatatatatgatatatgtgtgatatatatgatatatatattcatatatgacctatctataggagaaaaaaacaaaaactaaatatatattttaattacctttactagggagaaacacactaaatacaaataaggggcccattcaatagtagtggtgtgatagtcatgcttgaagaattttatttttatccattcctttatttaattttttaataaatacttagtaaatgtctcctgtactctcaggcactaacttagtactatatatatatgtatgtgtatatacatacatatatatatatatggaaaaaaaaacaatgactgatgcatctctctcccaatgggtcttacattccaggggagaagagagactttaagcaaaaataaatagataagtaaataaaaattctgatagatactataaagaaaaaaataaactcctctgaagaaaatctcaggggtccacttgtgattgtggcatttgagctaagatctgaagatagcaggagctagctatgtgaacagtgggacagagaacattctaggcagaagaaatgtgatgtacaaatgcacttgacaaagaagatgccaatgcatttggaggtcagggagccgaggtccaagatagagctggataggcaggaaggaaccagatcatgcagggatctgtaggggatgttaagatctgtggatttcattttagctgtaatggggatttgcagaagagttttaagcagggaaaaaagagaaagttttaggagagtgaaaatagtggggccagccaggagctctctgaagagacgtgaggttgacgtgaactaaatggccacagtggaaagagttggaggctccaagttgtatttaggggtaaaatgcaaaggacctgatgactcattgcatgagtagtagcaaggttgagaaggtggtaggacaagctcccagagtcccagtttgagcacttgcatggaagaatggtatttactgtgaatcagtaagctgctttgaggagctcacagtccaaccttcagaaaagactatttgccatgcagatgcatatgtgccatgcttgaggaatatgcaaagcattacatgagtagaaaggaaggagactatgaaccagcatgcagttagaagaggaggcatcatacaaggggcacccctggagctgtcacctgaaagacagagagtgtttaacagatggaaggtagaaggtaagtctttcaggaagaggaagagcatttaaaaaatatataagtaaaattcctggctgggcgcagtggctcacacctgtaatcccagcactttgggagggtagggtgggggtggatcacgaggtcaggagttcaagaccaggctggccaagatggtgaaaccccatctctactaaaaacacaaaacttagccaggcatggtggcagctgcctgtcatcccagctactcaggaggctgaggcagagaattgcttgaacccaggaggtggaggttgcagtgagccaagatcatgccactgcactccagcctggccaacagagcaagatcccatctaaaaataaataaatgaataaataagtaaaattcccaatcttacagaacttttgagataatttatgtggaagtacctaaaaccatgtcttggatttcattgatgacgcttacaccactgtcaccaacctgtccaacaacaaaggttgtatgtgtaaatctcattcctctccagccaaagggagaataaaattcaaatagacatccctgcctcttccttccaaacctaagatatgtatatgaaatgatcaacatttgctcacctgcagggctgttgactgaagcttacaaaaaaggaattgatttgtaagtctggatggttttatgttttgcattttaaaattttatttctttatgttttaaagttaaggtcattttttaaattcctgctctctccatttgtctctgtacatcccttggtaacttgcacagggcctagcacaaggaggtgttcaacaaatataactaacaaatatgagtcagtagagcacatataggggtctctgtctcctattttccaggcactgtattaggtcagggtgtgcagagataattaaagcaaggtttctcttctcaaggtcacagacataaatctaaagaaaaatatatgcatatacttatatgcagtgtgataaatatgtggaaataaatatatatagtctctcttccactccttgacaaaattcagaagttaaaagaatacagccaaaccaaaatatttttaaatttataagcatttgcaggcttgaaatctccaaagcaaagacttgagggtacaaaaatcagactaaagtgcagtgagtggaattccttgaagttacccataaatattcgtcaagcctttctccagtcctatacctactcataaatccccgtttcatttcaagaacttttacatttgatcaacgatgcggagtgatgtttaaaccaggccatttggaatattcaattttcatacatagttttaagattttaatttccactctgcatgccagctcagattttccctgtcctgaaataaatcaggattttcaagacatgaaagcaggctccaagtacagaagggctttctaaacgttcagcctggttgcactgctcagtcaagtcatactcacaaacaacttacctctcacctcatctcagccccgggggatggatggaaaactggcagcaaagctggtaagagaaaaatacccagcactcaagatcaatatgtcaaaaagaggtgagagccattcatcaaaggagagagggacaaacccaaagatgttctgaaacatttacccaaccaatctgaaaccaattggcccctccacttaatctcctctttccacatcttgccagtggccacagagatatgaaggcacagctagctcctagcaatacaatgcatgatgtatacaggatattgctaatatatcatagaatcagagcatgctagaactgaacgggtctttaaggctcatttagccaactgcctggtatagagaggaagcactggggaagcagaaagagccctggacttgaggtcagaccagaacaggtttctagactccactctgttattttcaagctgcatgatcttagggatgtcactttaacctttctgaaaattatattcctcctctgtcaaaagggaaaaaagttttattcatagggattcttatatgataatataagaaaatgcaccttggaaattgcactgaacatatacatgggtgagaaaatattattattgtaaagaacccaataaatgctacttgaatccaatcaatagtagtgtaaatactttcttacctgaaccttcacctaatgatctgatagaatatccaatagcttccattcattttgtaaaaaatttaaagttatgcctacagaatagagggtgtctagtgctgttgggttagtgttcagcatgccagaatcttatctcccagcagtacagtgatatgctaagcaaaagtcagttgtatttgtcctcattgtcctctgttgtattttttaatgtaataagattgaatgaaatatcatgtaagctaataaaatgtgagtttttacacttgatcttagccaaaaggctgagaaacgataaaacttgaggttttataaagacatttgtatttatatgataaagttcatacaactatctcaatacaaatatttaatacaactgtatcaagaccagtaattaaagtcaacttggtaaaagacacttgtcaaattagtcatgataaagaccacggtaaaagattggaggaaaattataaaaaactaaaaggcttaaacattcaaattccctccaagtgcctttatagcttgcttcactttaaagaaccttaaaattgtagaggttatgggtacaatcactcaagagagttggctgatattcggccatcagaaaaggaaaccctgcaatatgcaacagcatggatgaaccttgaggatattaagctaagtgaaataagcccatcacagaaggacaaaggctgcataattccacttatatgaggtatctaaaatagactcatagaatcagagggtggaatggtggttgtcaggggttaagggaagcaggaaattgtgagttgctaatcaatgagcataaagtctcaattatgcaagatgaagaagttcagagacctgctgtaaaacattatctctatacaggtatatacagcaatactgtactgtacacttagaattttgtttagggggtaaatctcatgttaagggttcttaccatgataaaacaaaatttaaaaattaaagagaaaaagaattaaaaagagagaaatagtcaactggccattccagtcagtagatctacaggcaaagcaaaagccttagccctatattgaaagattgttatatcaattgcacattaatatgattcccctcctaactaaagctaataaactaaagctaatattgttatatctattgtgtattaatatgattctcctcctaactaaaactaaccagtggtcagtcctaactgacttgtagttaattatttgttgatgtttatatatccagttatctgccgatctataggagccctgaatataattcgtatttaatgccagttccttgccattgaggaacccacaatctagttagacactaatgaaatgtaaaatgctttataattcaattaacataaaagttatcttcaactctcctctgagtgcaatagtaccaaagagaagactagatttttcaaaatatttgaggaactgttgtgtctattttctaccaggttttgtctgttacttcaccagttatctccttatatttccttcttatcaattcaccttctcaccatagagaaagttctcaattggtataaaaggtatgaaagaagggctttgaagatgagattaaataatagagaaaaatccaggaggcagaaataaattgaataaaggcctgggaagtagataggagggtaaaaagacttgaatgcatttgttctcataaacattttttttttctcaaatcttgattctttttttttaacttttattttagactcaggtgaacatgtgcaggtttattatataagtaaattgcatatcatgggggtttgttatacagattatttcatcacccaggtgttaaacatagtactcaataggtagtttttcaatcctcaccctggtcccgccctctaccttccagtaggtcccaaagtctgttgtttccttctctgtgttcatgtgtacccaatgtttagctctcacttgtaagtgagaacatgcagtatttagtattctgttcctgcattagtttgcttagggtaacgacctccagctccatccatgtccctgcaaaggacatggtcttgttctttttaaacctgtgtagtattccatggtgtatatgtaccatattttcttcatccagtctactgttgaagagcatttgattccatgtttctgctattgtgaatagtgctgtgatgaacatatgcatgcatgtgaatttatggtagaaaatttacattgctttgggtatatacccaataatgggactgctgggtcaaatggtagttctattttaagttatttgagaaattgccaaactgttttctaaaatggctgagctaacttacattcccaccaacagtgtataagtgttttattttctccacagccttaccagcatctgttattttttaaccttttaatattagccattctgattggagtgtgatggtatttcattttggttttgatttggatttctttaataattagtgatgttcagcattttttcatgcttattggctgtgtgtatgtcttcttttgaaaagtgtctattcatgtcctttgcccaatttctttggttttgatttggatttctttaataattagtgatgttgaacattttttcatgcttattggcttgtgtgtatgtcttcttttgaaaagtgtctgttcatgccctttgcccaatttcatttggttttgatttggatttctttaataattagtaatgttgagcattttttcatgcttattgactgtgtgtatgtcttcttttgaaaagtgtctattcatgtcctttgcccaatttttaatgggattgtttgttttctgcttgttattttgtttaagttccttatagattctagatattagaagtttgtcagatgcagtttgaaaatattttcttccattctgtaggttgtctcttcactctgttgattgtttcttttgctgtacagaagctcattaatttaattaggtcccatgtgtcaatttttctttttgttgcaattgcttttggcatctttgtcatgaaatctttgccaggacctatgtccataatagtttttcctaggatttcttctaggttttttatagttttaggttttacatttaagtctttaatccatcttgagttggtttttgtatatggtaaaaaaaaaaaaaaaaaaaaaaaagggtggggggggcggtccagtttcaatcttctgcatatggctaggcagttatctcagcaccatttgttgaacaggaagtcttttctcattgcttgtttttgtagatgttgtcaaagatcagatgactgtaggtgtgtggctttatttctaggctctctattctgttgcattggtccatgtgtctgtttttgtaccagtactatgatgttttggttattgtaactctgtaatatggtttaaagtcaggtaacgtgatgccttcagttttgttctttttgcttaacctatttttcactattcaggctctaaaagttccataggatttttgaatagttttttttttttttctaattctgtgaaaaatatcactggtagtttgctaggaatagcactgaatctataagttgctttgggcaatatggacattttaacaatattgattcttactatctatgagcatgtaatatttttccatttgtttatgtcatctctgatttctttgagcagtgttttataatcttgttgtagagatctttcaccttcttggctagctgtattcctagatattttgtgtgtgtgactgttgtgaatgggacctcattcttgatttgggtctcatcttagacgttgttgatgtatagaaatgctactgatttttgtaaattgattttgtatcttgaaactttgctgaagttgttctcataaacaaaaacacataagtttttcaggcacttaggcaccttaacctcactgtcaatgtgccaaatctaatcagcaggcttgtttagcccacacagtggttttttgttgttgttgttgttgtttgtttttgttttttttttctggaaccagttgacattatttatttatccatagacacataaatatagtatcatctttatatatcagacttcatgcacagatcagcagtttctcctaaaacatcagaaagtccagcaataccagcattcccacatggcagcaatgagcagatactttcctatatagcagctcttccctgcagatgagacaggatctctcccatatgttaggctcagctcacttcctggttgctggtgagcctcactcacttatgttcctgtgagcacatgtaggcagttaaggtttgatcctttttaccttgcagcttcgtgatactgggtccccgccctgaagtggctgcagaaaaataggaaatgatccaggtggcaggtgaaactctgcaaagaaagggccatgagaatgacacagaaatacatgcaacccagacacctttcaaaaatatcatgggaatcagtgaaatattgtgttgaggggaaggagaggcaagagattaattttagaacaccaagagaaaggtgatgggataattagggagaaaaacagaaagggatggagaaggaggaagaagagagggaaggggacaggacgagaggaagaaaatatttatgtagctgctctgccaagcatttttacatgagcaggtttcaggggaatattgtgagataaattttggatgtagtgagttttgaagtcagtggaacttccagagatggtgtctaaagggcaacagacaagaaaacaggaagatcatttcttcaacaattcttaataataaaagtaataatgattaaaacatctaatccatattgaacgtgtactccaagccagttgccatgctaaacatttcccatgtatgagcaatcttatgtaatcttcccaacaattgtaagaggtaacaacaacaataataataataataaagccaaaacaaagtacagagttactatgccagacattgctttgaaggttctacacataccaggggccaggcgcagtggctcacgcctgtaatccctgcactttgggaggccgaggcgggcggatcacgaggtcgggagaccgagaccagcctggctaacacagtgaaaccccgtctctactaaaaatacaaaaaaaaattagccgggcgaggtggcgggcgcctgtagtcccaggtactcgggaggctgaggccagagaatggcatgaacccggggggcggagccttcagtgagccgagatcgcgcccctgcactccagcctgggcgacagagcgagactccgtctaaaaaaaaaaaagaaaggtctacacatactaacttatttaatttttgcaacagccttataagataggtattttgttattgtctgcattttacagatgaaaaaaagttaaaatcaagaggaatcaggtgactttcccaatattacttagctagtaagtactaacattggacttcccactcaggtctttttgaatctgtagtttaactgttgagccattacagtctactagcaccctgtaccaggcactatatttgtcactaatgactcaaaaaataaaataagataggcagtctctaccctcaaggagctcacagtccattgagagagacagccatgtgcacaaatgctacaggctaatatccaagtgtactcttagagatatgtaagtactagatgctatgaaagtgcagaggtaggggagctgaatctacaggtgggaaaggggggttgtcagggactggcaaataagtcttcacaaaggatgtagcacaaggtggctgattctaaaaagaggaatacaaattttctagtcagggaagagagagaaaaaagtgaaaaaaggcatggaaatatgaacgtttaactcatccttggggaacataaagatgtcctggatggctgggaatttgtaaagtggaaaagggcagaagaaaataacaatataagagcagatggaaaacagactgtggaggctttaagcgccaggttaggcaatgaaaggatgtaggaagctagtatttcttgtgagcactgttatgcaaaaggtgtggactttgtgttgacggtaatggggagaaattgaaagagaataacatactcagatgtgtatctgaaaaaggtctctctggcaacaaggcaacaaggtggacactggaatgtgaaggtgctagaagactacagaaagtgtatttagaagaatggcagcagcctggaaaagcaaggatggggaatgaacccaaggggtcgagaaaaaaggagagataaagagaaattgtagaattttgagattaacaggttatgcctttggaagtgaaatacatcttctggctttatattaatcatttaaaagataatctaatgggataacttccacaaatttaattcatctttactatgctgaataaattgttttactcaattgaaaggcaagttgctatttttatctttttatatttgtatccgtgatctacctctttccataaaagatttgaggagtctggaaaatcaccaagtgaaatgcagtgtctgatggcaaggggcttcttactagaagaaccactctggcagcataaatctgtcaagtgagacaggttcaagttgaagatatcaagaaacatcctctgcgtcagctccagactccaagttgctgtcccttcctttctctggtgaaacaaatggtgagaaaatgtccagtttgctctgctgctagactgagcctttctctgggaagaggaagaaatattgaaactggcaatgggtttcaaacagagcatgcacaccctttcctgaagacatttaaaattacatatgaaaacatgtaaataaatcaaaaccttaaatgaggcaacactttattcttaaatcagataaactctaagccaaggtgaacctctcaaaaacaactatatatttagtataatgtatatttatatatttataaactcacgattgtgcacaaagcattttatttttttgcctccttaatctcatttaattcttgtataatagccttcaaaagaggctggaaaataattattaattatctccattttacagattaaaaaactgaagtttagaggttgaagtgactttttgaaactcatacaactttagttgttagtgatagacttaggtctaaacatcaattttactaactctaattttaaggaaaatgggagcgttataaagatagtaagagctaacatttagaatagttactatgtgtcagtcaatatgctttgtgcctaatgtgcattgtcacattgaattctgtgtttttgtttttgttttggagatggagtctcgctctgtcgcccaggctggagtgcagtggcgcaatctgggttcactgcaagctccgcctcccgggttcatgccattctcctgcctcagcctcccgagtagctgggactagaggcgccagccaccatgcccggctaattttttgtatttttagtagagacggggtttcaccgtgttagccaggctggtctcgatctcccgacctcgtgatccgcccgcctcggcctcccaaagagctgggattacaggcgtgagccaccacgcctggccttcacattgaattctgaaaccaccctatgatagaggcagtgtaactgttcccattttacagataaggaagctgaagctagaggtaatgactagaccaaggtcatatagataattattggaggaattgaggtcaaactcaggcatttggtgtcaaatctagctcttaaccaaacaaacatctatttaaattctgccttggctagctattaactacatgttcctggccaaattattgcaattttggagcttctgttaagtttcatatatatataacctggtttggcatcctgctcttagtaggccaccaataaatgttaggttcccttctttcaaccacaatgcattgtcactagtaatttttatggcagaagtaatcatgttagttaatctaacatcctaaaatggcagcacttgtgttgacagccagaagaaaaccagggactataacttaagctcaccttaaagtcgtattttactgctattctcaaaatttgctccctggattcttaagatgtaattaaaattttctgttaaggaggaaacaaaaactatgcatgtccataaaattaattatcttgccaataaaagcccgtttctgatggaattcctaaatgacctaagtatattaaatctgagttacttagtaatatcatagtttaaaaaaataaactcttgttaagcaaagattggttccagaaaattgtcctccaaacactgcaagctttagaacttttaaaatgagtcacttgaatttgaaactatgccatatttgaaagtcagagctctggtataagggttacaactctgtcaggtaaaagtgcttctttttaaaaataaaataatttttgtatttatccccatcacaagaagaaaaaataatattattagactacattgattttttaaattgcagttaccaaaaacagctgtgtattcatttatatacataaatttgtatttcataaatttatattttactaatcctaaagctattttcatacacttgttttaaaaaagataatatttcgagaaactacattttttccagtatacaaattcttgtgcccacatggatttatgaatcccttccaaaaaaaatttctaacatcccacaatgatccacaggatggaaaccactattcgaaaatattacaactaaaagggacatttaaggttaatataaaccaccttaatacctactgaacatgtcccagcttcagtttgaatcctaggcacgtgttgtctgtttgaacatactcaaagacctgagagttgggggtagctggacttggcatgcccaaagagacaggggtgtggtaagtacctcatgagttggcctatcctgcagtggagatattaggaaaccctttagaaggagcttatatttgcttaaatctctcctgtcccctaaatcagtgagagtctgatcaggaaaatgaaaactacactaattatttcaaacaagggttgggagggaggatttgatgcaggcacttggttccaaaagcattcgaaagcaaaggaagccaaaagggggttgtaaataatcccagagattagtaacttcaggaagctgctaccaccagtagggctggaggcacagaaggatggaggtggtgttagcagagcctaggaacactaactgccaactctgctgctgcggggtcagacagcagctactgcttatgctgctgtaatcacaactgcccgacttactgatatcactgaagcccatgacctctggccatcactagcaatcacccaccagatctactgcagccagatctactgaaggtggctggagtacatagccactcagttctgccagtggcaacagcaaaagcataaagagaagagcaatgaccttcctctctatctgtctccctgccccagttctagctctgctttgcatgcagtctgctgctgttacctcccaccggtgaaacagaaagggaagcccaccatcaagggagtctgggaagtgtactttgcagaagcctagcccctatgatacagaacagagcatggaaaacttggaaaggagctgacagcagtcagtagttggtgcagtctagccctttagttactcagattctttctcacccttttagccatatttaacttccattgataacagaatcatggccctgcacgacatgatgtacctcttcctcatacaaaaattctctcatcattttcaaaaactgagaagcataaagccctgtcagccaccatttccatgattcacaattctacctagatattctatgacctaaaaaaactaaattataaaggcaactaccaccaacactgctcatataaaatattaagagtaagggaaaaagaaaaaataatttgtttatattataaatatatatatatacacacacacatatatatataaaatgcaagatagaacatggatatagctgctttggtttttgtttctataatggatcatttactccatagttaatatttatccacattcctttgcccttggccagttctccagtaaagagacccaaagctcacctattatgtccgatcactgttagccctcctaaatcttgatgctgcttggaggcagcagtaccatccagagctaaccctggaaaatgagaagactatgatggacagcatcctcagtttaaatcaatttagacttggataagagctctccatttttgatgttcagtgaataaatagttttacaaaatgttggcaatttcagttaggttattttcttttagaatatggacatatttttaccattttaccaatatgttttgtttccatctactatcttgttagttttctgtttatcccacctggttttttggtttcttttttctactttttctgattttgtttggatgaattatgcaggatctgtgttacattttatcttttctagtgatttattaacaacaacgtttagttttatttattttgtagttttgttaggatttacagtatgcctcttttaaacactgactaccatcaaataatattcatcaaatatcaaataatatataatgtaagaaacttaaaagagtaaactatcatttctgcccgccttactttgtgatcctcatcatacatttcacctctgcatatgttaactatacaatgtagttattatttttatttaaataattaatttgcccttaaagatactctttttaaatgagaaaaaaatgttttatacttacccatgtatttactatttccagtgatgtttcattttgtagatctcagtttccatctggtatcattcactttcatactgaagaacttcctctaccattttttatagtgcaggtctgtggatgacacattctatcaccttttgcttatttgaaaatgtctttgttttgccttccatttgtgcatgttgtttactttttccattctgctagcattttaatcatagttattttaaatatctggtttgatcactcaaaatttctgccagtctgagtctaaggcatgctttctctcttcagacagagtttttgcattttcacgtcttctagttttttgctgacagcctgagaggatgtatcaattagaaggaaatgaagtaaatagaccttttgtgtgaggttcaatgttgatctggctaggagttacattgtgtttgccagttgctatagctgtacatatcaaaggctagcattttctctgggtgtccttgttttagtcttccctgttatttttagatttccctggagactcttccttaaatagggtctgaggcttacagttctttggctataatgccctgttattatacagtagcacagttgatgttgtggaaagtggtacaggctccagcaccaggcttctcctccaaggcttccttctttctttaagctgaattctttgtatcttcctgtctctaatattcaaggtagtggcttgccctgttacctcaattttaagaagagttgtggatttccagttttttcagattttttcttattatgagaatgggagtgataaccacaaatcagaaatctcattgtcttctattttcaaagaatatttttcctgaatgtaaaacttagtttgacatttttttttttacttttcacacattaaagatattgttctgttgtcttttgtgcattggtatgataagaattcagcaatcattgttttcttttttaattttacacataatgcatctttttatcttgctgtttttaaggttttctccttattgctgattttcaataatttgtctatgatgcaccttgatattttctttgtgtttgtcctgttgagatccttgggaaaaaaaaatggcaattatttcttaaataatttttcttccctcctttttctgggtctctaattatatagatattatactatttcatattttctcaaggtaattgaggctctgtttattttttgtcttatgtttcttttatctacatgtcttcagttggttagttgcaagtttgctaatcttttgttctgttgttaagtccatcagatgaatattgtatttcagatacttcattattcaactctagaatttccatttggttatttcttgactcattgtgtttatattattctttagatacttcgaaatatttataatagcaattttagagttcttgtcatctaattacatcatctctataacttttggattcatttctactgactgattattattccagatatgggtgacatttttctgtttctttgcatatctagtattttttattggatattggacattgtaagttttacattattaaatatctagattttgctgtcttcctttaaagaatgtgacagcttgttctgttcgacatttaagttgcttgtgaatcagcttttgctttcacatattgtttttaaatcttgttagagtaagtctagatttagactgtcctttactctgctaccatggcatgaaccttcttgaatctctaccgaatgccctagagggtcaacaagatttctgtattctgattggtcagaactcccagccctttgttggctctaggaattatttggcttacactccctcattaggaattctttgccagatacttgttcttcacttgacctcagagagtcccattctatacatgcaccagataatattcagccaaaggctcacagggactcctatgtatatttctggatctctttctgggcttatctcccttttctctgatactctaccttgcagttcaagtcacttaggccttcccaaactcctctctttgttttctcaactcagtgaaactttcaagctttgcttgggttccccctccctatgccacattccagaaagtgctcccagactgaaaattgagttgactatagggctcaccccatttgtttaccttctctcttggagcatgatcttgtatcatccaatgtgtgaaaacagatgtatcatatatattactcattttttctagctgtttatagctagtgagcaagaccattaccagctaccaattatagatacttttagaatttcactatagaaaaaagatatataggagattccacatatatagttatacattaatttgacaaacacctgttaaatacctaacaagttcctggcactatgcttcaagacaaagcaaaatggtagactgggaaaaatctaacatttggagtcaagagatctgggttccagtcttggttatctgtttgctcactttgtaacaagttacctaacctctctgagtctcagctttcttaccattagacataggtaataatatgctactttgcaggatcattgttaggattaaatatattgtctgtaaaaacaactggccaattcctggcacatagcctgagcctgattgattgcaattattaattttatcgaatgtgctatggaaaaaattgaagggacaataaatcagcagattggggtgagaaatgactccattggaggctagtaataaccctatgtctggcagtaaaggaagaaactgggagaaatccaagagaaagaaagaacaatgaaaactgagagcttaaagaaataaacttttctctcctggttaagtaagggaaagtctcacagtatgaaatctgagaatttcagtcacactcaggcactgaaaggcagaccagcagctaccgatagagaaagtggattccttaaaaacagaagatgaagcaccagaaacgatgggcttgatctctgtcaggagaatcactgtgcatacataaaaactgatggaaatatgctcctcagtgtcatctccaaatatcaggtggaggactccagctaaatctgagatttcatgacatgcataaagaagactttgccagctctaagggacaaacataaaaacaaaagtgtttcaagttaattaaacttagtagcacaatcttttggttaagtgcattttctgtttttcagaaatacccaagagagctgcaagaaaagaagatggaggttgaaggagaagggtaaaagctaacacataatccatgctgctaattaactggggggttgaaatgaaagaatgactgatataggtatgaatctttaaattaggccatttcccaactctcaccaaaattcagattttgttctttctgctctaacttcatttttcaaagtaaccttaacagtaatgtgttaaagtaaattaatattgtgttgatttgctgtgttcaaatttaatctccccatagaatgcaagtgccttgaattcagtcaatgatgacttatttttctttatactgtatcagcaaatacaatatcatatacaatatggtataaaatgcataccatgtattataaaggcccatagtaggtgctcaataaatattttaagcataaaagttggaataaattaacgaatggaaagaaaatcagcttttctgacaaaattaacaaaaaaattacaaaggagttactttttcaaatgaagctgaccactctccaatgagaactccaatgcttgttaaagctggagcacatttttgtagaaagcttttagacaaaccatctccctctccttcctgctgcccaatttagccatagaaaatacaaatagtcgtggttactttgagaagaattctcagtggcactaacaacaggaaataaaatggggtgatttgtgggatgagaatttagtgaaatttgggaattttatataatattatcattttggttggtttttactttattaaattaaaattctttaaaactcaaggcaatacaaacaaatgaattcagacagaaataaatcttattaaataacattctgtaagagaagctttttgttgattttgtctgctaccttttttagaataatcaaagatagtttacttatcagtgacattcctagtaatatttcttaaaattgactttttcggagtggccaaaccacactatggaatagaagtacttattattttctatgtggctaatttaaaaacaattatatataaccatcctacagatgatattgacagttgaattggtttaagaaattagcaagcctaagcaacatggcaaaactccatctctacaaaaaataaaaaaaaaaaaaaatagctgggtgtggtgacatacacctgtggtcccagctacttgggaggctgaggtaggagaactgactgatcctaggaggtggggctgcagtgagctgtgatcattccactgcactccagcctgggcaacagagtgagaccctgtctcagaaaagtaaagaaaagaaaagaaaacagacttagagccaaaaaaaaaaaaaagtctatcatctagcctgttctgactccttttatatacattgtccatgttctatggcgcttcatcacaccaagaagtccttttttgatatcaaaggcttaattactctttgatcagactttgaatttctatggccatctataattgctcaaagtttagtttccaaatttgtaacaattgtactttaggagatcaggtgccatacagaggcagtctttaatacttactaacctgagaacaggttaatgaatggaaagaaagtaactttctctatttccctggtcgggcattatcactaatatgttctaatatgtgtgagaaatgctataaaatccttttaatctgaatactaacctcttagccaaatgtaagctttaaaaatttgcatcttcccaattagacaaaaatgggtttttttaaaattagatttacatgtagtaaaatgtataatattaagaatatgatgacttttgacaaatgtgtacatctgtgtaatcgacacttctaaagaaatacagggcattcctatgcccagaaagctttctcatgccctttaccagacaatcttccatgtcagagatagtcattccaaaatttattttcaatcataaattagttttgcttatttagcacctcatattgaatcatacagagttctgggtatttttttacccagttttttggggcttagcatagtgtttgagagctctacccatgaaattcaagtattattgagcggcattaaaatgtttcaatatatttgtttctccatttaccttttgctgggcaaaagggttgtttccagtttggggcagctctggatattcttgtgtaggtatttttatgaacaatttggtttccatttctcttggaaatatacctaagaatagacttataggatcataagttaagtgtattttagctttgttagagactgccaaacttttccacagaggtttagtggatactgtagcatgctgcccagattccttcttccaggactaatgcacccattccctcaactgctagaaatggcaaccgacagttcttaactaaatccctttctgagattcaccctcaggtaaagagagtcaccttaccaagataacgctcagggttgggacaagagtgagggaaaagagttgcctagaatgcaaaatttaaagaggtacaagctgagcgcagtggctcatgcctgtaatctcagcactttggaaggctgaggcaggcggatcacttgaggccaggagttcaagaccagcctggccaacatggtgaaacccttctttactaaaaatacaaaaactagccaagcatgttggcaggtgcttgtaatcccagctactagagaggctgaggccgtagaatcacttgaacccaggaggcagaggttgcagtaagctgagatcatgctaccgcactccagcctgggtgacagagcgagactctgtcaaataaataaataaataaataaagagacacttgctctgaggttcaggcaagtgcagtctcttttttttctgccgccaacatacattcacacacaacttcaaaaatctctattctctaccacccttaagagttaggcctattaacagataaaaggttgcaacttttaacttttgccatcaataatgactttttcaatctgtagaacattatgcaacttataaagcaattttatctgtatattctcttttgtccttgtatgaagcttagcagagaaaaagagactttacagataatgagattgattcaagacattaagtgacattgccaataacaaagctggaatttaagcccaagtcctaacatatctcaagtaccaaccttattcatgactgcctgcccaatatgctatgaggtctttcctggcaatatgtttttttttttgtttgaaagaggtgagtaaatggaaaatgcatgggccgtgatggtataaactttccctctgccaaaatacaagccaatgatggtgcacactggctctgcaatagcaaaatatctctggaagctggaaattttctaacgtgaaaattacttttctcattatatgtggttctgtttccttacttggcactaaactattaatcagtagatctaggatttactcttatactttaaataatggactatgtcattttggggaattcatatcacctctctgtttcattttccccatctgtaaaactagtttctagaattcgtgatttcagagattgcatgtgtgcatgaaaagacaaccatgctatttttcaatgtggatttgtcattttatgaaagaacagaataaaggacaattctttaaaatatattcagctgatgaaatcaatgaaaatgccatcatgacgaaacctgagctgaggactggcctttggaaaccacagtcctgggtgatcgctaaggtttttgattcatgaagttatcagcctctttgaaggcaacacaagagtggttgtataaaagcatgatcccttttggtagcagttcataatggttctgattttctggggaaatttcatcaagtggcttgccactggaagccagacaccaaagaagaggcctggcctaaagaaagccagggattaaagacaatgttggattgccagcttgttttgtatgagaaccattcacatccagcagagtgcttgaggttgtgagagccccacaaccagcacgctatcccacagcatcacaagcacagcaaggtcaacttgatctgtagcaggttattacccttgcacttgaatgctaaagaaggaagcaggcttttcattcatagcagtcagctttaaacctgaaaaggcctctctgaaaataaaaaagtaacaactagcaacagcaaaacaattcagctttaccctttacatttgttctttttccaatttactattaaaaagtgtagagtataaactgttgcagtaagtaaaacttatgctaggttttatagtgggtaaacaatattcttatatgattttctcatttaatcctcatagcaatccattaaaatatactctatcttcccatctcatacatggagatgctgaagcacagaccttggaaatgatctgtacaaaaccacatggtcagaaactggtggcatcagattgtttgcatgggttaaaatcatgctagattaaaacttgtatgagtagcaccaaatctgcatccacaaatctgctaaatcccagggcctagcatatacaaattattttttgagtgagtgaatgaatttactaaagaactaaagcatcacatttgttctttttaggcatctttggctagtcattatgaacttcctgagagcttctggaattacaaaaaaggagatgacagctttctatttttgtttattcaatacattatttgctaacaactgccacataaaaggcaaggtgttaaatactaaggagggcatacaaggatatatatagaccttacgcatctatatctggaaaacacagtcatcttgaatagagaaatcacaatttccctacacccttcccacctcttcctctcacctcatctactgcctgcttcccacatcaataaggctggaaaatgcaagcatttgcctatagagacaatgttaagatttccagttactagtccaagatttccataacagtaagataaacaaggaactaattcaaagggacacccgtttttccatcatgactgtgttcctggtaaattacctatgtcttataaatcaaatgtttataataccggcttccagtaaaattggagaatttcattttcatttatggtcctcttcagttagtaatagttcctaacacaaaatcttaaattaatagttttcaatcctgagcacactcaccaagggagtcttaaaaacgtatagtgcaatttcctgacctcactcaagctccactaaaactgaatatcttggtttcactttcaaattgcttttccaaaaagagaaagtaaagaacaagtatatagttttgctatgtagggagcagagaaatggaggagtagctacaggggtatgtggggtaaaatgattctttttgaagatgaaatatgtaacatcgtgcttatatcctgatggagaagatacagtagaaagggggaatatattaataattcaggagagaatgcaattgctacaggcaaatccttgaaaaggtgtaaggagatggatctgtgcacaaagagagaggcaggcctttgataaaattgtggatatccatctatattaaaggaatagaagcagagtatgataggttaatagatactatggtgaaaatgtgtagaagttttactttctccatgaaatgggaagcaagttcatgaaggaaatgatggggagggagaagagagaagaatttgagaagggaagtggagatatgaaattgttacctagaaaagtagcatagtgattaaaccaggaaaacggggagcatgtaaacaccacatcaacaaaacaaagacctgcccttatgacatttacattccaatgacagagaaaacaaatgaacaggataaaagcaagggcaaggacactgtctatagaatggccaaggaaggcctcctgattagatgacacttggagaagatctgagtgaactcctggaaaagactggaggagtgattattccaagcaaagagaaccccaaatgccaagtctataagggaacatgcttgatatattccagtagcagcaagtaactgagtgtgtctggaatggaatgagcaaggcaaagaatatgaggacacaaaggcagagaagagaccaacgtacagactaagatgggcacaggaaggactttgagtttattctacatgtttatggaagccactggaggagcttgagtagagaattaatcacccgacttctcttttacagaatccctctgctggtctactacgaatttacggtggcaagtatagaaacagaaagaccagttacaaatggcttcaatagttgaggagagaaattatggtggcttgacagtggtagtagtggagtggtgggaagtggtcagattcagaatatattttgaagatagagcataacaggatttgttcatggatggatgcaaagtgtgaaagagagtgaaagatcacttcaagtattttgcctaagcaatggagcaactggcaatgacatttaccaagatggagagcattaggagaagagggaatcgagagttcagtttcagtattttttacattatattaccatctctaatatatatgactatcatccctttagacaatcagttgtcagataagaattacaactttccaaaagtcccagcacctagcccagtttttaacatatggtaggtagtcggccaggcgcggtggctctcgcctgtaatcccagcactttgggaggccgaggcaggtggatcacaaggtcaggagatctagaccatcctggctaacatggtgaaaccccatctctactaaaaatacaaaaaattagccgggcgtggtggcagacgcctgtagtcccagctactcgggaggctgaggcaggagaatggcgtgaacccaggaggcagagcttgcagtgagccaagatcacgccactgcactccagccttggtgacagagtgagactccgtctcaaaaaaaacatatggtaggtagtcatcaaaatttactggacaaatctttataatacagttttattaaattataatgcatttaaatcaaaccttctgtatgacaaaagatatcattaaataaaaatgtaagctgtagacttaaaaaagtataatcacaacccacgtattttaccaagcattactagtcagaacatataaagatctcttttgagtttatagaataaagataaacagaaaaatagccaaagggtatgaactgttggttaatgggaagcgaagaggctaagtgaaaagtttatgagaagacactcaaaaattatttaccagattcatattagcaaaaattaattaattaaaaatcagaaaaatgcaaattaaaacaatgagatagccctcaaattcatgatgtagcattaagattggccaacatggctgagcacgatggcccatgcctgtaatcccagcactttgggaagccaagataggcagattgcttgagctcaggagttagtctgggcaacatagaaaaaccccatctctacaaaaaattaaaaaactagcccagcttgtaggctcctgcctttaggtctagctacttggagggctgaggccagaggaccgcttgagcccagaaggcaaaggttgcagtgagccaagattgcatcactgcactccagcctgggtgacagagggacatcctgtctcaaaataaaaaggaattggccagcattaataaatctggtaacacctaatgttgacaaggatgtggggaaaaacgtatcataccttattggtagtatcattaattggtaccatcactttggagagcaatttgacaatacatggtaaagttgaaagttgtagagattcacatactctacagctcagcaattccacttctagatttctctcctaaaaaaagaaaaaaagaaagaaaactatcttgcatatgtccaaagttacttatacaaaaatgaactttttagaattgttaaaaagtaggaaaccaaatatttctcagtggtgatgatggggggctggatgcatacataaactaaggagcatacaaataacataaactaagaagcatacaaataacataaaccaagaataatacctatgtgttatgggttgaattatgtctccccaaaattcatatgttgaagccctaaccctccagttcagaatatgattatatttggagatagagactttaaagaagtgattacattaacatgagaccattagggtggactctaatccaatctgactgctgtccttataaggaaaggaaatttgggcaaatacagagacaccaggagatgcacacacacagagaaagtaccatgtaaggccccagcaggagggcaggcatcgtcaagctaaggaaaatggcctcagaagaaaccagacctgctgaaaccttgatcttggacttctggcctctgtaactgtgagaaaataaacttctgttgaagccatccagcctgggatggggttgtgggggtggttatgggagccctagaaatgaatacactattctgtgcactctagatgcattcctcctttgatcttcacaactacttgataatgttgatataattgttgacattttatgtataaggaaatcaagacccaaagatcctatgcaaattgatgttgagcacatcacacttacttaacagtagactcagagtttgaacccagaatctgatgacagagttcattcagttcctaacctatcacattctttaaaatttgggggttttcatcattctcagcaaactatcacaagaacagaaaaccaaataccgcatgttcttactcataagtgggagatgaacaaggaaaacacatggacatagggagggaaacatcacacactggggtctgtctgggggtggggggctaggaaaaggataacattaggagaaatacctaatataggtgacaggttgatgggtgcagcaaaccaccatggcacgtgtatacctatgtaacaaaactgcatgttctgcacatgtaccccagaacttaaagtatcaaaaaaaatttttttttttttttttttttttgccagagtctcgctctgttgcccaggctggagtgcagtggcatgtctcagctcaccgcaacctcagtgggaggcagaggctcgagaattgcttgaacacgggaggcagaaattacaggcgtccaccatcacacccagctaatttttgtgtttttagtagagatcgtgtttcaccaggttgaccaggctggtcttgaactcttgacctcaagcaatctgcctgccttggcctcccaaagtgctaggattacaggcatgagccaccccgcccggcctaaattctttaaaattaacaagcgatatcaaaatatatcaacagagataagtgaccaaaatataatgatgaatgcaaaaggtatctagcaaaagaatatttccaatgtgatattatttataataatttttaaagcacacataacagaagttacacctttgaaaaaggaggagagtattgtgcttaactgtttctttcctttttcctcttttataagagagagctgaaacgaatatgtcaagatgttaatgtctgttcaatttttgtcatatataatagatgtctgctagattattttctatgctcttttctatgtatgaaatgttcatagtttaaaaaatattttcttttaaaaagcaaaatatattgctttaaacatctttcttgtgatttagacagtaaattccatgtccataaaagggcggttaattctttctgtcttgaatgtaaacactgaagaaaattttatagtgtgtttgtgtgtttgtttttcaaatgacatattaaatgggcattttttaaaacatatgttgggtgtcttacaagatagtctagacccctttacaagtcaggttgttgagttgatcatacagaaaaagactaaaggaagtgattagaaacagatgtgacgctttaaaagcctccactgttaaaagcagaaaggagtcacagcgggagctgggcagagttggagttatgttttatgtccataggcatcccctacccttactaaagcccatctcaaatatatagagaagatagttttctccatatggacaagatagaacattgattcaggagctggttgctctgagacacaattaagaatcagcctagaatcagtggttggaatcttacattgccttgttagaaggaaaaaaagcattaatgtaggatttatatattggaaagctctacagaagctgaaatacagtagcaaatgaaacgaagagtcttaagaaaacaggagtcattacagaattaactaaatatactaatttctgtccttttctggaaagctggtaaaaatccctacagatcaatttgctgttttacaaagaaagcatcaaacattgctcagtgctgttaggagacaattctccatggttctctcctgttcccacatgtcttctgagcaaaggcactgacatcttttgttctgggctatgttttcaaggatacttatatagtaaacaacctcagaagacagagacggtgtctttctctggagtagagagcaggatttttgctttccaatataaaagagaaagatttcccaagctcaggattcctcattagtgaagaaacccctctatgtgggccactctatatcgccctcatggtatttggaagacaagcgttgccgatgagaacaagaagctcatgctgtttgctgtatgatgggtaaaagtcctttgtctctggtctcagagtcttgtgacttctgtcagcatccatgaaacaggcagagtaacctgtattactttgcaagcagggaaaaattgcagaccctttatatttcttaagtgttacatctaaggttagtggttgaatacattaaattcaaatttaatgaatatatgtcaatcacttactatatgccaggggctgtgctaagtatttgacatctattatcttatttaagcttcacgttggttccatgagaaactgaggcataactagttacataacctactaaaagacccatagttagtgagtgacattttcacgcttcccagcccaggtagtctgactagagcagctactcttaatgactttctatttctgcagcaatattttcaattattattgttgtccctattaaaaataagaaaatagattctgaattataagtgtttgctcatagtctcaaaatttattcatgcgaaattatgatgttaactccattatgaaatcaaaggcaatatttattattaagtaaagaagtagctttcaaatattttgcattaaaatcttgattcttactgtaatcttctagtatattctattcattttgtaattctttttctaaaagcaataaaagcacaatgttgcagataaagtcaacgaaaagatgctaaaattagtagacaaaagtttgaggagaaagaagatttgcataatttccaattatcttttccaagaaatgtatcaactgcaaagaaaaaatggtaactttatagtagagaaacccagcagataccaacttaacccagtgattaaaatacattaccagcaaaaaattaaaaaaaaatgcagggattattctgtatttcaagaaaaaatacattaccagcaataatacaaatcaatagcataaactcctagatgtaagagggacacaacattttttcttagtattgctacaaacatgtataacctcattcctatcatgagaaaatactagacatacccaaattgagagacattctatagaatacctaatcagtatttattaaaactgtgaagctcatgaagacaacgaaagcagaactgctgcaaactggaagagacaaaggagaaataacagctggatgcaatctgagatcttagacaagatcctggaacagacagggaaaaacatttgtgttaaaatgggtgaaattagaaaaaggcctgtagttgagttaattatattgtaccaaatgttcattttcatcacttgataattgtactatggttatttaagatattaacattaggtggaacaggtagataacagaattctttgtattattttttccacttgtctgtaagtctaaaattagttcaaaataaaatgtttcaaaaaataaaatgatgttgcttatgtaaaacaattctttatgaaatgtagtatagtggttaagagcatcttttctgtattcaaaccctagctttttaacttataaactatataattttgggcaagttatacctatcactctgggcttcaatttatctcaaaaagtagtatcctaatacccacattgtgtttgttacgaagattaaataaggaaatccttgctaaaaacacaggtcaacacaaaatatactcttaatatattttctcttttcttgtaatagccagtggttcatctatgtcaggaagccattgggtttcatctgccaaaagatgccctcatcaaagacaccaatcacctcttgagaatgaaaagcaagagaatacaaggagaaaagatatggcctcgttaggatgtgctttgaaccaggggttgtcagctcaaatgcctacaaggaccaagcctatgacaccagctagtggagtcaacctgggcaggaatgtggtgagctggagagccagtgtgctctccaaggggaacagctgtgttcctgctgtcaccatgataaattgtggcccagtattgccagatctcccaattttgcaagaatcttggctttttataagaaaactcccaacttctaaatgttggtaaatagttcaaaaatgtaaagcatcctggttctaagactacaaatgccaaaccccaaaagcgagtgagccagatgcagctggtgggttccacctcgattgccaactttttagcaggtacagctggtgaagtagggagtgggtggggtttttgtatccaaaatgcctgggtacaaattcactctgtggttaattagcgttacccacacacacatgcttacacatgcacacgtacatgcacaccagttacctcatcatatatatttggtaggctcagaattaagcaaaattgaagataatttttaaactgcagatttcagaaatttttatatactcaggtgcattatgaatcctgattagagtctatgtaagctatgtataccttttattttcttccaacgtcatcagccacctaggcattttctgaggcactactcatggcacaagcattctgtgaaaacacatatgggaccctggactagatggtttctaatgctcctcccagccctgaccctccttgttcctgagctcaacaacaaaaggatctttctttttccccacagtgcttggtgcatggtgcaccactggtaaatgcttacggaactaattgcctcttgcaaaggaatttggggctcacaatagtgtctgtacttcagattaggaggaaaaaaaaaagaaatcaagccagatgccacaatggactaaaacaagctccccgactttgccagttggttttgattgtttacaaagaaaaagccaaacaaagaaggaggtggaatttatttcagtaaacagcatctttcaaagagaaagaactcagtcttctctaagagaggtgccctcactgctgttacaatcagaaaacgtttgcaaacaaccacttggttaaagaaaacaacatgttcaaacaacaaaaccatgggttttctcagagcatttggggtgtgtttgtgtttgtgtgtgtgtttgtttgggaaggagggtgggagggatgcacttgcatacatagtcatcttcaagtctaagagcattttggtgtctcaagataggaaagtaacaggtttttaaatgcagtgcattgaagctgcaagcgattttacaccctgtcttgccaaatattcctcaatctgcagataacacaaacaagtcccagggaggttaagtggatttcttaaggaacagattccacccctgttccctgtctccccttctcttttcttcctagtgttctttccccagtatgctgcctcttagagcacaggaatattttaagaaacagtttacgaagccacaactctaaatacataataccagcaacagtgatacaaacatgggaaatggcagaagtgaaacagaagagtaaagtgttagtcaaggcaaggaggtaaactctaaagcaacacaattgcatgcactcctaaatccaaaggaaatccgatctcattgctgggagatattataaactacgacaataataatagctctgcctaacaatgaacattccctaagcgctctctttgtgccaagcactgtcttgaatgcttgttctctgtcttattcaatctcacagttactgcctctgcaagaaaggtggcgctgtcatgatttcaacagaggacaaaactgaggatcaggaggcccgaataagtaattgcccaaggttacgtagtgcagaagtaggtatgctggaatttgaactcggatcgatctgatttcaaagccctgaatagttctaccacatcaagggcaggaatgatgcgaagccacttacgtattatggtacttgtcagtgtttgtgtacctaaagacaatgctcattttatgtctactgtgtgcccaatgtgtgtcagtcaccatggtcagtctgaggatgaagcaatgagaccctgcctggtcattcaaggagggatcaggggaggaatgagggagacaagagaagcattacaatctgggccataagagagcatacaggggtccagcacacctaataccagggtcctaaaagggtatatggaactgatggcattgaaggtgatccttaaaagaggaactcaaagaggaagcaggaagaaaatgctgctttagatacaacgaactggaaaatcaaagatcaatggcagcagggactcagggggagtcagagaaaaagcatccactggcacatagctggagtctgaggtgtgtcctgaaaggtaaagggagacgattttgaaaaactggaggattttgaactttgggctgagcagtttgaactttatgttgcaggttatgagggtaggatgggggtaggttaaatttaagacataggaccacagaaatgtcctaactgaaacaggaattagcctgtgggaaacaggaattcaacaggggccctctttaagagtcagacagggctgtgttagaactccagctctgccacccactaactgtgtggccttagatgagttactccccttgctgagcctcctcttcctcatttgtgaaatggaataataatactatctagctcataagattgttgtgagggttaaagaagcatcgactgcaaagcgcctttgcaaatgccttacacatgtgagttattattcagtggtgagtcctgatttccataatgtttgatttgtcagtggtttggggtaatcagtgccgacgtctttctcccttcaaagcttgcgccatggctgtgattcacagagagtttgtggaaggcagcactagtttagtggcaagcaggctcagtttctgattctagccccgcagtcattggcgggtcctgcatggaatgacttcaggccaaataaaacctctctctgggatttagagtcttctttcaacacagtgggtggcatagagttgacaatcagcaaatagtggtgtccttttcttcctttctaagtctggtattgcctgtgtgtctagaaacccatttaacttccctgggcctcagtttccttgttaagaaaatgggaataatcatcttcactggatactttgtaggattattttgaagctcaaacagcagttgggataagatggtgcaatgctttgtaagctgaatcactttacaaacatacgggatcattattataaactgagccaagttcaaatggttccactgaaattctgagtccctgaggctaaaatgagttaatatttggagtggcctcctgagctccaaggaagaataacaatgaaactttcatctcctggactaataatagtgaaaaacagttcaccgttatgggcctattcatcgctaccccgtgaaaacagagctaactgctataaaacgaggccaattaaatctacacaattctgcttcctgcctcccatccatttcacctattctccccctctcccaaataatagcctttctcccctcccttctcttcatggtgaagtcttacatctgtgaagatcataaaacgcatgacagccattgggggaaaaaaaatcacactagtacacacacacaaacacacacacacacacacaaacacatcagcacatccctccccagcagtgtccttaagaaaaggaataaccagttggagacagctgcattgatggtgccactaagcagccctggtgacatggccaagggcatttcttgactcctttgcacgtgctctgcacaccaagacacacaggcttagcctgaaatcagccctgagtggacattcagaacttaaatgctctttaattaaagcaaatatcatggcatttgttccaagagtctgcaagagttactgaccagcggacttccttgagttcctttccctgtcataagaagttgaaaatatcacctcacagatcacccatagatgtttaatgccctaatttggaaatactgcatttctgtttttatttttagttttgcaactttgggaacagtgcaaaagagaaagacctaggttatgatggaatgaacactggacataaagtgaaaccaccagaattcaaatgcttactatgttccttataagttgtgtcaccttgtgtaagtcacttctcatctgcaatacggggaaacaatgcccacttctcaagtgctggggagctcaatagaagtatcccagaaataaaaagcctcatatactgtacgtttctcctgttgagtaagtgtgagttgtgatccctcaaaagggcgacgaattaggatcaggagccatagaacctgaatctggcctctgttgctaaccagttgggtgaccttcacaaatcattgcacctcttggaggctcatttttctcacaccattcaagaaatattcgcaaaatttctatcatgtggcaggttctgtgtataattccatgaactcttagtcaaatataaggatgactatgacatttttgactactggttaatgatatgaattgtgtaatttcattatttcaatgtcgtatcttcccttatgatctccatttcgaggttgtattgttctctgtgatcttaaccttctattctaatttatattgtcctagtttctgaatattaaatatttttaatttatactttactattttaatagagccatactgagtaagttgctatgaatactttgtagggtggaatgcaatactgatatataaacaaattaataaataagagcagaggaaatattcccagattaaaatttattaattttgcctaagtaaatctgattgtcattctccgattacccaaccccaaacctatctttatgtgagatttaaaataaagatgctcgacccggtgcggtggcttatgcctggcatcccagcactttgggaggccgaggcaagcggatcatgaggtcagaatatcgagaccatcctggccaacatggtgaaaccccgtctctactaaaatacaaaaaaattagccgggcatggtggtatgtgcctgtagtcccagcaactcagggggctgaggcaggggaatcacttgaacccgggaggtggagattgcagtcagtcgagatcgcgccactgcactccagcctggtggcaaagcgagactccgtctaagataaataaataaataagctcacttttccaagattaaacaatagttaaacgccaccccccccccaaaaaaagagagaaagatacatctgagaaggttactataattcatacatattttaaaggataatagcagcagctttcctgacaaatagttttgaaaatgagagggaagggttcaaatcaaagagtgttttctttgacactatgagggctgatggcaaggaaaggggtggtgagagcagggcacaactgaccaaagtggagggacctagctttgtgctgaggatctgatagcagctatgacacctaaatcctcacatacctgtaaagcagatggcaccatcccctcttcacaacttgccccaggccacacggctatgaattcagatccaaatctttttgactaaatgtgcaccatatttccactccaccatgctgattccttcatcctccttcctaattttgctgagtgttaatattgccccaggtgaaagcctctgcctcagtcccaggatacccctgaaatgtaggtgagcccagtgggggagcagtatagccaacccattccctctcctccctttccatgtgagtcctagtccatagctgttctacagtggcctcataaaggacaaagcagacttcataaagaatcagcctgagtctccgggcatactctaaccagggtgaggagaaagtttctagttgtgttcaggagaagttgtcttcctttttagaggcttgcattatgtgagacaactcaggttagtataatggaaggagcacagaatttgtcataaagataatagttgaaacccaggctctatagcagcactgtacagtagaactttctataataatggacatgttctctagctgcacttttcaatagaatagcaatagccatgtgtgacagtaggactcttgaaacgtaactagtgcaactgagcaactgagtttttaattttgtttagagttaattaatctaaatttgtttagcaccatgtgactagtggctactgtgttggatagcatagctagctctactgctttctagctgtgtgaccttgaacaagtccctttatttctcagagcctgagatcactcatctgtgaaatgttcataatcctgtcaccttgcaacttcattggattgacaaagagagggaagagccatgcaagtgcttagcacaaaattttgcttttaataaggactcaagagaccttagttgaatctgaaaatttgaatcttataatagtcaaagagaaatgcatgttaaaagtttatgcctggatttttctacagaattgattccttatgatggctttattcatccaaacttcatttgcctgccaaaaatgacctcagagaaaacaggaataaagaaagtcacactagttataggatggtgggtaccatccctactctcaccaccctacttcccctggagttctgagatgtcattttctcccgtgatggaaatagctaaaagcagggcaaagtgtttcacataagatgtagccacagatctttgagagttttgccaacaattttcttctttctcctccacttttaaacacattgttttcaaaaaatttgtccatctggttctgattcatttgcacttaactcatgagagttaagttgcaatagagttaagttatgttgcaatagcagactgacttgtaaaaagttctaattcatacatctcccagactctttccttagaaatagggaaatgtttggccaacagatggacaaagcccactcaagatgggagagagggtacaagatggcagtctcacctctgctataagctctcaggaaaccctgagcatgtcctaaatttctacggtctgggtgtcccccatcctaggattattgcattgagtaggaattgagttggatgaccaaatggtccctcttgagtacagaactgatgcatatagttgcaccaaataaattgctggattctttaaataaccacttcagccagagttcttgtgattctactgtcctcaagttctagggagttatctacaaacctctttgactacccatatgaccgctgtcgagattatttcatcagagttcttgttttcaatgatctcccaaagttgggaataacaactcccaaatttatatttccaaactacattttcttctgacttactgcctcatatatacaactgtcatcttcacatctttacttggatgtgctatatccatctcaagccaggtgtgtccaaaatggagattaacattttttcccacaaatttttcccttcaatgttctccacctccataaagaacaataccatctacccagtggatcaagagaccttgaatcaagagacaccaagttcagccactgtaagtctctcagctttttattgaactctccttgaatgctgagggctagaaaattttgtcttcttatatctctcactcattgagcctgccagtagctaatattttattttccatgggtttagggttgttgattcaagttccttctagagccaggtgtggtgactcacacctataatcccagcactttgggaagccgagatgggaagattgcttgagcccatggcccatgtctctggtcccagcttctcaggaggccaaggtgggaggatcacttgagcctgggaagtcaagtctgcagtaggatgagatcataccactacactccagcctgggtgacagagtgagaacctgtctcaaaaaaaataaaaataaaaaattccttccagaatggccatttttccactagactgtgaggtctggaaaaggcagggaacattctgtttgttctatattcctagcacaaaacaggtatgacaaagtgaaaattagagactctgttctctacttccttcctactatttctctctacctttactctagcattatcacacaggctataattatctacatttattcttcttcattagactgggaagctttgtcttattgactcatctttgctgtcttaatactaagttcctagcctgacacttaggaagtgtccaaagaatgtgtgcatgaatgaagaaataataaaatgaattagtgaatgaagaataaagaaataaaggaactgatgaggcactccctggcaggccctgattatgctgcatccaggagacacctaatcacatatattttcttccatcatacagcccagccaggaggcaggaagaaagatcaggaagagcttaatgttcagtggaaatttcttaccagcaatcaactcccagtctgacttttataattatttctctctctctctctctctctctctctctccccctctcctttcttctccctcctctctttctttttctctcgctctcttttttttaaagtcagttgtggtgtcttttcttccttccaccttacccattattatgataatgacttcaaacaccatgcattgctattcagggcactgtaaaaatgtgtttttctcatcagtccccatgaaatagtttccactgtctgtttcccttgcagatagcaatcaaagtctaggcgcaacaataaagaaaaaaaaggcccaactcttgtccaacatagaatctaaaacttgtccttggaaagtgaccccaagggaatttaatcacaaatattcttgacttggcccagcctcttgctgttgaatacagagtatcaggaatggtctgtttctggggactgatttctctattattccctcttagttttctcagaagaccaaaataagaggcctttgaagaaaattgctcccttaagacctccagtagagtctccagggtctaacactagtttttaaatttcactgtccacatcctgtggctatagtcccctaagctctaatcatcctgttgcctggacttgttattccctcagattggttgactttgcatcaccaggtcagtacctggccctatctcctactagtcatattaccttggacaattgtttcacctcctgtcctcagtgttcccattataaaacaggagtactaacctgtatctcacaggataattgtgaggttaaattatataatatagcagatactaaatgggaattggtcctggactggttggagaccacaaattctttctcctccttgtcagcctctcccttctctaagctcttttagtgctagtaccatgctaacagaattcataggcagaatggcctttagagattgtcagtggaaaagtcccatttcaaatgtgtggtatacatacacacatagcacatacacaaaacacaccatactacacacattacctacacactgcaccaaacacacaccaccacatacaccacaatacacacatacaaaacataccacacacacaaatcacacaatgcacacatacacacatgcaaaagctgggcatttggtcatttgccatttcaaattccaaggatggcctgtccctaatgccctttcttctcttgggatttggccttcataactaggaaagcagttctggtgctcaatcaatccaaaggggctatgaggaaacactgtgtgaaacacaaagagaaggatgctgttctaaaggtttagaccatatttcccatgcccaattgatgatagtcataagtaacgtatgcagagcatttatcgtgtctgggcaccatgctggtgcattacctgtaggaaaaatttaaccttcataacatacctgtatgtatgcactattaagcaatcagattgcagagaaaacagtcatccccagacattctctattgcctgaggtccattcagtggctgggctccctgtgccacctttgcttactagcaactaaaagagcaattgtacctcaagctaggagtgaccaatgattaactggcaaaagagcactgtgagtgttaatttttctgagtttcatttataaatggtccaaagaaagtaactggtgggcatccagagattaggccatgaatctctctgccatgtcatcacactaaaaatatggctgatgtctatggtgctaatgctcgatacctcccagaagcctacagtcattccagagcccatgtggtgcttggtgctcttggctccatactagtgccaattgcatagttttgttactcaaaatgcaaagcaatttctgtaaagaccaagccagctgttctctgccagcctataattggccattgagtctatagaaagttgttgacttttgttggcaaaagagtggcacaaacaatccacccatgatgtcatataacacagggcaggacacaaccattccagtcccagagacttacaaagatactaggttccattaagccaggcaactggaatttcagtgatatcacttaaaaagagggctgtctcctttgggacaacatggctgtgtagataaaattttaaaaatagctcttactgctctaaataacatatatgaagcatatgtattcataacatacatgaaactcctaaagttctaagatggcataaaacattgaaagaattggctcccaataggatctgcattttctgctccttgttccatctcagtaggctggattagacaccctacaaccaacctcctccctttaattcatatggttggcagtttgcaaagtgctttcatgttcattatttcataagtcattcacaatgaccctgaagcattatcatttgtgttttacagatgtggaaattatgcatcagcaatttatttggtaagcaacttaccaaatatcccacagcccacagtgacagaggtagaactgtatgattgattgttcagtgttcatgccactgcactgtgctgccgccagccagtccaaatttagctgcaacttgatatcaatagactttccaggggatgccctgaggctttctgttctgagtgattgcaagaagaaagggggtcatttctaggtacagtcgaggccacagatcttcccatatgctgctccctactgctctttgactccaatttatctttaagtctcagataaatgccagtttctcaaggtgggcttccctgacaccctacctaagttaggggttccactgttatctgtctctacagcatctttatttttcctatttaataatactcaccatacttacaataactttttcaattcctattttctttacttagctataagcttcatgaaggcaggaaccatattcagctagaacagttcctatacattaggtacttgatacatgtgtagaatgaaagaacaaattgtttcctctcataggaaagtctggacaggtccagagaatgtcagcccatcaactagaaggaaacttacctgagatagccagagggtaagtatgaaatatattcaagaaaaagatcagcaactggtcaaattacagtagccatttttcaggtctaaactgggattagaagccaggaacaggactgaaggcaaaggaacaggaacaaaagccttttttcttttttttccagcaggatgggtcactcaaagcttccctgttagggaccagaggaatggcatctcagcaatagggccaggaaaacaaagttcgcagctccctttggggctttttagttaaaacagatggctctgtaccttgataaatgctttccttttcatataataagtgaatgagagctatagacagattcagtggtgaaatatcatggcaggaggtgtgtttaaggaagattattcagttagaatatacagagaaaaaccacaagaattgggaagaccaactatgatgcaaacagacaagagggaagcaatgagaacatgaattaatattgtgaaaattgaacagaatcaacagaattgaaatatacttcagaagtaccctctgttgaacttggtaattgataagctataaaatagtgtccttttttgatttgctatctgcttactaagtgcttttatatcttttaccctgtttgagccttatgagggggctgtgtgtttgagaaagaagaaaataagcttaagagcgtatatgtcccagacacaagctctgagtggctcagctgggatgagagtgcagtttcctttactaccagctctgagccctctagacaatgtcaggtcgtcatacaacttggagcttaggttacaggaatgggctcaccttactccccccaggatcaagctgtctttgatcttgtttatttattcatttaatgaacatttatagccacgcatttcccagaagagaggtccgaggattcccaacagttctgggagcctgacaatactgtcaacagctgctgcactggagaccagggagcctcagggcaggttctgcttgctgtgagtcagacctgcttttcatctttactgtttttcctgattatactgtaaaatgtccaaacaagaaatattaaaaagccaaaatcctatgtactttgctacaatttactatcttatataataatagattaaaaatatggagccttggctaattgccaggcaccgggcaagacaactttacatacagcatcttatttagtcctcacaatagtcagaggcaagtactattactacctctatttagcagctaaaaaacctgaggctcctggaaagtaacttgcccaagttcacagcactagaaagtagcagaggcagaattctagccaggccctgtgatctcacagtccacatacgtaaccacactgtgtatcagggatatcttgccaaatgagacatatttaatcacatctgtttctcaaagaaaaagctgttgttgtcttctattctccaaaatgtttcatgagttttgttaaccagagtgaaaggaccaatctacaattcactaaaaaagtcacattcttctaacaagcttaaatacgttctctcctacctacttgctgagccagaaatcctcagcaattataaaggggtagctatgtccctttatctgtggtggacaaagcacttgaccaaagttaggaggcttgactcttggcgtaggccttgatgatactactaacttactgagtgatcgtgagcacaataccttctctactggcttgttggtttacaatcagaagtttgcatggtctctgagggcccttccagctctacttactataacatggtgcctctcatgatgtcctaaaatgcaaacgggctgattttataaaaccttttgttaaaaataacatttaaacattctcagtagtattgagaatggaggaattgttacagaaaggagatagagggtgtattcatttcctatagttcctgtaacaaattatcacaaacttagtggtttaaaacaacagaaatttattctctgtgttttagaggccagagtttgaaatcaaggtgttggcagggctgcgccacctccaggtgctcgtgaggagaacccttccttacctccttcagccttcaatggctactggcattcctggcctatgtctgcatcactccaatctgcttctaatgtctgtggtcacattgtcttctcctcttgttctatattaaatctccctctggtgctctcttagaagacatccgtgatcgtatttagggcccacccagaaaacccatgatatccccatctttagatcctttgtttaatcaacttgccaatgaccattttccaaataaggtaatagttacagattccaggaattagggcctgctatctttgggagctgttatttggcttattaaagaagggcattgaaaatcctatttcatcctgcttcatgatgatattcaaggtgatctctcaaggacatcatcatgcataagaaccaaacataggtagatataatcatgctgtgggcatttggtggggaaaggtagagaagcaggaaggcagagtcaagagaagctgactgtagtaggattgttgcataatggacataacatttgctacctgaaacaacacacaactgcatcatgctgactggatgagagcctgcattcctgtcaaccaggacaagaccactaaagagtcctagattggccaaccaatgagtaattttctgacactaaccatttgttgtaaaatcaaacaacttttcggtgccagaactctccgtctcagaaacatttaattccatgcaaaacatttaattattttatttaaggaaaaaataaaccacacttctcattctatgagtactatgcccatgctccttagactgctgtgggatttcccatgtcctctcttgttcagaaaacttactaacttcgggaaacattcttaaatatcttcttaaaaatcaaggcccaaacaatagtttcataacttaaagatgtttaccttgttggaaagtccctaggaaatttggagtcaaggctacattctgccgctcaccagctaggtgccttcagttaagtcatgccttgctcaatcactgagatgttgctccctcccagccagttaatctctccctgatttagaataatcttttttaaaagtcttatctccatttccaaactgtgagctcttcgatggcagagaaaatgtcttgaagaaaataatggctgatttattgagccatgtgttccctccagcactcagccaagtcccgataaatcatggaaattatttctgttttacagatagggaaactgaatgtgtagagaagttagctgactgtttcaaagctgtacagatacagtcaggattcacaccctctgtaaatcaaaaattcatactcttttccccaaatcatgcttctagaacatgagagaccctggaggaaatggttgatggttgagaataaattaaaaaatggaaaatgaagcagagacatgtttgcactaaacatgaactataccacctccgggatgctagaaaccacgagttgtgtgagagagggcaagcagaggcagatagaaagagcagtggtttacacaataaagccttacaaatgaacaactctcctcaatgcccaaagcaattttcataggtggtgttttatttgattctcataagatacctgggtggcatgaagtataaggaagtgaattctcacttttagtaattgaaatgccaactgaggtgttaagtggctacagttcctaagtagtagggccaggattcaaagccagttcataaaaatccttgtgcagtgctttttccactaggcaacatagctctctccccacatggactttccttgtaggccacaaatacagcctgctcaagtgctctgaggccagcctgcttccatcagcccctaccaccaccacacatgcatgtgcgtgcactcacacacacacacacaaacacacacatacatgcagagtttgctatatttacaatgccttaggaatgaagaaacaagggtggggggcctggagaatggatatggaatctgaaaaaacaaaagaaccagacttaatgacattgtcctcacagctttctcagatgttcttgagaatttttttcccaatggcctttataaacaaactatatatgtacatatatttttgggtgtgactgatgcttatgccataagaaaagtcacagatcacccaatataagcaagatatccttgaaaagcttaaaagtcagtcctaggcaaacacctagccccctatcctgcagtgagacagtgggccagttacctgactccacgtgttaaggggaaccacagaatgactttaaggatgatggtggctatcagtacaatgtgtctaacacagatccaagcaaattatcagtattcaacatattcaattaacctaattcttatataaattgaatatatctacatatccattctttgaaaatgtaacaatttggctgcatcagttgaataactctagtaagtcccagttaggagttcattagatgtatcttttaatcattaatttattttgctatgtagggcactgtcattcacttttcaagaacaactaatattcattgagcacagtcaatgctcatgcacctattatgtgctgggcactgaatgggattttatcacggaccactgctctgggctaacaattgactttgaggattgacacactgaaaaaatgccagggcatgaagatgaatgggtttacttttaaagggccatgaaaattggctctccttgggtctggcataaagcatgtaagtgactcaaaatgcttttattaaaaagtaaattaaaggtcagaggtgaatttctcttaatttttaatttcctgtccttgtgccaagaatatggatgagaggggcaggatttgttaagtaccagatgaggatccatggtgactgggagagctataccatagggcctggccagctggaactggaggctgaagctgtgaaaaatggttccacatccctggttgggggagtatttaatattgtcaggaaaaggatactggtcgaaggggtaattttaaaaagcaagacatcacttaagcagatgaggtgtaagagtaagaaacaaatgttcagattttattaaacacaagagattgaagacaaagaagaaaattatgatatcacatcccgtttgggggttttattctattactatctgtctttgaaacaatcccatgccactaggctctcttttaagtgctctattatcacaaggaatcatgccagttagggattgaacaaaagttctgatactggctattttacaatacacagtgaattgcaaactctctgagcctcattttcctcatcttaaaatcagaatatcaacatccacctctaggatggtataagagctgtacaatggtgcatgtaagagcaccttaattaagtcttgtgcatactagagacacaacaaatgttggttttctttcttgtccttcacattattcagcaaatatactggaacaatctagtgaaacaagatggtaaaatgagagacacatgattggcatcaaatggctgaacttacatcttttatctgctatttgccattcataagtcattggcaggcagttttcctccttaaagtttaggttttttaatctttaaaaggagagtaatcaccattgctttgtgtacttcatgacattgtttaaaaaatccaatgattcaataaattaaaagatattttggaaaggaatatgtgtcatatatcacacatacatataaatatgtgcacatatgtatatatatggttttatatcggtcaagttgtacatgatataaaagacatattcaaaaatttacaaacattaaaagtagattggagagtgacatcagtaagatggccaactagaagctcctagcactctttcctccccacaaagaaaaaatacccacaaggaataagcaactatattttgaccaaaataactaaaagagagctccagagaacagcaaagaagtggcagaaatcctgtggagcattgaaacccaggatggccacatagagaaagcaaggaaacatcttgcctccagtatccccatcactcagctggaatcagctcagaaccaggagggagtccctcttgcagagaaaaagtaaataagaagatcccagcacctgccatcaccatcatgaatacctgagtcttcactagcagagactgctgcagtactcacaggctctgaacctagctgaggaagctcctcagagtccacactaagctaccctcagagaaaaagccattactgtgcccctagctcctgtgacccatgctgctactgcactctaccaccttaaaaccggagtcactgccagagtgcatcctacattaggggtgagtagctattgcactccttcatccctgaggttttgctgccactgcaatgtgcctacctggtaacaagtcacccctgagacaaactgctgctctgctctacccactaggtccaagctaccacaaagataccccatcctcttcattccagagtcactgtgccctgttggtttggggtcccgaattgcagctgagtcctgctctttggagcctaagccactgaagcacccattttttcccccgagacatgccagtgctattccctgctcaccagggacagaccacaaccacatcccaagcctctgggcctgagctactggggtgtgcctcagagcaacagatcctgtcttggtgggagaactgcatccacttggaccttgaaaagtgaacctctgcctcaagtcccagttgctacagcagtttcactgagcccaggaacctgaccccacagctgttccaagcactagtaccgtggatcccagtgttgttgcagctgcctgagggctgtgtcagacccaacatcaacagatatcccctcagctaaaactttccactgagagaaagacaagaacaaaagtattgctaaagccctggcctttataacctacacagccactgtcactgccacaaattcctgcagcctagaacatagaggcacttgtagtcattgtggacactgatcacaaaagaagctggatggagactacatcatgtactcacaaggaaccagagccactgcatcctacctacccagccatctcaagcccatctgaaggtgaaagtcttcccctacaaaagctactctttaaagtttggaagaggtgattgcaccatcagatttgagacatcaatgcagaaaaacaaaaaacaaaaaagcaagaaaacatgaaaccaccaaaggaacacaataattcttcagtaactgaccccaaagaaatgaaaatttatgaaatacatgaaaaggaattcaagaaataaaaatttatgaaatacacaaaaaggaattcaaaataatggtcttaaggaaactaagcaaaatatacaagaacacaaataaataattcaatgaaattgggaaaatcccaatggtattctttacagtagtagtggaaaacaattccaaaatttatatagaaacataagaaacttaaaatagtcaaaacaattctaagtaagaaaaacaaaactgggagcatcatatttcctgattttaaattaaatcacaaaggtataataatcaaaacagtatggtactagcgtaaaaacagacacatagaccagtggaacaaaatagagaacccagaaataaatccaaacatatacagtcaactaaattttgtaagaacctgatgattattttccatcaaccttatttttgtgttgcttaacagtctgtggaaaaacatcttaaaaccactcagtggtcattcctacccattcagtggcctgagcagtgtgagctgctgaccagtcttccatggcaggctgagcactccagtcttcagcagggaactactaaataggcacagagggcacccacgctgcacaccttcacaccagtctgcaatctcagactgagtagcagtaaactcaggagctgaagcagtctattcaatctaaaattcctacttggttacagctttttcagcagcagcctgttcttcctttttaaggtcttcaggatctctgtagaagtatagatcaagcataacccctcataggtgttcacgggaaatggtgccacacatgcaaatcattttccaggccagcatccatcacatcaaacccactaagtgagttcccttgttgttgcatgggatggcaatatccacatagtgcagaggagaatctgtgttacacaaaccaatggtaggcaggttaccataagatgcctctatgagaggatggaggtcaaccctgggctcagtaacaatcagaacccatggcttccaaaagaccatctggatctggttagtgatgttttcagtgaagcagcaagtaataggagtagcttcaatggtagcagcaaactttaacaaggcccattggctagtactcttggaggatatgacactgacatcagcagagttttcagtggcagcaaagacacaagctgctagcagaagcttctcccaggtcctcctcatatttatgatgtagatgccatgacttttcctctcattgatgtactgttccattttgaagtcaaggttgttgccacctaaatgggttcctgcagcaaaaaacttaagaacatcctcctctttcatttgtaggacatcaagggctttggacattgtgaaagtttccctttaagttatggcagaaatccacaacagcaccatttggacccctctataggtaacatggctacagtcaactaatttctgacaaaggcaccaagaggacacaatggggaaagaatagtctcttcaaataatgatgctgagaaaactatttccacatgcaaaagaatgaaattgggtgcttattttataccatgcacaaaaaccaactcaaaatggataaaaagcttaaatataaggttagaaattatagaaactcctagaagagaatatgggggaaaactcctgaatattagtcttggcaataacttcttagatattacattaaaagctcaggcaaaaaattcaaaaataaataaatggcactacatcattccaaaaaccttctgcacagcaaaggaaacaatcaacaaaaggaaatagcagcctacagatagggaaaaatatttgcaaaccatatacctaataaaggcttaatgtgcaaaatttataaagagctcatacaactcaatagcagtaaaacaaataagctgattttaaaatgggcaaaagacttaaacagacatttctcaaaagaagttaaaaaaatgtccaaaagggatacaaataggtgctcaacatcattaatcagggaaatgcaaatcaaaaccatcatgagatactacctcatattggtttgcatggctactaaaaagtcaaaagataaatgttggtgagggtgtggagaaaagggagctcttgtgtgctgttggtgaaaatgaagactggtatgattattatgaaaaccagtatggagatttctaaataaattaaaaatagaactaccatatggcccagcacacctttttctgggcaaatacccaaagaaaataaaatcactatcttataaatatatctccttcctgtgttcattgcagcattatgcaaaatagccaagatatggaaacaacctaagtgtctattgatgaatgaatggtaaagaaatagtggcatatatatatgaatattattaagccctaaaaaataacaagctcttaccatgttctacaacatggatgagcttggaggacattatactaagtaaaataagctagacacaaagagaaaaatattgcattatctcacttatatatggaatctaaaaaaattaaatatacagatacagagaacaaaatattggttaccaatggcagggaagagtataaatgggaaggaaatggggagatgtaggtcgagggtacaaagtagcagatatgtagaataaacaggtctagaaatgtaatgtataacatgagggagataaacaataaacttgcactgtatttgcaattcataccaaatgagtagattttaactgctcctgccacatgcaaaaaaagtaactgtgagatgatggatatgttaatttgcttccatatagtaaccttattactatctatatgtattccataacatgatcatgttataagccttaaatatacataataaaatttatttttaaaaaattaatgaaataaaagcagatcagtcttcatcattaccaaaggagtttggcaatggattcttggatgtgacatcaaaagcattagcagcaaaagaaaaggcagatagattagacttcttcaaaatttaaaacctttgtgtttcaagggacattaaaaagaaagtgaaaagaaaacctacagaataagagaaaatatttgcgaatgatatatctgacgaaagcctagtatccagaatatataacaaactcccacatctcaacaacaaaaagacaaacaacccaatttaaaagtggggcaaaggacttaaatagacacctcaccagtgaagatatacaaatggccaacaagcacatgaaaaaatgctcaacattgttagtcatttgggaaaagcaaatcaaaactacaatgaagttctacctcacacccactaggacgactatagtaatatttaaagcagaaaagagcaagtattggccaggacacagataaattggaactcttgtacactgctgttaggaatgtacaaaagttcagctaccatggaaaataatttggcaattcttcaagaagttaaacacaaaattgtcatatgaccccacaattccacttttagggctatactcaaaagaaataaaaacaggtatgcaaacaagtacatgtgcacataattgttaatagcagcactattcacaatagccaaaagatagaaacatttcaaatgtccatcaacagatgaaaggataaacaaatgtgtattatattcagttagccctccatatcctgggtttttcatccatggattcaaccaactatgaatcaaaactattcaaaaacattgtgtctgtactgaacatgtacataccttttttcttgtcattatttcctaaatgatatagtgtaacaatttgtatatagtatttacattgcagtaaacattataagtaatctagagataatttaaagtatatgagaggatgtgcataagtcacatgcaaatactacccggaaccaatcctggaaccaatcccccatggataccaaaggacgactgtacatgcaagtggattattattcagccatgaaacaaaccagatacaaaaggtctcatctcatctgattttatttttatgagatatccagattaggtaaatccataaagaatgaagattggtggttgtcagggcctagagggagagggaatgggaagaaagcacttaatagctaaagagttctacttgggaatgatggaaatgttttggaaccatatagaggtgataattacacaatattatggatgtactaactgccctgagttgttcactgtaaaatgggtaattttgttatatgaatttcacctgaataaattatttcaaaaatagattgataacctcattaacgttcaaggaaggtccattaaagaattgttctgtatgtaaatattttattttttaaggaaaatacagtagtcattccataaatttttaataagccagtaagtatatcagtaaatcaattaataatgctatcttgaaaaagtctattgtaaggaacacagagaagactccaagtaaattttcaagcaacataacagaatccttgcccatgatatcactgttttatataaaaccattaccaagtgaaacaaaaaattaaaactatccataaatttgccaagatagcatgtaatactatgacataatgacaagtttttccaaagtatgttacttgtttattttattttttgatttctctctctgtctctactgatgaacgttttttcttcaaattagaactagctaaatgctatttaaagaacactaaatgaaacatttgtctcagctctgaagctcagtctgctgaaaaaataagttgaaaaaacttataattaatgttgttattgctaaattataaggaataccattctaagtttgtttataattttgatatttgtttatgttgaaagtatcttgttttttattgttttaaaatgtcgaaggttatttgtatataaatattgcattgtggaaaagaatgctatttgacaattaatcaaagttggcccatgtgtgtataagtcaagatctaacctcacaggatgtaacaaaaactattctaaatgtctaaaatagaaaattttaatatgagagattggttacagaggtgatgaaagagtgagaggctgcagaagagaccatgaggcaccccagagattagcaacagcagggagttactaccacccctaggcttaaaaaacaaagacaagtacctaagcatccaggtcacctggctgaacctagaatcaccatgagtcaagggcctcagatactacccaagacacagagagaaaacccctggcttctcccttcttcctattgcaatctctccagtacattgcaacaggcaaatccagacagaagctagctggttgatgtaggagcctaaggtaagagacttcaggaaccagcccactacaatataaaagcaagtagggaagtgtacggctgaatctcagggcaaaaagatcaaggaccaacacagagggcaaaactaattaccctgtgacgggtataatattatatgaactagagacacaaaataatgtatagttagtctctgtcctcaaggatcttaccatctactttgagaaatagaccatctgatgattagcttattagtatatagttcactcctaaatattctcacagataataaaaatagcatgctataatgcactttcacatatgtaatttctgttatggagatgaagacaaagcttggtgagatgccataaacctaaaattaacataattcttgattccttcctttccatgcaatctgctcattcataccatcttatagtcctacttttctaattattcctcaagtccattcacttctttccacccaacattttttaccctgaggctaattattctctcacctgggcttactaccattgactacagataatttccaagttcacctctatcatccttcaattttcattacacagtagcaaatggtctcttgaaaaatacaactaacactgtgcaacttctttacacaaaccttttcaaattattcgtgtcacttttgagttaaagaccaaaatctttatgtaacctaaattgtgttgcaaagcctggcttccactcagcttttcaaccccatctcatgcctttgctgtctaagttccagacacactaatcttatatgtcagtttttccaaaggacaagatccctttaaacccagcaattttgcatatgcaggtccttctgcctgtaacataatccccatctctcctagccctacaccacagtccaagttaactcctattcatccttcaagatctcatctcaaacatcctttcctcagggaaagcttccctgactctctctcccccttaatgaaggcagattatttgttacaaaatctaatagccactaatactttattttacaacatttggcacatttcataagtatacatttgcctaattattggattgcctctatctctggtataagccttatgaagcagatgctatgtctcctttctattatatccctatcaccttgcatgatgcttgaaatctaggagactctcaaaaagaaaggaaggaaaaaagggagagagttgaggataaaggaaaggagaaaattgccacactttaagtgatagaattcaaaacctggagccctgactctaccacactgctgcatctcatagagcaaagaaaaagcatgaatttcataccaaatcctaaataattcaaactttctactctaaaatctggcattattatttctgcatcagccatcttgctggcccagtcaacaccccagtttgtcagttgcttgaccacttctcctccaatgaccttctttttcattcccatggtcacagtctgagccttggcatccccagtaaatgcaccacctcctaaatttcattttcaagcatctcgctttgtgatcctcacctccaacccttcctgcttactttctctagcaacttcatgcaacaattctcgatttctaagccattgacccacctcgtcaagttttcctgggcctatcattttaataattcctttacaaaagtctcaacccctttgcccctctttcacatgacaaagttccaactctggctgaatctaactgtctcctctgtgcccactcctagaggaaaattacacaattaagagtctacttcactttaacactgtaatcacaaatcttgagtcccaattgggcactcaacactgatgaacattacgaccgattacttgggtagtttacttcctacattttcaagacaaccgttttatatttttgctcttctcaagcactctgcctccttccacagtcctaacattcatttgatgcccttgcctgatttcagtgagaaaatgaagccaataaagggtagctcctcctttccccactgttaatctataacccttccttcctctggatgtttcttctcctccctccctacagttacaatctctcttccttccaaggaccagctgctcagctatgctcagtttcattctcatttctcatgaatgctagttctttgattaccctctttctattctgcattgcccgtctcttccactctgttgaatcctttccatcaacatattctcaaatattgttcaccttaaaaacttttgattccacatccccttccagctactgtcatgttctattttctttacagcaaaagttcacaaagaaaaaagtgaaatatacaagagagtatttcccctttcactcttcagtacactataataggcctccatctctactaccttgatggaacttcccttaacaagtttgtcagtggtcttctctcctgccaaatccagtgggtcctcggctgcatgttactcccagtagggtttgtcctctttggccacctcttcctcaaaagactatttcctttagggcttttatgacaccagtcctgattttcctctcattttctgagcttctgcttttaatttttctttgtattgccttacttttttgcttaatctctaaatgttgtagttcctcaggttctgtcttagtcctttgtttctttcctacctacacagcttataagtgatctcatccagccacattattttaataccatctatgattgatgactcccaaatttatttatccaacaagtcctctcccctgagttctatatctgcatatccaattgcctacttgacatcctctcttaaacatctgataagcatcagaaatttgataattacccttgaatgtttcaagatccggtgtgcgtcagagccttttttaaaacgtcctctgctcagaatgctcttcccagtcactttcatggcttgcccttcaacatctatgtgtgagctttaggtcatctcttcagaaagttcctaactatcttgtccaaagtagttctttctctactactgcagcttcctgagcattttctttctggcacctatctgtcagtattttatttgattgtttctgaattttgttaactatcagtattggctgaatgaataaattagtgaataaatcatttttccagaaattataaggctatttactgccttacacacacaaattctctgtatgtatggtaatgtacctaacacctgccctgaccggtgtttcctatacaaactaaatgccttattattaataataatgatagcaatagtaaagaccaaaaaacaaatgctactacagtcgtccctgttgtaacaaggacctgtggtagtagaacttcccacatatacccaaatccgtgcatactcaagtccagtagctggccctgtggcacccgtgtatacatgccatgaatactttccacccatgtttggttgaaaaaaagtctggtgtaagtggccccgtgcagttcaaacccatgttgttcaagggccaactgtatttatttagaattctgaagtctttttgtcagcctaggccataggaagaattgagtcatcacatctttatagtcaggttggcaacaaacgtattgttggtgatacggcttttgaaatcctgaagatggcaacaagaaaatctaaaagcctttggcctatagtgttataatgcctcaccctaacaacaagcagcctttttcctattttcccactaaaggatttcagaagtcctccctacttaggatgttagttggtcttcttattgtgtcaataacactagaaatttttcaaagattgctattgcaacaaagggaaatccacgcatgcaaaagcttcctagtttttagggctgtagtataaaaggatgagtgctcacagtcccagtcctcgctctgagcaaggaggaaatgtgtgtgccatgtgtgggtggatgttcttcacactacccccgccatcaggactgcctgtcttctgctggcaaggggttttcccctaacacattaggaaaaatttggaagccttgagccgtgcttactcacataatggaaaaaaaaaaatcctggctttgcagtcaagaagagcagggctcagatggcacagagtctactacttccagctatttcatcttctgcagctgccctctccaatatggcaacaaccagctacaggtggctatttaaatgtaaatgaattaagattacataaaattaaatattcagtttctgagttgcactggccacatttcaagtaatcaacagtctagtgtccatattggacagcacaaatagaatatttacattacctagaaaatattatcagataacaatgatctagagaaaatcactctacctatttctccaagcctcagtttcctcagcagccaaatgagatcataatgagatttcataagtaatatacagtacttggcacagagtgagccctcaataagttttcttgctttcattcatcaagtagtatgtgctgcttgagtgtagggatcacatctaattatttttatacccacgttcccttcctagtacaatacctgctcataagaggtacacaataaatatacttttaactatactacttattctttcaactcaatctctaacttaatttattctcaccaatgcctgaaatagggtttagagagtaaactgattatattatgttttatattttatataaaatagatttaatatatgagtatccatatatcatatataaaaatatatgtataattttgtgtgtatataatttagtacagatacaaagcccagtatttattgagagagggaaggaagtatggaagaaagaaaagaaggaaggaaagaagggaggaaggctagctgttaacatttactcagtgcagcatgaagtgctttgtttacattatttcatttactcctcacaaaaattttataaaatggcattgtaacccccattttactggtgaagaaatagagactcagaaattcagagcaaaaattcaagcctatatttttctaaattcaaagttcatgctcttagctattatattacagcctcccagtgatgaaggaataatagatattctttgtctactctagtagattcttgtggtaataaaatgagataatatatgtgaacacttgttgtaaactctaaatatctatgcaaggtaatccttactatttcatacttactattgtttagcacactaaccctggagccagagtacctggattagaacaccagtaaattgcttaatctctcaatgtctaacctcaaaatcagaataataatgatggaataataatattatgcatgtcccatagcactattgtgaggattacatgaactaatatatttgaaatgcttagaataatttctgacacatctttatctccatacaggtgttacgcattaatgtccctgtgttactattgctgttgcatggtaaagaagcaggaatagaaatatcttagaactggaaaatatcttgcatagaagtgaagagtctagtttctccaactttttttttcccaaagttaaaataagcaaaagagttctccattattttatataccatttaatcagaactcttatagaggccaattcatctggaaaccttcagcattttggagacaaagctctaatcagtccctagcccagagtctcaaatgaagccataggatgtatgagtcaatgagccacctagtgcagctcagccaatgaagtggaggctttgtagggtgagaggtcctagatttccacagcccagagaatggaaactgaaggttggtgtttgagccaataggccctgggcaagcaccaaacgtgcgttagaagtttctggacatatgtcatagcaatatttaggcaaaattttcccctctataatctcctcaaggtcccaaagccatgttgtcaatagtgaaaaagagaatgagaagaagagtccattgttcactctaacagtgattattatttactgttttctatcacgcgagggtgattcattgcacctggatttcagagcttttctgagaaacttaagagtttacccagacattgaggcaaggtgaggcaatgtggggagggtggagggagagaaatttgattcaatttattaccaaatgtttgtttgatggcaaaaaaaatagtctccagggatgttgactccaattgctgaaaagtcacgggcatcaaacttcagagatacacacacacttagaataaaacatctcaagtggatttttctttctttttctcctttatttgcataggcatagaggtatagagggcatctcctcagtagaatactgagaaactggcataagaatttaccagcattcctgcttcaggcaagtcaaaggaaataagtaatgtgggttcttataattgtgcctcacaaagtaggagggccttaaaatcagaatgctggtagatactgatgaaacagttctatgtcccatatagttaattaaatagtactggcagttggttaaatgagaatgacaaggataagaaattgttttaaacgaatttcgagattttacatagcattcgagaagatgtggtgttatttactgacagacaatccaaaagtaagaatatcagagaatacagcccagaaggggaaagaaggaaaaaaaataaaacaaacaaacaaaaaatcacagcttacattgagtcctgctatgtgccaagcactgaattaggcactttgtatggatccttttatttaatcttcaccaaaactggtaaggtagctaatattatcactattttacagataagaaaattgaaattcaggaatctaagtaacaaatgtaagatattatggttattaagtattaagattaaattcaaaccccagtctttactgtgttaaagcttgtgatctttctaccatatccttattgagtgccaaggatattatcatagtgaatcctcattatgtcctataatttagatattattatccccattttacaaatgaagaaactgaggttcagagatagtcaatgatttgccagtagaactaaatggagagacttcaggctttggaagcagataaatccaagattcaaatctcagttttattatgtatcaagtatgtgacttgggttattcgattctctactgtaatttaggagccttatgaggttgctccaaggatccaaaaaggcaaaacatgttaagttctcaataaatgggccgggcatggtagctcacacctgtaatctcagcactttgggaggctaaggtgggtggatcatttgagcccaggagttcaagaccagcctggaaaacatggtgaaaccctgtcttaaaaaatacaaaaaaaaattagctgtgcatggtggcatgtgcctgtggttccaggagggacctcggccttgggaggctgaggtgggaggatcacttgagcctggaaagtcaaggctacagtgagttgtgttcacacctctgcactccagcctaagttacaaaatgagattccatctcaaaaaaacaaacttcttaataaacggtagctattatttttatcatcagccatctcatatttctcatttgaaattaaactaaaaatgtttaatggcatggtagaacatctgccatatattaatagtaagtattcaaaaaatgatagctattattcttatggttaggtatcaagaatggcctttgcactgtcatctactaacccaaaaatccatgaaagaagcccctgtcccatctcgcctgcaggatttcctcaataataaaactttctgagttcactcaggtgcaacctgatctctcctccccttgactctggcaaccactggtattccacctctctcgacctccacctccccgcaggatcagggcagaataatatccttctccttcttctaagggatgtaaggcagcttaaataattaacgattgtaaggtgctttgaaaagaaaaaacaaaacaccataaatcccaagaattaattcataaaatcagtggtgggctcaacaattatatatgtcatatttgttcagctgtgagaatggtatagaacatcaaagttggaagtgtggtccaaatctctcaagaccaaggatttcctgcaactctatattgtctgtattctctgaggctaaaattttaaagttccaatctcttaaacaagacattaggaatagttgtattttattagttttctaagcctctccactcctcagatctaacctgcattgtgtttgcattttggaaggcaagtgacagagtgaatagcacacaagactttgagttagtagagctgcgttggagttctcattccatcactttctaactagttatttaacttctctgagtcattttttctccttagaaaaagaaaaaggctagtagtaatactagtaatttaggttattatagtgaattattgagataatagttatgtattcattcaccagaaatttactgagtatcttattctgtgccagacttatattatgcaataggaataaaaaaaattcttggttttaacagtcaaaacagacaagtaatctaattattgctatggtgtgagccatgaccttgtcactccaagtgtggttcaaggaccaacatcattatcgtcatctaaaagaatgttaaaaatgcagaatattggtcctatcccagacctactgaattataatctgcattttcacaaggtcctggggtattcctgtacacattaaagattgagaagcactgggctcagggcaatgctaacgtaagtacagggtactgtggggctataaacaagacaaaatatgcacatattagctggataggtgaagttggtgctcagctaaggctggctgttgggtattcagtctggggaaggaatatatgcaaaagcacagaggcatgaagcagcatggcaccttcaagacactctaaggaactcaatatttcagcatcagattgggatttctgtaatcactaaagtgctgttgatagctgtcctttatattcaaacataataattcctaaacatcacctaagtccttttctttccttctaagatgcttttagtgtgcactacatagatataaacctgcctctgaacttcaaatttacatatgtttattttgtataaattacaaatgcatttactgatagggaatctccaacagtagaaggtcagattaaaatttataatttgtggctcatttccaacatgtttgatattgttgaaagagagagtgagagagaggaagagagggaagaaagaacaaaggaaaagaaaaaaaggaaagaaaaaagaagaaaatgaggctggacgtgatggctcacgcctgtaatcccagcactttgggaggctgaggtgggcagatcacctgaggatgggagtttgagatcagcctaaccaacatggagaaaccccatctctactaaaaaatacaaaattagctgtgcatggtggcgtatgcctgtaattctagctactcgggaggctgaggcaggagaatcgcttgaacccaggaggcaggggttgcggtgagccaagatcacgccattgcactccagcctgggcaacaagagaaaactccatctcaaaaaaaaaaaaaaaaaaaaaaaaaaagatgaagaaaatgaaagacaaggcacaattctttttagattaactttccctgcattttgtgtaaaaaatgtctttcaagcttaaatattattcatgcctgagtttctgctcttcatgggcacttttatcatttgaatttaactctttttactctcttgatcttttattgacttcagttttgtcattttctacacagttttaaggatattttgcattagttcaatatatttaaatttgtccaatctcagatatggctcacaaaacctttataatcttcacttgcctagttttctaggcttactcaatttccccatgactaggctggaaataaaaatatctttctttcctagagaatgccaattactctgttacattcagtccttttgaaatactttttcctctgcctagagctcctttatcctcaggaaaatcctcactctttagtaggaatagttgctatggatactatctatttaggacctattataggtactcagcaatttttattaacttttttaattactgggaatgcaacaatattaagtgcaccttaatctttgtctcaggcacagttgttgttgttgttgttgttgttgttttgtttttgtttttgtttttttggggaaacccaaactatgacatttccaatttgcaaaacacattcacatcaatattatcattttaacttcaagctatctgaggttgtatatatcaattatattcaaccctactcttaagtactcatttattattaaacgattttaaatattcattctttcaagatatttattgagcagctactatgtcccaggctataatctgtcactctgctctctttgacactttgatgatgtctgagattatttgttgccttttacagccacaggctcctagatttcattgacctttatgagaatctcatccagcctttgacccaacacagagagcccacccagagctcctcagcatggtgttaagcagaggtcagcttctgcttaaacacttttaattaaggaggaatcacttcctcacaatgctgttctttagaatatacttgatcatatgaaactgaaattttcttcatgtatctacacccaccagttctagttccactctctgttccttcacaaaatgcctgctgtcacttccaaataagttctaagaattacagcatgtcagtaataaaggaaacttgaggatcatctcccacacttaattcctcatttcaaaaataagaatagtgaagtgacttgtcaatgacaaactcacttgagtgaaatgcctgcaattaaaacttctctaattctaggccaatgctctttctataagagcatgcagcctctcatttaccttgattgatttgctcaatgtgccagctagccacctctgcacactttgtgtctctgtgtgtgtgtgcttgcatgtgttcttcctgttcttttcaccaatgattcttagctttgactagacttgttaaataaagatttataactttaatggctttatatgcctgataaaatgcttgattgttttcaataaaagttgctaaattattaaattatttttaatggaagaccaactaatcattcattcgacaaaaatatactcagtccatactatgtgtcaggcattagtattgctattcatcacgaaactgatggtctctgctccagagaagctcacaacaatcaatttgaggaaatacatacctagaggttaggagtgtggactccagtgtcagatggactcggagagaatcacagctctcccacttattcattatagaatcttggacatgttaacttcagtagatctctattttataagtagtaaaatgaggttatgtaacatagtgttaatctcagtgtattctaatgatgattaatgactcaataaattgtagccatatttatatggtacctagtaactacccaagaagttacagtcattattatagttattataactaataaacattctgttaatttaacaaatggttattatatttcctctgacagactatgatatatggttgacaagggtatgagctgttcatattcctttcaaggaaggacttgaccagctatgaagagtgtgatgaacacacagcctccagctgccagcaacatctgggactgtgagttagctagaaggagcggctttgcccaaggtcacacccttccttagagcagcccatgtatgacgactaagcaaagcaagggtgtaaagctccagtcatctaagcctaagtcagatcaactctcattaataatatctactgcagcactccctctgcctgatcttgcttcctcacagatgttgtcaatctctagtaaacacatcccatcacaaactttatctccatctcttcttcagagaacccaacttttgacagtaccgtgcgataaccaagaaggtggctctggatcctctgtgcccaactctgaattctgacctccactccctgggctctctcaaatgtgtcacttagtcatatgttgccttggtttcttcacctataaaatggaaatgacattaatctgtaccccataaagttgtgaagatcaagtgaattaatccatattaaacacttaaaagagtgcctgggatcattaagcattcaggaaatgttaggtgttattatttccaacattacagcatgctaggccctgcgccacaccctgggaacacagagtaaaatcaggtatggcccttgcccatgaaggagtaagtaccatgggaaatgtgtgtgtcaatgagaaagagatgctatgattgtagagagagttatgttatttgaaattccgaaatcaggatacaaaatcctcctgatgttaggacacatatgggaagagctagccagggactacttcataaagaaggtgactcccatgtaactgcacaaagattgagcagaggtttgaaatgagattagagtcaggccatgatagtcaacctacctcatcttctaccctcaataatggtagacactaataacaacccacattactgtcccaacgacacgtgaaggatttctacttccattctctttcggtcagctttttgtttgtttgtttgtttttgaggcagagtctcactctgtcgcccaggcttgagtgcagtggctctatcttggctcattgcaagctccgcctcccaggttcaggccattctcctgcttcagcctcccaactagctgggactataggcgcccgccgcggcactcggctaattttttgtatttttaggagagacggggtttcaccgtcttagccaggatgatctcgatctcctgacctcatgatccgcccgccttggcctcccaaagtgctgggattacaggcctgagccactgcgcccggctcagtcagcttcttaacatccacttaaaggcaatgctctaaaagcccaacgatagtgtaactccaaagtcaggtgaaacccagccaccaagtttgcccccacaaaaagcaaaacaaaaaagtgttaagtcaattggattactgagtttcactcaggaaatacaagagttatttcacctgaattaatcacaaggcttattgcatcctgaggacgacagacaagagtttctctcattcacaagcttcactgacaaggacagctaaaaaatgaatgtatatagcatcagtctctctgagctctttttttccctcataaattttatttataacataaataagacaaagtttgttacttgtgcctataacccactcagagagaggagagtgatttttacatttgatgaccatctacttgacttatgtactttattaaaacaagcaatgtgagcatattttccaaatattcatgggaaattatgggaactgtaagttacattaaacatcaacttgcttagtattgaccctattgcataaaaacaaatgatatgctcaactttaagtgtgcctctgtttaaagaattgaatgaggaaggaaaatatgaggaaggaagaaaatatgttcattctatcctcactacaacttccatgaaatagagaaattactattctcattttacataggagaagtatgaggctcataggcaacagaggaggataaatgagcaatggtcaacaaaagcatggccaaaacaaacacatttttttaaaaagtgctcttctatgatagccatgtagtcatgttgtaatggaagagttcaggccttggaacccaaaagaccaaagttcaaattgtaggtctgccgtctattgtatgtatgaccttgggcatatttttgaacttatttttgcttcaatcacctcagctgtaaaatggcacagtaacacctatctcttgaatttgttgtgagaattaaatgagatgtagtattcagtggatgttcaataatgattagtccttttctgcttactcaccatattccatggttctttcactctacttgcaagtgaaggttttctagggtctatatcaaatctagatccccatgttaactcaagcattagggagaagaatgaatcagtcagatacatagtccaaccatcccagagccctaactctgccttcctgcccactctgataccacacaaaaaccataactttgttcattactaacagcttccttattctaactcagtctgtgtcaaaatctggagtttctagaatcttggcagtggtgagatcttcttacacattagcacagggcttttccaacacttctacataatactcattccacagagtattcactagtcaataccaaatataatatgtccattttaaagtgacccaatgtccatctgcatattaagtgaaccaagaacacctgcagcagagcacatccttaattttgttctgtctaccatttccaggtactgactatagttcccttttgcagaagacctaaaaatattttgtgggaccaatgcactgcaaaacacaagttcagtggtgtggccttcatagtaacaactaggacatggagatggcttctaatctacctagactcttgctaaaactgtaagttctagaatgctggtggttgtagggcactaaccatcatgtaatccaactctttcatattacccacaggtaatgtgaggctgagagatggtaagttactttcccaaaatcagccagtaagttggtgggcaatgtccgatttcaaccccatcccctgaaccccatgtcaatattctctgtgcaagcacagtaccttttctattttcagattaggctactgattgaagtaagaggatttgcctagtgtgttcattcattgattctttcattcatttacaaatactcattgagcacttcttgtgtgaaagaaaatatactaagtgttaaagacaaaaaagctcttatctctccctttcaggagtccatattgtagtgcaaattaaggtacacaaatatcaaatagacaacacaatcttgctttgctctcagggaggtatgtacaacaaagtaggaaaatggggaaggaaaaggagacctcctagaagagaaagattctagaagaaaaaggaaggcatctaccatgtgaataaggtctggggtggaggattgatgaagacatcctggaaagatcaggactgtgtgaaggcacaaagtcttgggacagaatggggagcttggagattttccaatatgccttgcttcagggcaactgagtgcagagaggaaggtttatggtgctcttaaactttgtgatctgccacttcccttcctatctttatttactataattcacccatttactcatcatttattcggcaaatgctgattcatatttagtatgggttctggacatgtgggataaatccacaggtcgttttcaataaaacctgcccccaaatctctactcttctcttctacacacacacacacacacacacacacacacacacagaggcacacacacgcacacacacacacacaaattttcttgttcttggtttactgagcacagtagaggacagttaactatcctgagtataagagtgtctccaccaattaaaactctccatggcctgataaaactctccattggcttttaaaatgacctgccatcctggctccaggcagttctcacagttcataactccccgcagctgcctgctctttcctgggacctttccagggtaataactgctattttcctactccatgaatgtgagagtgagttcagtccctatccacagtgcccactggatactgcagtataccagaggcatttaaaggcagtcagtatacccgcctttaagtctcaaaggcaggtcatctactaaggaattgggcctgaggtgtaagaagctaaggcttcctacatttaaagaaatcacatctatcttgagacaatagctcttcatttttctcataagaatttcctttgggaagacaaaatatgatgttccagcaaagcactgagcttgaaaataaaaaaaaaaattaaccctgacattgaataacttatcttttacctttccgaagctctatttacagtatcagtaaaacggatatagtagtatctactccatagggttattagtagttaaagaaggtagcatgggtaaagtacctgatacatgacaggtggtcagcgactattctagatcttactttggtttcaaccgtgcactgtatactttctgagaaattgtgaggtctcaagtttccaaaggcaaccgaggacaaaattctccaaaagaaaatgtaataattggcttctttgactatttccttgaaatagtaactaattaatgtacctgacagctagatgttacactttttgtggctcaaattacaaatggtctttacttatggaaaattccacttttaattcctaacttattaatgaagccaaaatggatttttgtggttatccgtttgaaagttccactttgtacaaatagccatgtgtccctgggttggtaaattaaactatttgactcttaattttctcaattttatcaagtattaacaataattacaaatgtcatagaaatatcatgaagaattaatgagataaatgtccataaagcacaatctttctctatattatttttctagcaattaaaaatgaaaaaataaaaaccatcactgcctaccatcagttggataatgttcagaaaaaacaacaaaagaaagaaaaagaagaagaaaacaaacataaaaagttagctgtaaaataaagaaacattcattatgaatttattactccaactactgtaaactgtgtaggaatctgagctgcaaagctacccattaaactgtctgctctttcctgtttaaacaaggcccctcttgggtcgtggctgcctgagccttcgtgggtctgcatccaggaaggaagacgtttctacggtaaccgctgaggccttctctggaggttctctgggagaggccagagtctggtgcaagtgacaaaccccagttcccttgataatgtacagaaaggtagcagccatgatgtccaggcatgagcagaatgagagcattcaggcgtgaaatctctttcaattggtcgtttgtttccccgatggagaattcactttgtgccactcttttgaaaaatggctgatctaggcttactggtgtataaataataaatgttccagaaggaaagatattgtgatttgggaaggggggggtcattagcctcccgtcataatttggttcaagtttttagaaagcttgaagttgcaagaaaccataaagagttgcccaatagcctcattttataaattgataaataattcataggaagaggagagggggtggagaagataagctgaagtcatagattgaggtggttgatatgaaaacatatcctaagctcctgattaataaggcttgaattgtaaaatctggctgttacaatagaatgtggaaagtgctatgatggagggttggacaaaaagcagtgagaacattaaagaggagtgtttgaggccaccagttacgaagaagagagagagctgagctgagaatcaagaatgagtaaacgttgctatcatttattagcattacaatgtgttaaacactttatatgcattgtctcatttaatcttcacaacaccttctcagataagtagaataccactacccattggttttttttgtttataagacagagaaataggtgtagagagatgagtcactttccacacagctaggagacggcaaggtcaggattcaaacccaagacagtttgattcctaagcccatgctctttattgactattggtctgctgccttccataaaatgtgcaagagcttcgtatgtggggtgaagttgggaacagtgttctgggcagaaaaaaacagcacaggcaaatgcacagctatacaatgtatgctgtctccatctatcaatgcttagtggccttcctaatctcccatagcctaatctgtgggagacaagcctcggcactccttctgaatcctaagaacctggctctgtccagagagagacaatgtgcagcttgcccagtgataaaatccctcacacatttggtggcctggaccaactacatcctccatggaacctggagtagtaaaatccatgatgaaccattctttcttttacagctcacttttacagtctctgggtttctggagcctttaatcatttggatctcttttcattctgaacacttagagtataaagaatttaagtctcagcttctttccacagagacatgttggtcattggtgcatatagccaaagtggttccagttcagtaaacagtctttcatgacaaatccatggttggagttggtggaaaatttgcctgcttattaggaggctacaacagttccaaacagagtgaaaaatgaagaagatcatctagatgccaaggcccagttggctatgtatgggtaaaaactatctgggttacagcagtcatagttgaatgcttgttctacaggcaacgtgttacatatagtatgtcataacttcactaccatttctctttaccattgtacagagacaaaactgaatttcagatcagaaaagttacattgctttcctatcataccaagaataagtggtcaagccagaattcctacccagactctctgatcctcaaacctccattctttccccatcacctcaaaactgtcaatccaatggtcagttagaattaccataatttgggaggcggaggttgcagtgagccaagatcatgccactgcactccagcctgacaacagagcgagaatccatcaaaaaaaaaaaaaaaaaaaaagaattaccttatttttgccaccattttgtcttgtgttccacaaaagcctattgttttttgttttgcccacattttggcaggcagcatggggcagtggcaagtaccttctgtgccacaggccctatgctagttctacagaattcagagattcctttgttctataggttagtcagtcaatgaatatgttcaaggaccaactatgtgcaaggtgctgatgccaaaggggtgagcgaaaaccagagactgaccttcgtgagagaccctcacacagtaatgagttttaaccattagtgggtaaaatgggtggtggagaggggtgctggtattttcattgaagtcaaagaaagtttcctgaagaagtattaactaggcaactgtgggagataagctggggaaaaataggagagaaagacagaagtaaagcaggtaactaatcatagagtatggttcagtggcatgatagggtaaaacactgcaatggaagaagagagaaagggcggcttacctagcctgagggtggaaggtggtcagagaacactttctagaagaagaatatttgagcggacaacagagggatgcaaaagaatttgatggatgaaggattgactagtgcacagagaagaaattaaacatgcaaagatccagagatgagagagaacatgatatgtttgggaaactgcaagcacttgtatgtgttatggggactagggggtaaaggaaagaccaagacaaagtgggaatgttaaagggagtggaattggtaataaaaaataatactactgaggaacattattctgatgacaaaccctcatgtaggtcagagtggaagatttgttctgatgtgactacgttgtcacagaagggaagagaagtgaaaaggagagggaaaaggcgctaatatttgttgaaaatatctgggtgccagatattttcaggtagaactccattctacagaggaagaaactatggtaccagaaggtgaaggaatctgtctgaggtcacacatctagtaagcagtgtgccagcatccaaactctattctttctgcctgatttctggaatcatcttgtgcctctatttccaaggactttctagtcccaccagaagtaaataatcaagactggcaaacaataattgcattaatccagactcttatctgtaaatgacaagagctcaacttcttgttgaggttcaggaaaaaatgaagaggtcaaagggagagcttatggtagatatgtcagaattgaccaatataatgaaggaaatcttgagcactcaggcataagaaaggcaggaatccacctggccctcaggaacgatgcctgctaagaccctctgcccttcttgtctaactctctgcccatggactctttcttgttccatgtggtgggagcttggttgccctcagttctggagccttatgcttcacagctacagagagacccattctctcctttgggcttgaaatccaagggaaaacctctgattagctcagtgtgggtcacgtgtttacccatcactgcatcagctatgagtaggaacacaagctactggggggctcaccccatccgtgcatattgagggtcagtctccaaaattctttgtgagtcaaaagccactccagagggtatccacttaattaataacagtagtcaccatttgtgggagattacaaatgccccagaccctgaactgagaaagcgtgttagttctatcactgcctcatttgattttctcaacaagcacgagaggtagtgctcatctccagttcatagatacggaaactgagactcataaaacccaattaatttgctcaaggtcccacagtaagtaagtggtagatgcagatgtaaatcctggacactgattccaaagccttgtgcttaattcccatacttaactattctctacttcctgtgactgccgccttaggcctcagcctccatgagaagcaaagtaacagtggctataacctggaagtcctgggatctacctctgacactggtaagctgtgtggccttggacaagacccctaatctctctgtgcattggtgtttttggttttttgttttgttttgttttgtttttgagatggagtctcgctctgtcgcccaggctggagtgcagtggtgcaatctcggtacactgcaacctccacctcccgggttcaagcaattctcctgtctcagtctcccgaacatgccaccatacccagctaatttttgtatttttagtagaaagggggtttcgccatgttgtccaggctggtctcaaactcctgaccttaggtgatccacctacctcagcctcccaaagtgtgtgcatcagttttactgtgtgcaaagtgagaaaaataccttctgccttgtctacttttctgataatgagattaagacaagtaaaagtgctttaagaaaaactccatgcaaaacaaaggtgagctattattattttctctcatataattctagcgtgccatgattttgagactttctatatttaaataaaatctgtcctttgaaataatatgtttggaagagccaataaggcagacagacaaatactttaggctatttttttagaactcagattgacagaatttaactgaggaaacaggaacagagttaatttatcctggattccagtattgggctcttcttggttttttaaaacagacataaacattgttcttctgaattcattttgtgctgacaccacctggtctctgcttattttttcatttcacccagttcagtgatactgaattataattggtttatgctgaactttctcatgctgtgaagtactgattaacaaagaaaataaagtttttctttcatttggccaagttctaccctactgccatgtctcagatagcactttttaaagaaattaaggttctgtggaataatctccatccttaggaaataactgcaagggtcatgaaaagtctctgtcagccaacattttgtttatagcccatcagctacaaatttgcccaaactaggaactgtggcatcgtctttctaaaccacacatgcaatcaggcagtagaccgggtgatggacttccttggaatgtctccagcctgtgtcttcgtctccatcaatatgtcatagccttagcccaggcctccaggagagtttaaacagcctcttaacagtccttcacctccatactgttttcaggatgattatcttaaaacactgatataaccatgtcagccatgcttataaaatctctgtggctgctatctgctagacaatagagtcccagttacttactggtactctctgtaatttagcttctgcatatccttctaatatgacattgccactttcacccatcttaccaccaggatccatcctcctctatcatcataaccatgatactaacatcatagccaaattttagggaggaccctctacatacctcctacataaaagtttttcacaagttctcagaaacttcctatgagatatttttacctttattatactgagattcagaaagttaagaaacctgttcaggatcacagagctgaccacaaaggtgacagagttaagacccaaacccaggtctatttgactcccaaactttgctctgccacatggacattctgaaatcctggtagtttcctgaatgagccgtgctctttttacttcaccattgtcttggcaagtgcttttctctgcttttaataccctgccccttcttagacagctgcctaactgctcctttcccaaggatttggctcctatgtcacctcctttgtgaacattccatgacatcataagcaaaactgcactctgtgtgtgtgtgtgtgtgtgtgtgtgtgtgtgtgtgtgtgtgcgcgcactcagggaatagaattgagtacatactctgggaaagtgagttgcttggtttgctggtacaaatgggacatgcaggggaatcatggggaactaggttgggaaagtagcttgggctggatcatggaggctgctggtctaccagcggctcctgaggcaaggaggtgtttccaagacaaaatcttgccacagggtctaagaaggaggaggacaaggagaataacagcagagagatttgaagaaagctattgcaatcagccaggtgggagataatgagatactgaataggactcaccatcaagagaatggaggagaagggccagacttagtgactgagtgtcagagtaggtgagtgaaaaggagaatctgcccataagaataccaagactgtgaacttgagtgccagagagtggacatgttctcaaagacagagaaagagcaggtttaagggtaaagacaagtgataggttaagatatgttaagacattaatgggacttctaaaggcctttcttggacaacgtagatgggccactgttggaactgccattttagaagtcatccacatagatataagagcagaagccagaagaaagtataatacaggggaaatcatcaagagagaggaggacagggctaaggagagctccttagagatacatttggagaaaagaatcaggaagaaataaagaaaaggtatgaaaggaagctaatgatgtgttgtgctgtgttaccttgagaagttacttaacttctctgggcctccatttaaatgttaaattgcaatactaattactatcttgcagaatgatgaaaggattggagataagttatgtgaaacaaccagcacctggcttagtattcagcaggatttcagtaaaccgtcaccttaatgattagtagtggtatatttgttggtgaaagatgctcaggatcacagacctcgaatgggggcagtcctgagccatgtggtgggaatactgggttatctgttgggattactggcttcatttattttagcaaacataaaaggaagaccagaaggtcaaattccactgccattagtgtctagaagactagtccaaaagagcagaagagtctatcaggtgctggtcaaagccaaactatgttttcctgcagactagatgccatcaaaccagaatctgtgctcagcccagcatctggaaaagctcagaagaaggaaaagtccacaggagaggtggctgggaccaagttacataggacaggctagagcagggagataagaggtcattcaccagctctgtactctaggtactccaggaattcagcctcttctagcagagaaagcccaggacctgcagaaagatggttagagagaaagttttatcaggtggtatgtaaaaagagcaccagctttttgagccagaaaaacctgtattcaaactttagtgatgtcactcatgggactttttgtgttaggggggaaatcgcttactctcagcctgtttctccatatgaaaatgggacaaacaataatttttttctttacatgtttttttgagaattaaataagatatgcaaaatgcttgaatcatccacgtagatatcaatacatggtggttttgtttccttttgtagggccaattacacaccaaagcccactcagttataaagatcttcatggtcttagctatttttcccagaccacgaatgcctgagagagagaactacagtctgtgagatacaaaaaaaattggccaaagcgggtaggtatttgagaaaattgggagtcaggctccaaagtggctgttagcccagaagatggtctgttctctcacttaatatcacgaaggctcgcctattgcatttgtgagcattaaattgaaggcagttagttataggagagatgctcctcatgggcaccagcagttaggacccaaaagagacaataataatggctgccatttattgactactgctttaaatatattacctctacatatggtagacaacacgatcatctttttacagaaaggacaactgtgactcagagagattaagtgatttttctcaaagtcgcccagctcacatacagcacagcagaattgatacccaagttggatctgtagcctgcactccttttaaatctcttgctatcttcctgtaggtaggacaatgaatgagacatgccatggtggcggaaagtcttcaccttggggtgaaactcaaagtaattgtagatggagagattgaggaagaaatagaactagaccgggaggcaggaaactgaatgggttttggtatttctcttacctaagcctcctcgtctataaaatggggttaataacccacaccctgccaactatctggagtttcggggtggatcaagtgggattttatatctgaaaccactttgcaaattaagtcccatataaatatgttattaattggtatattaattaaattattaaatctcagttataataatgaaacttagaaattactgttaattagcattaatcaaaatgtatgttggtggtaattatactaattaaaattcttgataataatgataattagcactgatactgagaagtggtctgccaagcatggactagcgtgaaactgtagagtaaacatcccaaatgaaagttggccgaaagatacagaagcaagctaatgaacctagctgaaactgaacaagagaaacacattagccttgctttcctggtctgagagttctgctgtgctgaggtgaaaaagattaataaataccaaaaccacccattattgtacaagcacatgagttgcaattgtccttgtggttgtctgtttatgtatctctctgtgtagtaacactttgctagtaagtttcagcatattgaactgttcctgattccacgaccgtgccattctctaacatgccacctgcccatcacactgcccatggctcctgacaaacccaagatccttcatgtcctaatccatgtaaactatcttcaatgaagcctttccagacttttcctgagaaactaggaatcctcttctttgtgttcctgttcaccttctacaagattttactatcaaacttactatctcagctctatcacatacaagttgtgtgtaagaagttccttacttaaaatacgtttatgcttcagttgtctcatctataaaatgaggatactagcagtgcaggccttatacaattgtcttgataattcaatcagatatgtaagactttcagaacaggattagacatacagcattcaattaatgttaactattactattattattgttgttgttgttgtcctaaggatgtgtctccatatctattgctctgccaggctgtgagctcctccattttgtgttcttatgatttttgcttatgtctttcatgttattaaaatggaaatggatagaggattttctcaggagactttataggcaagaataaaggcaaggtagtggaaaaattgttgaccgtgaaatcagaagatttggtttaatcttgcctcttctagttgcttagtcactggctttgtgcaagtcactttttcttataggactcagtttcctcatctagaaaaacggaagtgatgacccctagcctaccttcctgacaggctccattgtgaggttggaatgaagacacagatgtgaaaccgcgttgtaaactgaaaggcactaatcaaatataagatacttttattattatttgaaccatctggaagttgtttggacttacaaattgatagaatcagtcaacacttacttgatttacacagagagttgttgttatgcttgggtatttttttaagcccttaacactatgcacattgcaagcctttcctcatattcacccccaatttggtaattttcaagtttttgtttccaaagattgaatgatgataggagttaaaagtagagcccaggttgaaactttactaaagatgttcagtttctattttccttaacaaagtttttagagccccagctaatagctagttattaaatgcagctcagttcatagggtttcttgatgtgctgggaagcctcagaggttgctgtgagataacagagtttagattaagatggccagtaaatttgggaaagagaaaggaaaatataaatggcaagaacactgaattaggagttaaaattcctaaactcttatcttgtcctacagccctgtaggttggatgtatcccctatctgggccttatttttctcatccgtaaaatgtagataacatccttccatttcattagcctttactgcacaccaaatcaccccaaatcttagtaacttgaaatatcaggagtttatgtcttacagttctgtgttggttgggcggttctggtgattttgcctgggcccattcatggagcagcacttaactggtgggtcatttgagatctaggctcaagggacacagctaagattctgagcatctatatttgtatagtgtcttctatactcaaggagtgagactgggcctttttacatgacagtgatgttccaagagggggaaaccagaaaatatatagtctcttgtaccatagcctcacacagtatcaattcttccatattctattggtcaaaacaagttacacagccagcccagaatcaaggacaaggaaaagagaatccaccccaaccgtttgatgggaggaaggcaaaatcaaactgcaaaaaggaacatggtcacagagaaacatgattctctggagggccattttgtagcagcctaatacacatctgtcctaccttaagggttatttacaagcagataagctaatatgtttaaagtcactttgtagaatatatgagaatataaaggaaaaaaattccagacaagtgatagaattagaatattaccattttgcagcccacaatgaattaaggctttaagcatcaatggctgctaacatcacgaaaaacaagtagagattatgtacctactgaggaggaacacagtgccacctataaagttgtcttgttaaaataaaaaaattaaacctgaatctgatcaaacctctagttacaactagtaattttcaggaactacagaaaacagaagaacatgttaaactgtaccacagaggtacaatcagcaaaacccagaatggcaaacactacaggcaaacaacctgttttgtttttttttccaacaaataaattacaaaaggaagaaaacaagttggagaagaaacatatacattaaaattacgatgtggggaacttactggatcctgattcaaatgaactatttaaaaaattatgacattctgagaccactataaatttttagatgtcctgcatccttgatgatattaaagaatcattgctaatgttagacataaaatggtattatgagtatatatttttacataccccttatcttttagtgtacgtattgaaatatttacctgtgtaattatattacagctgagatttattagtatgaagtggcagtaagtagatgggggtatagatagagaaagagtgcccaggagctggtaactattaaagccacatgatgaatatgtgggaattcattatacaattttagctgctttggtatgtttgaaattctccataataagtttttatttttcaaaaaagagtgaaataccaaactaatttttaggaactacagaagacagaagaacattttaactgtaccacagaggtataatcagtgaaatccagactgggaaacactacaggaaaacaacctattatgagaaaactacagaccaatatctttcatgaatatagatgtataagtcctcaacaaaatattagcaaatggaatacaacaatgtataaaaagagttatacactgtaaccacgtgagatttttcttccccaggaatgcaagcctgattcaacattcaaaattcaattaatattggccaggcatggtgactcatgcctgtaatcccaacacattgggaagctgagggaggaggattacctgagcccaaatcaacctgcacaacaaagtgagacccagtatctacaaaaaatctttttaattagctaggtgtggtggtatgtgcctgtagtcctagctactcaggggacggaggcaggagggtcacttgagcagaggaggtcaaggctgcagtgatttatgattgagccactgcactccatattgggtgacaaagtgagaccgtgtctcaaaaaaaaaaaaaattaatgtaatcatcacatcaacaggcccaatagaaaaattacttgaccaaatcaatagatgcagaaaagcatttgataaaacccaatacccattcatgacaaaaactctcagtaagctaggaatagagaagaacctcctcaacttgataaataatatctattaaaataaactatagctaatatcatacttaatagtgagaatgtagaaatttttccactaagatcagaaatgaggcaagaatgtcccctctcaccactccttttaacatcataatgagagccctagctaatgcaataagacaagaaaaggaaataaaaggcagattggatggaagaaataaaactggttttgttggcagataacataattgtctatataaaaaacctgaaagaactggcaaaataaaccggaactaataaaaaattataacaagtttgcaggatacaaggttgatatgcaaaagccaattgctttcctatagaccagcaatgaacaagtggaatttgaaattaaaaacacaataccactttcattagcactcctaaaaatgaaatacttaggtataaatctaatgaaatgtggattttatagctttcctcatataaattaattgtaacaaatgtaccactataatgacagatgttgataatgggggaggctatgcatgtgttggttcagggactatatgggaaatctttgcactctcctctcaattttgctatgaacctaaaacttctctaaaaaattgtcttcacaatattttttttattttttgtagaggcaggatcttactatgttgcccaggctggtcttgaattcctggcttcaagcaatcctcccaactcatcctcccaaagtgctacgattacaggtgtgagccacagtgcccagccaagagaaagggttttttaattgttctcaccacaaagaaatgataaatatttgaggtcatggatctattaattagcctgattggattataccacagtgtatacacgtaatgaaacatcacatagtgtcccataaatatatgcaattattatttgtctttttttttttttttgagacggagtctcgctctgttgcctgggctggagtacagtggtatgatctcagctcactgcaacctccacctcctgggttcaagcgattctcctgcctcagcctcctgagtagctgggattacaggcacccgtcactatgcccagctaattttttgtatttttagtggagacggggtttcaccatgttggccaggctagtctcaaactcctcacctcatgatttgcctgccttggcctcccaaagtgctgagattacaggtgtgagccaccacgcccagcctacaattattatttgtcaattaaaaatattcaaaggccaaggttaaccatttggtcttatagttgcatgaaatgaaattgtgctaactggtgccagcaccaaaaggccaggtgttcactgtgtatccacaacatctagcacaacacaatggtcatggtagctgctttacctttctggctaacttctctctagaatgtctgtttctcttgaactcttcttgctcctgatcaccctgtcataataagctctttgcagttctcaatacataccatgtacttgtcagcttcaggcctttgcatgtgctttttcctttaggactcactttggagaatgccctccaccccaacccccactgcattatgacgggccactttttttttattgtacttcaagttttagggtacatgtgcgcaacgtgcaggttagttacatatgtatacatgtgccatgttggtgtgctgcacccagtaactcatcatttaacattaggtatatctccaaatgctatccctcccccgtctccccaccccacaacaagccccagtgtgtgatgttccccttcctgtgtccaggtgttctcattgttcaattcccacctatgagtgagaacatgcggtgtttggttttttgtccttgcgatagtttgctgagaatgatggcttccagcttcatccatgtccctacaaaggacatgaactcatcattttttatggctgcatagtattccatggtgtatatgtgccacattttcttaatccagtctatcattgttggacatttgggttggttccaagtctttgctattgtgaataatgccacaagaaacatacgtgtgcaggtgtctttagagaagcatgatttataatcctttggatatatacccagtaatgggattgctgagtcaaatggtatttctagttctagatccctaaggaatcgccacactgacttccacaatggttgaactagtttacagtcccaccaacagtgtaaaagtgttcctatttctccacatcctctccagcacctgttttttcctgacttttgaatgattgccattctaactggtgtgagatggtatctcatggtggttttgatttgcatttctctgatggccagtgattatgagcattttttcatgtgtcttttggctgcataaatgtcttcttttgagaagtgtctgttcatatccttcgcccacttgttgatggggttgtttgttcttttcttgtaaatttgttggagttcattgtagattctagatattagccctttgtcagataagtagattgcaaaaattttctcccattctgtaggttgcctgttcactctgatggtagtttcttttgctgtgcagaagctctttagtttaattagatcccatttgtcaattttggcttttgttgccattgcttttggtgtttgagacatgaagtccttgcccatgcctatgtcctgaatggtattgcctaggttttcttctagggtttttatggttttatgtctaacatttaagtctttaatccatcttgaattaatttttgtataaggtgtaaggaagggatc

SEQ ID NO: 60003 - DNA, 478 bp, Homo Sapiens
tttaaatgtatttgaagtgtgtaacaggaaataaatttgttcttcaaatactagaatactagaacaagaggttaaatcttaacacttgaaagggggtttaaggaataggaaaagatgaacggccctatcagtgaaagagaactgggctggggaaaaagaccagttgtatgttgcaacctctgaaaagctgaaggatgtttctaagccttagtaactgtctgtaaaaggaggccggagttctagcttttagcagtctatgattactacataaatcatttctacaaactaaataggtaggattttagaatgagaaaatgtatgcaaggattctgggctctgaaaaaaagagaaaatgtaggaaagatgactaattgtcccaatatacctctttatctctctctctctcttttttttttttgtgatagagtcttgaaacaagacaaaacaaaacaaaaaactgctacttgtgttttggtgt

SEQ ID NO: 60004 - DNA, 521 bp, Homo Sapiens
  misc_feature (416)..(416): n is a, c, g, or t
  misc_feature (441)..(441): n is a, c, g, or t
  misc_feature (462)..(462): n is a, c, g, or t
  misc_feature (485)..(485): n is a, c, g, or t
tttttttttaacaattctaggtttggtggaattaaaaagagctttgcccagtctgagctgtaaaagacctcatggcggaggagtgctccgggcctggaggcggaatctctgctgtgagctcaggctgtgcatgggtgatccctgggcatgacacctcaggtctctcagccttcaggtcctcatcactcaaagaagggaactgttcagccctgaaatcatcagatttgggactctagggatttcaggaatcaggattcctccaagattgaaaccatatcagtgtatatacatgatccccagaggaaatatggccaagagggaaaaaaggccaatcccaaaagggtcacacacggtatgggctccatttattttaacttacatggaaatgacaaggtttttaggaaatgaggattggntccagtgggtttttcaggggttctnggttgggtaggggctttggangggattggtccttaaaggccacngggggggtcccttgagggcagaatttcccgttttcc

SEQ ID NO: 60005 - DNA, 612 bp, Homo Sapiens
aaataacatcaggccaattatgagcaccaactggcacacaaattggctctatctatgaagggtattcatttcccttcacaattcagaatttatctactgtgatcaaagagatattgacaactaaattaagatgaactttttttcaattatttgatactaaaaggtaggcttctacatatcagcataagaaaatctgttaagtaattcaaattatagctcatattttaaaggtactatgaaggaaaatagataaataaaaaaagacaaagaccaatgttacactctgataatatgaagagaggctttcataattgcttctattttaatcaaatagtattcaaatatgcttggtagtctgttcaaattttaagaagacaaaggaagccaactttgtgcgtgtttttaacagcatttcatacaatatgattggtgtagcaccacactggattgagttacctaatttgtaagtacaagtaagccttaaaaagaaatacagccttgattttcaaaaatctataatcctgtaagatactgtcccccttcacaattaccacctaataaaaggcagctgaatacccttccctgagtcatgcaataaattaatgaattgta

SEQ ID NO: 60006 - DNA, 660 bp, Homo Sapiens
ctgaaaaaaatggataaagaaggtaaaacattaaaaaaacataaattgaagcataaagagagggaaaaagaaaagcataaaaaagaaattgaaggtgaaaaggaaaaatacaaaactaaggatagtgccaaagaactgcagaggagtgtggaatttgatagagaattttgggaaagagaatttttttaaaagtgatgaaactgaagatctctttttaaatatggaacatgaatccttaacattagaaaaaaaatcaaaattggaaaaaaacatcaaagatgataaatcaaccaaggaaaagcatgtgtcaaaagagaggaactttaaagaggaacgagacaagattaaaaaggaaagcgagaatttacttctttggggtatgagtgccattgaggaatctatagggcttcatttagtggaaaaggaaatagacattgaaaaacaagaaaagcatataaaggaaagtaaagaaaaacctgagaagcgatctcaaattaaagaaaaggacattgagaagatggaaagaaaaacctttgacaaaggacaagcttatattcgcatcacacagacaaaatggccatacaagaagggtgagaaggagcaaaaatactgctgcttattaaaaaaacctgacggacagagagaaaagtaggagaaagg

SEQ ID NO: 60007 - DNA, 202 bp, Homo Sapiens
tttagaggtatggatttatatctttttttctgagatgtttctgatacctacttttctaaaaatctctaattatgtccagtggttttttaagctctagcatgagtcccttcctcataaggttcttgtcacttctatgtcaccaactagctcttctttattggaaacaattaagttcagaacaggaatgctcttttgtgctttc

SEQ ID NO: 60008 - DNA, 328 bp, Homo Sapiens
cagtctgccctgactcagcctcgctcagtgtccggatctcctggacagtcagtcaccatctcctgcaccggaaccagcagtgatgttggtggttataactatgtctcctggtaccaacagcacccaggcaaagcccccacactcatgatttatgatgtcattaagcggccctcaggggtccctgatcgcttctctggctccaaatctggcaacacggcctccctgaccatctctgggctccaggctgaggatgaggctgattattattgcagctcaaatgcaggcagtttttatgtcttcggaactgggaccaaggtcaccgtcctag

SEQ ID NO: 60009 - DNA, 715 bp, Homo Sapiens
  misc_feature (376)..(376): n is a, c, g, or t
cggcttggcatctgcctcggtggacttactacctctagaaggaaatacctgagttcctctggcctcagctcctagagtgactggtgtgctgtccctgttactcttctgtcaaggtgacaactgtgtgacccatcatctgtgtgtcaaagcaaggccctgcctgggcctctgctcctgtgctgaccccaaaggcaaatgctttgctagtttccttccagttaatttcacctatgaatagatgtgtgttcagtggcatctttctctaacccccagcctcccttcccacagaggccaccgtcatggccagttgctgcagtttctttccagagaacctgtgtatgtgtaaagctgtacaggcgtgggtacaccacacagnctgtcttgcactgtggactgttgagttactagtacatctaggtaagcaccgcatatctgtattcatgtctgccttggccttttaacatctgtgtggtagccgtgtttgaatacccattccctttttgggaacccattagttgttcagcaatttttactgtagataaggctataccgatatctgtgtcatgggttttatgacatgggcagatatctgggagagaaagttcctcagaagaatctgggcacacatgtgtaattctaatatgatgacacccagtttcacctaagaggtggcccatgacttcccaacttaccagctggcctaaactgtttggca

SEQ ID NO: 60010 - DNA, 639 bp, Homo Sapiens
gagggagacggtgcgcctggagctggtgcttaaggaccccaccgacgagagctgcgtggagttcagttacccggagctgctgctgtgcggagaacaacggaagaagctcattcacacagaagacccatttaatgatgaacatcaggagaggcaagaggtggaaatgttggctaagaagtttgaaatgaaatatggtgggaaaccccgtaaacaccggaaggatcggctacaagatttaattgatataggctttggctatgatgagacagatccatttattgataactcagaggcttatgatgaattagttcccgcttctctaacaacaaaatatggaggcttttatatcaacactggcactctacagtttcgccaagcttcagatactgaagaagatgatattacagacaaccaaaagcacaagccacccaaggtccccaaaataaaagaagatgatattgagatgaagaagcggaagcggaaagaggaaggggaaaaggagaagaagccaaggaaaaaagttcccaaacaactgggagttgtggctctaaattcacacaagtctgaaaataataaataaaaccttttgccgaattcttggccctgaagggccaaattgcctaatagtgagtcgtatta

SEQ ID NO: 60011 - DNA, 1174 bp, Homo Sapiens
aacttatttggcagctgctgcctcacccacagcttttgatatctaggaggactcttctctcccaaactacctgtcaccatggcccaccgatttccagccctcacccaggagcagaagaaggacagccagggaaagctgttcagaaacatcctcaaggaaaaggggatcgtggtgggaatcaagttagaccaaggaggtgctcctcttgcaggaacaaacaaagaaaccaccattcaagggcttgatggcctctcagagcgctgtgctcagtacaagaaagatggtgttgactttgggaagtggtgtgctgtgctgaggattgccgaccagtgtccatccagcctcgctatccaggaaaacgccaacgccctggctcgctacgccagcatctgtcagcagaatggactggtacctattgttgaaccagaggtaattcctgatggagaccatgacctggaacactgccagtatgttactgagaaggtcctggctgctgtctacaaggccctgaatgaccatcatgtttacctggagggcaccctgctaaagcccaacatggtgactgctggacatgcctgcaccaagaagtatactccagaacaagtagctatggccaccgtaacagctctccaccgtactgttcctgcagctgttcctggcatctgctttttgtctggtggcatgagtgaagaggatgccactctcaacctcaatgctatacctactagggtccaatgcccgccagcctagctccagtgcttctagtaggagggctgaaagggagcaacttttcctctaatcctggaaattcgacacaattagatttgaactgctggaaatacaacacatgttaaatcttaagtacaagggggagaaaataaatcagttattgaaacataaaaatgaataccaaggacctgatcaaatttcacacagcagtttccttgcaacactttcagctccccatgctccagaatacccacccaagaaaataataggctttaaaacaatatcggctcctcatccaaagaacaactgctgattgaaacacctcattagctgagtgtagagaagtgcatcttatgaaacagtcttagcagtggtaggttgggaaggagatagctgcaaccaaaaaagaaataaatattctataaaccttcaaaaaaaaaaaaaa

SEQ ID NO: 60012 - DNA, 1469 bp, Homo Sapiens
ttttttttttttttttttttttttttagcaacacttttcttgtttgtaaacgcgagtgaccagaaagtgtgaatgcggagtaggaatatttttcgtgttctcttttatctgcttgccttttttagagagtagcagtggttcctatttcggaaaaggacgttctaattcaaagctctctcccaatatatttacacgaatacgcatttagaaagggaggcagcttttgaggttgcaatcctactgagaaggatggaagaaggagccaggcaccgaaacaacaccgaaaagaaacacccaggtgggggcgagtcggacgccagccccgaggctggttccggagggggcggagtaggccctgaagaaagagatcggattggtcagtgcctgtggtatcatcgtagggaacatcatcggctctggaatctttgtctcgccaaagggagtgctggagaatgctggttctgtgggccttgctctcatcgtctggattgtgacgggcttcatcacagttgtgggagccctctgctatgctgaactcggggtcaccatccccaaatctggaggtgactactcctatgtcaaggacatcttcggaggactggctgggttcctgaggctgtggattgctgtgctggtgatctaccccaccaaccaggctgtcatcgccctcaccttctccaactacgtgctgcagccgctcttccccacctgcttccccccagagtctggccttcggctcctggctgccatctgcttattgctcctcacatgggtcaactgttccagtgtgcggtgggccacccgggttcaagacatcttcacagctgggaagctcctggccttggccctgattatcatcatggggattgtacagatatgcaaaggagagtacttctggctggagccaaagaatgcatttgagaatttccaggaacctgacatcggcctcgtcgcactggctttccttcagggctcctttgcctatggaggctggaactttctgaattacgtgactgaggagcttgttgatccctacaagaaccttcccagagccatcttcatctccatcccactggtcacatttgtgtatgtctttgccaatgtcgcttatgtcactgcaatgtcccccaggagctgctggcatccaacgccgtcgctgtgacttttggagagaagctcctaggagtcatggcctggatcatgcccatttctgttgccctgtccacatttggaggagttaatgggtctctcttcacctcctctcggctgttcttcgctggagcccgagagggccaccttcccagtgtgttggccatgatccacgtgaagcgctgcaccccaatcccagccctgctcttcacatgcatctccaccctgctgatgctggtcaccagcgacatgtacacactcatcaactacgtgggcttcatcaactacccctcgtgccgaattcttggcctcgagggcca

SEQ ID NO: 60013 - DNA, 2045 bp, Homo Sapiens
ggggacctttagaattttgatagcaatttctttgaatctgtagattactttgtgtagtattgccatcttaacaatattaaatcttccagccaggcgccagtggctcaagcctgtaatctcagcattttgggaagccaaggtaggcagatcacttgagcacaggagtttgagacccccccgagcaacatggcgaagcctgtctctacaaaaaataaaaaatcagccaggtgtggtggtgcacgcctgttgtcccagtgctccagcctggctgacagaggcagaccttgtctcaaaaaaaaccaaaactaatattaagtcttccaatccatgaacaaggatatattttcatttatttagatcttttaaaatgtgtttcagcagtgtttttgttcatttgtgtgtttgtttttagttttctatatacaaatttcttcctgggtattttattctttttgatgctcttaaagggaattttctcaattttctttttggattgttcattgggtatgatgttagctgtgggtatttcatgaataccttgctttacatatttttaatgcagtgttttttggtgtgtaagattttgactcctgtatcttctgggtggattaaaatttgtattataaatgatattaaatgtatctgactctgaggctttttcttaatgtgcattttcttcttatatcttgcccagctaatttttgtatttttggtagagacagggtttcaccatgttggccaggatgtcttgatctcttgacctcgtgatctgcctgcctcagcctcccaaagtgctgggattacaggcgtgagccaccatgcctggcagcctcccttgtatttctaacagcttttgctgtctatattttttaattaaggtgaaattcttgtaacaaaaagctaaccatttaaaaatatacaattcaacagcatttactacattcaaaatgttcacaaatacctcctctatgtggttccaaaacatttcattttgaaactacaaaataggatccattaagctgcccctccctattctccgctccactatctcctggcaaccaccaatttccttcctgtctctgaatttacccgttctggatatttcgtataaatggcatcatagaatgtgtgaccttttgtgtcaggcttttttcacttagcataatgttttacaggttcatctatattgtagcatgtgtcagtagttcattcatttgtggctgagtaatattctgttatatgtatttaccacattttgcttagccattcatctgttgatgatatacatataacagaatattactgtggattgattccaccttttggctattgtaaatagcactccttcaacatttgtgtacaagtatttgttggagtacctgtttttaattctttaggggtgtatatttaggagtggaatttctgagtcatcttgtaattctatgtgtaactttggaggaatttccaaactgttttctgcaatggctgcaccattttacattcctgtcagcaatgtacaggattccagtttctccatatccctgccaacacttggtattttcctttttttcagttagttactctagtgggtatgtggtggttgtcccattgctgtttgttttgattttcattgtccctaatgactaatgatattgagcatctaatatccagttgtcccagcaacatttgtttgaagagactattctttcctgtgtaaatggtcttggcatctttgttgaaaatcgattggcagccaggtgcagtagctcacacctgtaatcccagcactttgggaggctgcgctgggcagatcgcttaagctcaggagtttgagtccagcctgggcaacgtggcaaaaccatgtctctactaaaaatacacaaattagccaggcatgatggcacgtgcctgtagtcccagctacttgggggactgaggccggaggatcacttgagcctgggaggcagcggttgcagtgagccaagattgcaccattgcactccagcatgggcgaacacagtgagaccctgtctccaaaaaaaaaa

SEQ ID NO: 60014 - DNA, 8134 bp, Homo Sapiens
  misc_feature (5453)..(5453): n is a, c, g, or t
  misc_feature (5767)..(5767): n is a, c, g, or t
  misc_feature (5776)..(5776): n is a, c, g, or t
  misc_feature (5835)..(5835): n is a, c, g, or t
  misc_feature (5869)..(5869): n is a, c, g, or t
gggattccgggccgggccggcctgggcgcaatcaatgcggctttgtctgggacgcccacatcccagaggccattcccgggtcggcaaatcggagcgcggcggggcgcgcgggggtgagataagcggccatgtgatcccacctgggctggaaggggaggggcgccaggtgaggcggcggccggtggggcgcgggcggccacgcggggctcctgcagcatggctgtcagcaggaaggactggtccgcgctgtccaggtgagcgccggagggagccgggagagatggaggttgccatgttgctcaagctggtctcaaactcctgagctcaggcaatccgcgtgtctcagcctcctaaagtgctaggatcataggcatgagcgaccgcgcctggccgatgtacatagttcttaatgagacctttcactggtcttcaagatcccagtgtgtatttcacacagcatgccttggttcacaccagccacgtttcaagcacttctgagctgctagtagccagtgcaggcctagagggcatttggtctcttctcccagccctagaggagcctgcctcgggagggtcctgggtttccccagctgtgctgaccctctcctcccctcccccagccttgcccggcagaggactctggaggatgaggaggaacaggagcgcgagcgcaggcggcggcaccgcaacctgagctccaccacggacgatgaggctcccaggctcagccagaatggagaccggcaggcctctgcttctgagaggtaggtgctcaggtttctatcctgatggatggggatggactggttgcctcagactaagtgcagcatattcagtctgctcaggggagttggggcccaggaaatgaggctgaagggtgtgatgatgaatttccagttccccaccttccccagactcagtcctgccagcttccatcctcttcataacaatgcttgctactatttgtagaccatccatgagccaatactgtgctggacattttatggccatagctcacgtaatccacacaatgtccctggagagagaggtattgttaacccattttacaggtggagtaacagggttgaaaagtacttaggtgacttgctgagtcacgtacctcaagatggcagggccagaatgtccatccagatctgtcaagctcccgcctccttccattatccaggctgccttcttctaaccctgaacctctataatttacttcgttttttttttttttttttgagacgaagtctcgctgtgtcgctaggctggagtgcagtggcgcgatctcagctcactgcaagctccgcctcctaggttcaagcaattcttctgcctcagcctcctgagtagctgggactacaggcacccaccaccacagccagctaatttttgtatttttagtagaaatggggttttaccatgttggccaggatggtctcgatctgttgacctcatgatccacctgccttggcctcccaaagtgctgggaatacaggcatgagccaccgtgcccagctgccttttttttttttgagatggagtcttgctctgtcaccccagctggagtgcagtggcgcaatcttggctcatgcaacctccgcctcccaggttcaagtattttgcctcagcctcccgagtagctgagattaaaggcacctgccaccatgcccggataatttttgtatttttaggagagatggggtttcaccatgttgggcaggctgatcttgaactcctgacctcaggtgatccaccagcctcaacttcccagtgctgggattacaggtgtgagccgctgcaccggcctataatttacttctgaggagaagaaccttggggctagttttgccatctagattttgggattatgaggtgggggaagagcctggggtttactgaatgccacctacatgccaggactgtcctgggcaccctcatgagtctcattttgcttcctaacaagcccagtttgtagatgtgaaaactgaggctccgacagtaagttaacttgcctgaaagcacatggagagcagggtgatgaggaaggaaaataatctccttttgctggagccaggtgctgtgggttatggacaatcctctcatgttacttttgtttctttgggtcccccagaagggagaacaggctgtgatgaccctctcctctcctgtcctcccctcccccagccttgcccggcagcagactctggaggatgtccagagctgggctgcaccagtacctgtggctgtcacctagtcttggctgcacccacaagactgacaggagtgtggaatggtgcatcggaagacttaggttctgctcccagctcccccacgaatcagctgtgtgaccttgacaaaatccctggacatctctagtcttgatctaagatctaaggggcagagactgtgcttattccttttgatgccccaatgccccaagcaggctctggcacatattaaaacagttattcagagtctgttgactacgtctgaacatggagtcgttggacttcataggaatttataagctttttaaaaagcatagtgtgctttgctcagatgataccttggaagtgcaatatatcgagtggataaaggtggtggtgagccggggatccagggcctgacatcctcacctcctccttggtggccctggcagcatctccattgggttaggtatacttagggtatcttccacctctatcctctgattctgtctcccatcttctgattcagactaccgagcgtggaagaagcagaggtgcccaagccactgcccccagcctccaaagatgaggacgaggacatccagagcatcctcagaacacggcaggagcggaggcagaggcggcaggtggtggaggctgcacaggcccccatccaggagaggctggaggcagaggaggggaggaacagcttgagccctgtgcaggccacacagaaacccctagtctccaagaaggaactggaaatcccacctcgccggagactgagtcgggaacagcggggcccctggcccctggaggaggagagcttggtgggcagggagccagaagagaggaagaaaggggttccagaaaagtccccagtcttggagaagtcctccatgccaaagaagacggcacctgaaaagagcctggtctccgataaaacctccatctctgagaaggtgctggcctcagagaagacatctctatcagagaagatagcagtgtcagagaaaagaaacagctcagagaagaagtctgttctagaaaaaaccagtgtctctgagaagtcgctggccccagggatggcactgggctcaggaaggaggctggtgtctgagaaagcttccatctttgagaaggcactggcctcagagaagagcccaactgcagatgctaagccggccccaaagagggccacagcctcagagcagcccctggcgcaggagccgccagcctctgggggaagcccagccaccaccaaggagcagagaggaagggccctccctgggaagaacctgccctctttggcaaagcagggggcttcagaccctccgactgtggcctcccgcctcccacccgtcacactccaggttggcagtgtcccgtccctcccacccttctactctgccacctggctggaactgccggccagtcccacccaggtagtccctggttccctgggtgcctccatcctcctacctgcaggctggccttggaagtctcttctttccctgcctgcttctagccatggtcagagcagggaggctgagatggggcaggctgctggagcttaaagggggcccagctgtggggcagggagcatctggtgccccccaccatatcctcatccagggcctgggctccaggaccccggcagactagtggggagcctcagatccttctagaagctcccctggaaagctctgcctggtgccctggccccaagggactttgtctgtgagccactcccacagcagatgaaggaggcaggagagaaggcacagggctgtctcattctcccctcttcctgcagctcctggggtgagccatggggtttatggctgccccggcttgatgggccctagacctcttatgtgacactccccctgctccatccaggtgaaaatccccagcaaggaggaagaggcagatatgtcctcacccacacagcgaacctacagcagctccctcaaacgctccagccccaggaccatctcctttcgggtgagagccctgggcaccctggtctgcgagccactggagggcaagtggaggaagcccgcatccattacaacataggagccgtaggttaggtaggaaggtcccctggatagagaggagcttttgattcccatgggtggccctgaacaaacaaggttgtattcagcagaggagaacaggttagtaacctggggggtaggtgccagtaagcatgagcagccccacctagtgggcaaggcagggtgtatgaagaccggacaggcagggctggccctggtttgcagggaggtccacacctgcttcatcagttcctggctcacctaggagattgtctaggaggggaggggaggaacagagagcagcaaggctctcctactgctccctgccctgccactctcccaatagtacaaactatgtggattggggaaatctcgtcttgctttgtcctggtgtttattcttggttcttctgttcactgggtcattcactcaatcattgggtatcatgcctctaatgtgtgccaggccctggagaggtggcccaatagcgactggtgcccccacagagctcatgggtagtgggaggcagataggaaacaggtggttacaggtgccctgcgaaggaagtctgaagaaagtcttctgacccatattagtgggtgggaacctgtgtcttccagatacaaacaaggatctttaacgaaggcttgtccacatatttctttggtggggttgacccctggtagaaggggtgggaggtctgaagaggaggaggacatgtcttgagagctgggctcctcactcgagggggccaccgatttcccggggactcccacacaacaatgcctttccttctcatttcagatgaaacccaagaaagaaaactcggaaacaaccctaactcgcaggtggggggcctggaggctctggttctttctatttggccatgtccaggctattttctgagtacctgcacccgccctcctgtgccaggctgtggggtagggcacatgaggggaaggtgcagtccttgcccagggctccagatctggcagggggatgggattaacaggatgaactcaggcgggataagatggaacaaggatggggaaggatcagggagagctgctcagaggaggcagggcttgggtggggctccaaagggggatgagggtttagccttgaggttaggacagggcaaagggggctttctgggagggagaccacgaacagtgtnagggaggggaagcccctgctccagcaggcctggttggggggctatgccagactgtgggggagggaaggggaggcccagatcactagagccttgtatgctgtgccaaggcctatggggtctgagctggaaggacaggatcagatttgaggtaggagcagccatgtggagagctcacggtggcaggctgggagagcaggtaagtggcgattgctgtgatggggaagacggaaaggaaggacctgctttgggaggtgttttgcagtggaaatgacaaggtatgggggagaagggatgtcctattgaatgggacgttncttggaagnggagggaaatccctggcgtctgtaagttcctcatgttggccaagtcaacacagcctgcngtgtgatggagggccacattctcttggccacaangagaacgtgtgatggggctgctcctcaggccctgggggcaggcctggtctgccctgggtgtctcacttggctcgcctgttccatcttccatcctgcagtgccagcatgaagctcccagacaacacagtgaagttgggagagaagctggagagataccacacggccatacgggtgggtgggggcttctcctgaggggcggagggtgcaggatgagtagtgggcatggccctttcccctccccagcatgggtcagctgttggtgttcttggttcccagagatcagaatctgtcaagtctcggggtctgccttgcactgagttattcgtggctcctgtgggtgtagccagcaagcgccacctctttgagaaggaactggcgggccagagccgagcagaaccagcctccagccggaaggtgaggggctcaggccccacagggtccttagggtgattagccctgacgtctccaaaacccaaatcttggctgtggcaatgctagaaaactgtcctcatgtgtcaattaatgttggcagaactccatttgagttcccattcacgttcctgagcccatctccttagctgggcacacagctccctgggggaaggggagggggctgtcccaggtatatgtggcatgtgctggatgcataggggagtgagggagagtcctatcccattccagggcctctgaacatgcctcgctgctgcaagggcctaaaccctgagatggaaagttctctttttaggagaacttgaggctctcaggggttgtgacatcaaggctcaacctgtggatcagcaggacccaggaatctggagatcaggacccccaggtatcctcaccctccctgatgtctcttactgtggagcctttgtggtgggatgactggggacagaggagggacagtcggtagaggaggagtcatttcgggagaggaggagtcatttcgggagaggaggagtcatttcaggagtggaggcagtcgggaatagatgggtgtgtgggtcagactctggcagagaggaggggtggtctggttccttttctctttcgggaagagaaaggacatcctgggctgggagctgggcctggggtatcccgagccctttggagcctggtcttagactctggcctccaccctgataccctcaatcaggaggcacagaaagcatcatctgcaaccgagaggactcagtggggacagaaatctgactcctcgctggacgctgaggtgaatggtggggaggagcctggccctacgggggaggccccggtgtactgtgggagaccccatcgtcgccgtgtgcacacactaattggcctgcaatcgcgcagtccacccagaacgcccccatgccctgctcatgcagattggtctgagccaaccgtgagaacaaggttgagccctcacctggttgtgctgcctgcagctctgcagagcccctccctcttcagctggcagattacagggctctgactccttgtgggtgtggggcttgggcaaagggatgccttcctatccagtggcccccttccccttccatgccctgacaccccattgacttgtgctaacagctcttttccccacaggtgtgacaagccccgccaagacagacctgcaagtcttcgtctcaagggacctccctcatgccaggcccctgcctctcacagcagcaccctttcctctcattgtccctgttcccttgttggctgtggatctgtttggccagggtccctggggtcaggaatatttgcaagactcagccagctccttcccagcccagcctcttggggctgggactttctcaccctgcggcaggcacaacagatgctgggacccagtctctgcccaggtcacagcacaagtgcacatcagcactatggggcctatgtcctgcccagagacctctgctccttcctgctcacatccacagtcagggcacggcgcccctcaagaactccagagtcacctgtctcatcggctcccaacaagtgcctctttgtctatgatgtcccccttctctgaggcctggacccacccatctttgtccctgggggctgctcccagccactgaggcccgctctggccaggggagaaggagctgccgtgcgtcttccctgtgccccgtctccctgcttggttctcccctcccttccctggccggctgccatggccaggagctaagtgcctttttgtgtgcaaccacttaccctttctctgaaaaacctgttctcaggaaggatctgataaactcatttactctc

SEQ ID NO: 60015 - DNA, 453 bp, Homo Sapiens
  misc_feature (326)..(326): n is a, c, g, or t
tgtgaatagtaattataattaaccctttctaaaagaaaaggtatatgtaatagtacataatagagtaacaattgtaactcaagtctttttttttcctttttactcaaagcataaaccagacacaatacgttataccagattaacatgcaacttaaaaagaggttaatgtacatactaagcatggaaattcaccagtaaaatcttatttgtcattttacccccactaccttgacattattcttccatttcataatcaacaaggttctacttctggtcacctgataaatgccttgcattcctggagcttgacatttcagtcaattatnggacacaagaacaatgttacaagcataaagaaaaaatgcatctacgaaacagctggactgcactgctttcaatggaaaggtccccactccaacctgcccactccctcccttttctcagcacaaacat

SEQ ID NO: 60016 - DNA, 1807 bp, Homo Sapiens
ttcaagatgcttgtaaatgatatcaaccgtttatttagtccacccctgaagaactgagggtcctgggaactgaaccatatcaatgcaatcttttctacattattaactgaagaaaaatgggtactttttaaactttttttttttaagattaggaaacaaaaagaagtcagaaggagccaaatctggactgtaaggtgcatacctaatggtttcccatcaaaactcttacaaaatttctcttttttgatgagaggaatgagtagaggcattgtggtgcagaagtctctagtgaagctttcccaggcatttttctgccgaagctttggctaactttctcaaaacactcataataagcacgttatcattctttgttccttcagaaagtcaacaagcaaaatgtcttgagcatcccagaaaactgtttccatgatctttgctcttcatctgtctgcttttgctttgactgaatcacttctgcctcttggtggccattgccttaattgtgctttactatcttcaggattatactggaaagaatgctttagtatcttggtcctacttgttgaaaatttctattgaaagctctgcttttgcagctgatcgggatgcagtggttttggtacccatcgagtggaaagtttactcaactttaattcttcagtcaaaattgttcaggctgaaccagttgagaggcctatagtgttggcaattgtttctgctgttaatcattggtcctcttcagttaggttacaaacaaaatgaatttttttcctcgtaaattgatgtggaagatctgctgctgcaggcttcgtcttcaacatagtcttgtcccttcttaaaacaagttacccatttgtaaactgctgctttctttgaggcattcttctcataaacttttcaaaaagcatcagtgattccacaattcttccactcaagcttcaccatcaatttgatgtttgttcttgcttcagttttagcagaattcctgttgctctggtaaaggctgttttcaaactgatgtcttatccttcttagtgtttcaaactaggttctgttcagacatgttataacagcttagtacatgtttattttggtgcaaaaagttttgaaacctatgtatagttttttcttaatactcatttttcataaactttttaaagaccccttgtatatgagatgtccactcacaaaagtgttcagttgcctgactatagtgaggaataattactaagtcaaaagaaaatatcagtaatggtagttatcctttctgtgacatgtgattataaactaagcttcagttcatcagtaactaccaagtattgtgttttggtttgggctataatgttgtcatctacaaaaagattaaaagctattaaaagaatattggaaaacagaaaaactcattggttaccatcagagtttgctagggcatcagattcttactctgaagattgataaaggagagaatataatatttatcctgcccttcttgttatgaactgtattttaggcagccaagtaactgagggaaaattcttaggaaaatttccagctaataggtgcaaaagaaatgatagacttttaaaaaataaaagtttgaaagtcttaatgaagtagtgaatctagacagcagtatttcttggatgtgaaaaccattagatgataggttaatgggaaattttataatgtagaaatctgatcaaacccactgattgaagatgagacagtcaattattgtgtacctcctggtttgatgcaagagacagtacacaacagtagtaatagcaccaataaagaactcttgtcc

SEQ ID NO: 60017 - DNA, 2123 bp, Homo Sapiens
gtctttctgctgatacagctcagttgttactttagctctggaagctgtggaaaggtgctagtgtggcccacagaatacagccattggataaatatgaagacaatcctggaagagcttgttcagaggggtcatgaggtgactgtgttgacatcttcggcttctactcttgtcaatgccagtaaatcatctgctattaaattagaagtttatcctacatctttaactaaaaattatttggaagattctcttctgaaaattctcgatagatggatatatggtgtttcaaaaaatacattttggtcatatttttcacaattacaagaattgtgttgggcatattatgactacagtaacaagctctgtaaagatgcagttttgaataagaaacttatgatgaaactacaagagtcaagatttgatgtcattcctggagatcctgttttcccctgtggtgagctactgtcagagctacttaacataccctttgtctacaggtctcgcatctctcgtggctacacaattgagaagaatggtggaggatttctgttccctccttcctatgtacctgttgttatgtcagaattaattgatcaaatgattttcatggagaggataaaaaatatgatacatatgctttattttgacttttggtttcaaatttatgatctgaagaagtgggaccagttttatagtgaagttctaggaagacccactacattatttgagacaatggggaaagctgaaatgtggctcattcgaacctattgggattttgaatttcctcgcccattcttaccaaatgttgattttgttggaggacttcactgtaaaccagccaaacccctgcctaaggaattggaagagtttgtgcagagctctggagaaaatggtattgtggtgttttctctggggtcgatgatcagtaacatgtcagaagaaagtgccaacatgattgcatcagcccttgcccagatcccacaaaaggttctatggagatttgatggcaagaagccaaatactttaggttccaatactcgactgtacaagtggttaccccagaatgaccttcttggtcatcccaaaaccaaagcttttataactcatggtggaaccaatggcatctatgaggcgatctaccatgggatccctatggtgggcattcccttgtttgcggatcaagatgataacattgctcacatgaaagccaagggagcagccctcagtgtggacatcaggaccatgtcaagtagagatttgctcaatgcattgaagtcagtcattaatgacccagtctataaagagaatgctatgaaattatcaagaattcatcatgaccaaccaatgaagcccctggatcgagcagtcttctggattgagtttgtcatgcgccacaaaggagccaagcaccttcgagtcgcagctcacaacctcacctggatccagtaccactctttggatgtgatagcattcctgctggcctgggtggcaactgtgatatttatcatcacaaaattttgcctgttttgtttccgaaagcttgccaaaaaaggaaagaagaagaaaagagattagttatatcaaaagcctgaagtggaatgactgaaagatgggactcctcctttatttcagcatggagggtttaaatggaggatctccttttcctgtgacaaaacatctttcacaacttaccttgttaagacaattttaaaaaagatcttttcacaacttaccttgttaagacaaaatttattttccaggctatttaatacgtactttagctggaattattctatgtcaatgatttttaagctatgaaaatacaatgggggaaggatagccatttggagatataacctaatgttaagtgacgagttactggatgcagcacccgaacatggcacatgtatacatatgtagctaacccttcgttgtgcacatgtaccctaaaacttaaagtataatttaaaaaaagcaaaaaaaaaatacaactcttttttttttaaaccaggaaggaaaatgtgaacatggaacaacttctagtattggatctgaaaataaagtgtcatccaagccataaaaaaaaaagaaaagaaaaataaaaataatataaaaccttaaaaaaa

SEQ ID NO: 60018 - DNA, 577 bp, Homo Sapiens
gctctttcaatatttttatatttttaaatgaaacttaatgtcattttggcatatgaaggggtgtgcgtgcgtgcgtgtgtgtgtgtgtgtgtgtttatgcatactcaggaggaagccttctcagggtcactgtttccggaaactgaccttgaaaacagacctgcatttaaatatcacagatgtactttgacgaatgaggaagtaagagacatagaatggtaactaaattcatcagggtattatatattgagcaactgattcttctgggaaaggttgcacccagtttctttttgaggaaacacctctcttcccccactgtcaggccatgttctctatagagttctggtctcctgagtcatgttaatcaataaattctcatttttgtttaagccagtttggattcgatttcccatcactctccactaggaaatttttactgattcaggatagttagccagctaggaagagccagctctgcagcccactgtgggtgacagcgcctaggtcaggagatcttagcaagcctgcagataggggcagcagagggaagctggggcaagtggcttcattcataaag

SEQ ID NO: 60019 - DNA, 2827 bp, Homo Sapiens
cggaagtcacgggaaggactcagcaacaaggtatctgtgaaggtgtgttcgggggtcttcaggagtccgtgtcatcccagcatgagagaaaggatcagggagggcagagactctgcagacctgaagctgggcttgcttatgacctccctcccacccaccagccccgtgccctgcgtgtcctgtagggtcttgttaggggcactatgctggccagcacagggatgggtgcgtcctacaaggaaccaggtagacccctgcacacttccgcaggtgcacatgtggcttctaaagaatatggttaggtttgcaaatgaagcacagagactaggttctcagaagcagcgaaggtgcagagaagctatggctcaggcttccttcagtgttcctgccttaaagccaaggggaagtggctagatgtgggggtgcatatgggctctctggctgtgacagatccccttggggacaacttcagtcagctttagtcctataatcggattgcctgacacctgcggtgggggttgcctggagaaaaagaaggtatctcctgaaagggactctgagcgccaggggccagggcgttggcggctctgcattaggaacgcatctgaggaccagctggactcagcctgtagcatgagaaaaacacacatctaagcagtgtttttgtgtttgtgggtaggaagaaaaagacccacccaaattagtgtgacatgaaacttttgagtgcagtgaaaatgtggtctgttttgattgatgcccaggcaagtcagtttctgcaaatctttcaacaataattgtagccctggaatgaaaggaatacaccttaaagtagctcatttcagttaatgcttgtttgctgtttccatttcagcttctcaatcccaactacatttatgacggtgagttctgttctttttcttctagtcctagagatgattctagacctgtggggcatgtttcagagcacttgagtgtggcctctggaaatgagttttccgtggcgctctaggcgtgcatagcaggttaggtcctatcaatctgtcggggacatgtgggtgggtgtggaggaggagccagggctgatgggcctttaccgactcctttcccatgcagttcccccagaattcgtcattccattgagtgaggtcacgtgtgagacaggggagaccgttgttcttagatgtcgagtctgtggccgccccaaagcctcaattacctggaagggccctgaacacaacaccttgaacaacgatggtcactacagcatctcctacagtgacctgggaaaggccacgctgaagattgtgggcgtgaccacggaagatgacggcatctacacgtgcatcgctgtcaatgacatgggttcagcctcatcatcggccagcctgagggtcctaggtaagcaccgtgcaacgaggattctacgtgacccagtggggcacgtctttcaggagtctccttaagtcctgagtctgcccttacactccaagtggcctgaaagatagaacaataagtcatttgtggggcttcaaaagacagttgtaagtagcagaccagagtgtctgggatgtcacaggagagtgacctctcggcaccttatgtaaagtcgggggagacaccggagctcctgttgctgggaggaggatgggggcctgcctggtgaaggcctctggctgcccaccatggggcaccagggccccccacgaccagcttctgagttggagcagggtgctttccgtgctcctagtactcaaaacactcatatccagctacccagctgaatctggatctggtctaggttggtctcatgtagaatgtgcatgggaaaagcaggaaaggagatgtgggtgagtcccgggcctgcgcaggccctgtgcctgtctgagaccctaacagcaacccttctgggtgaatgcacgccctcctcaccccatccaggaggagccaggcccagggcggctcagtagcttgtccagagcatctggctaggaggcatctgccatggggcctgcttgctccagtgtgaagagcttgttctttctcatcagctaaaccacaagctccctggggcagaaccaatatcttaggctctttcaaaacgtcctgtagttgcctgatgtagatagctgctgagaaaggtgtggactgttctctgctgccatcttgcagaaggccggccatgcagtactgggctgcaccacaaatggaggtgcctccagaggacaaataaaactccaaatgaaagataaattgagtcctggagcaccccgtctgtagacaataagcagaatttgtcttagaacttttgtcccagatatcttaatttcctgtttttaacaacattaaatcagaagacatgttctgattttttggatcatggaacaagaaatctaaaactctagaatttggcagtaaacaataaaaggtaaagattttctaatttgtaaataacacagaaattacacaggtgattttttttttttaatcactggcaaaagctaaaggactttagaaaggtatactattcagctgggcgtagtggctcacacctgtaatcccagcgctttgggaggccgaggtgggtggatcaccaggtcaggagatcgagaccatcgtggctaacacagtgaaaccctgtctctgctaaaaataacaaaaaattagccggcgtggtggcaagcgcctgtagtcccagctactcttgaggctgaggcaggagaatcacttgaacccaggaggcagaggttgcagtgagccgagatcatgccactgcactccagcctgggtgacagagcgagactctgtctaaaaaaaaaaaaaaaaaaaa

SEQ ID NO: 60020 - DNA, 1250 bp, Homo Sapiens
ggccatttcatcacccagttaataagaaatttgttccagattattacaaagtgattgtcaatccaatggatttagagaccatacgtaagaacatctccaagcacaagtatcagagtcgggagagctttctggatgatgtaaaccttattctggccaacagtgttaagtataatggacctgagagtcagtatactaagactgcccaggagattgtgaacgtctgttaccagacattgactgagtatgatgaacatttgactcaacttgagaaggatatttgtactgctaaagaagcagctttggaggaagcagaattagaaagcctggacccaatgaccccagggccctacacgcctcagcctcctgatttgtatgataccaacacatccctcagtatgtctcgagatgcctctgtatttcaagatgagagcaatatgtctgtcttggatatccccagtgccactccagaaaagcaggtaacacaggaaggtgaagatggagatggtgatcttgcagatgaagaggaaggaactgtacaacagcctcaagccagtgtcctgtatgaggatttgcttatgtctgaaggagaagatgatgaggaagatgctgggagtgatgaagaaggagacaatcctttctctgctatccagctgagtgaaagtggaagtgactctgatgtgggatctggtggaataagacccaaacaaccccgcatgcttcaggagaacacaaggatggacatggaaaatgaagaaagcatgatgtcctatgagggagacggtggggaggcttcccatggtttggaggatagcaacatcagttatgggagctatgaggagcctgatcccaagtcgaacacccaagacacaagcttcagcagcatcggtgggtatgaggtatcagaggaggaagaagatgaggaggaggaagagcagcgctctgggccgagcgtactaagccaggtccacctgtcagaggacgaggaggacagtgaggatttccactccattgctggggacagtgacttggactctgatgaatgaggcttcctttgggcctccttggtcagtatctgatcctgaaatcatgaaattaactaacaccttagcctttttaaaagtagtaagtaaatgataataaatcacctctcctaatcttcctggggcaatgtcaccctttgatttaaaacaaagcaaccccctttcccctaccactacggaaaagagcaagctcatttttccgtgtcctcc

SEQ ID NO: 60021 - DNA, 290 bp, Homo Sapiens
  misc_feature (227)..(227): n is a, c, g, or t
  misc_feature (274)..(274): n is a, c, g, or t
  misc_feature (282)..(282): n is a, c, g, or t
ttttttttttttttttttttttttttttaaagcttacatcttttcaggaactgtttatttttgaacatgtgacattggaacacaattttgtaattggtttggttgactgaagaagtgacttcttgaattggggtagaaaagccaaggtctgtaaattgaagatagactgcaatattgaaagcaaatttcagattcctttggcacactttaacttgaaggttaacagntataatatatgtaggataaacacatacaaacacatacaatatataantatatctntggtaatg

SEQ ID NO: 60022 - DNA, 364 bp, Homo Sapiens
cataagttagcaatcggttcttccaaactcctgtgggttgaatatggtatagaaggtatgcaagaggaaaaagaaaggaaaagataaaactcctgcctcagaatttggaagcacctttattaacacatatatctcgcagaaactagagctcataggctgttaactttttgcaactattcactcatttttaccacttttcttttttgggtagggggttatttttgtaaggttaacagccagattccattttgacctcagatgctgtgtacttttaaattccatttttaatattctgcatcttgactcttctctaaaacagaatgaaatgtcttcattctgacaaaatctttcgcaaggctttttt

SEQ ID NO: 60023 - DNA, 568 bp, Homo Sapiens
cattaagctacgtatttattagaaataaattacattaggctatttacacaagttattttatgactggctatgcacatttcagaaataactctaagaagacaaagaaaaggccagacagctaaaataatttatcttgccaaaatgagatgcttagtttaaactgagagatgctatctttccaaatcatttaaatacatagacgcagttcaaaagattcctgactatccattaatggaaaacataaacgttaacaaaattcacagcatacctgaatcttactcatgctacctaaagataacatatctctagaatttcacagaagatagaatcagttcaaaatgatgtattactgaacctataatgatttatggactagatatttttatgacacttttcaaaatagacatactcacagactttagtaatggtaactgtagggctccagatgccctcgagcagggcaatatttttttcataatcacctaattttaatcaattcagctaagtctaatgtttaaaaattcatgaaaaaatatctatctactcaataacttttgaaaacacaaat

SEQ ID NO: 60024 - DNA, 542 bp, Homo Sapiens
aagattttatcctaggcttggtacagatggcgcctgtggtaaatctgtgttaacatggtggtagaccatggagaatgggtagatggagcttctagactccaaaacaacaaaaccacagtgtgagtacactgtcccattaggttgactgaagtctgagtacattttctggcctgcgtgccgtgacttatccaacctgtgaactgattgtgatctgcttggtaacttggtttggtgtaaactgctcttaaccctttgctgatgaagaaaataatcatataagtggaactatttgcatctatgtgtgcttctttttttatgttgtcatcactcattccttcccctgtcctattttggaggctctcaatggatcttctaacttataaatgtcaaatatatttttgtattagattgtgcctatgatgagagaaatctttaatgtatattttatgtatgctgaacacatttttataatttgacacacttggaggcatggtctagtaataataatgtaatatgtaccttgctggttaatataactaaga

SEQ ID NO: 60025 - DNA, 400 bp, Homo Sapiens
tttttttttttttttttcactttttaaaaatctttattaataaagtaattcattataatttttgaaaaaaaaaagttttaaaatggtctgccaacatgttaatgtaggttaggccatccaaaagacaaagcaaaacatcaacattaagtcataggctaggattatacaaatgagaacccccaccttatacattacttaatataagttaactacaaagagcctctccacttacatttttatcatgcatcttacatttaaaggcccttattcttttatagaaaaggtcataatacccaataaaaaagaatctgtaatatccctgatgcagcaacaattgatcacatgctttcacatgtgaccacaataggaataaaataacagcgtaaagaaatttgaaagt

SEQ ID NO: 60026 - DNA, 1995 bp, Homo Sapiens
aactcctgggctcaagtgatcctcctgccttagcctcctaaagggctgagattacaggtgtgagccaccacgcctggccaagaagagagttttaaatgttaataaattggcctgtgataacactgaattatattgggtttcaagaaatcacaaaaaaagcaacacctccctgctgtcagcagctcatagaatggtgggctagacataaacgtatacaaggaaattgccacattgtaagaaaatgtcctattagtggcacatactcatggccatggaagagcaaagaagaggagatagaaagagatagggtgaaggggggaggacaggaaacccagtcaacttttagttcatgtcttttaaaataaggaagagactctaatcagaagttgacaagtgtcaccttccaatattgtgactttctcaatatcacagaggccagggttttaagaaaaatcactctgcgaagatgacactgactttctcttaatctcccctacctcatcttcccaaaaagattaactgaactaatagacttcaaacttctggcctaacttccagtttacaggaaatcatgaatgagagaaactgaacagcctcaacaggaaacaatcagacacatcctccatgtgggatgtcctccaaggcaagtggcctggtctctttctaaagtcaatgtcaaaaaaaaaaaaaaaaaatcccaggcacagtggccttacacttgtaatcccagcactttgtgaagccaaggccattggatcacctgaggtcaggagttcgaggccagcctaaccaatgtggtaaaaccctgtctctactaaaaatacaaaaattagctgggcgtgttggtgggcacaagtaatcccacctactcggaaggctgagacaggagaatcacttgaacccaggaggcggaggttacagtgagccaatatagcaccattgccctccagcctgggtgacaagagcaaaacgccatctcaaaaaaaaaaaaaaaaaaaaaaagtgagagaactgttctagatgctagattaaacataaaagagtttaggactacaatatgaattgcaatgcatgagcacctgtgtatctgaatttaggaagaaaaaatcgccataaaagacaatttggagacaactagatagatttaaatatggactggataccagatataatgagaaaattatcgttcatttttcatattttgaaatgttagtgtctttatgtacgagaatgcccttactattaggaaacagatgctcaagaacttaggccaggcacagtggctcatgcctataatctgaatacttgggaggctgaggcaggaggatcacttgagtctgagaccagcctgggcaacatggtaagatttctctctatagaaataaaattaaaattagccaggtgtggtggcatgtgcctatagttccagctacttgggaggctgaggtgggaggattagttgagcccagaagttcgaggctgcagtgagctatgattgcaccactgccctccagcctgggtgacatagtgagaccctgccttaaaatatatatagagagagagggtaagcatcatgacatctccttaccctgattaatctcaaactgttcagcaaaaaacatatatatatatatacacacatccgcataccttcgcatacacatatacacacacaaatagagaaagcaaatgcaggctgggcacggttgctcacacctataatcccaacactttgggaggccaaggcaggcagatcacctgagatcaggagttcgagaccagcctggccaacatggcaaaaccccgtctctactaaatatacaaaaaagttagctggatgtagtggcgggcgcctgtaatcccagctactcggggggctaaggcaggagaatcacttgaacccgagaggcgggggttgcagtgaacggagatggcgccactgcattccagcctgggtgacagagcgagatgattgtctcaaaaaaaaaaaaaaaa

SEQ ID NO: 60027 - DNA, 2162 bp, Homo Sapiens
cttttaagtgaaaatatcttgacccccaacttttggggccctcagccatgggcattccctagtttccaaacaaacacggtacccgtccctcattccacccccaccaccagaaaacagttctgtttggtttatagggaggaaaatgattattatggaattaggtatgctagttattgaatacttggaattatattgtttgcttttaaaattaccttaaggaaataacttcactgtctgcttctaataatgtttagtcatttatttggtaagtaattaaagcaccatcactctcctgccctcgtcttcaggtgataatctagacatagagggagtgagccaacaagttgctgttagagttaacttgttccctaacccatcttgtgaatatcaatgctaacaacagtgtcttgtgttttttttttttcttttcttttctttttctttaaatcaatgtgcttttttcctatgtgaataattatatgtctagaaacagccatggagtgattttgctgttctgaatgggggaaagattaatagtgacatttggaaggcaagtatattgtcagatcttagatcatttaatattttatcctttctgcatggctgtggctgtatatttttcttctttgtgaatatcatgcattctgcagggacacagtgatcgggcttcttgctaggggcattcagctcacactcctgttgcctttttttggtgtctcccattgtgaatgccctaggttccccgttgttttgtaagaacaggagtttgcaccagtcagcattcaacagtccttgcatgcctttctctgcctaagctcacgtacactctctgcctcttgctgggaagacgtttctcccctttgatatttgaggcaatgaatggtcttctcccccattgtacattaacaaggttctattttcctctaggatttgcatgcagccactgttaacccggaccccagtttaaaagagtttgaaggagcaaccctacgctatgcatctttgaaactcagaaatgccccacaccctgatgatgatgattcttgtagtatcaacagtgacccagaagccaagtgttttgctgtgcgttctctgggatgggtagagatggcagaagaggacctcgcccccggtaaaagtagtgttgcggtcaacaactgcatcaggcaactttcctactgcaaaaatgacatccgagacacagtcgggatttggggagaggtaagtggcatgtagaatgatgcacggcaggctgtttacgttctcctgcatttcaggaagccccacagctcagtgacacatggtactgaggggctccgaggtgttcatcaggtgccttttcccattaatgcaggaagtgtaggcatggtacccccgtgtgactgatcccttagcactgccagatgccagtgaggactggggcctggagagagagcgtttctcagtagctaagtgacacagattcatgggtgagctttaggggcccagaactcccctaaacatgcctgcaaaatgggatgtgccagtgtataagagcagttttgcagactggaagaaggacctgtattctcaaaggggaaggtgacttccacacgtccacacaaaaatgttgatgcctctgctttaaaagttgacaaattattcttttataacactcttctttacttagcgtctgaagaatcaacattatacatgaattgtggaattgatatttatatacttctcccttttaacagagtgattccattttgaaatgttagttgagataatttcagaaaggaaaaaataagtacagataccaaatgtgtatgaaactcacatcaaaccggaaaagctgtattcctggtgtgctctgagacctgtggaaaaagcattttgggagcatcttggaatagtgtttgctacatgaatagatagatgttgttctctctgcttctagtgaacagagcagtggtagaaaagtttgctttttggttgggctgattgggactccactcacattttctcctagcagcacatcccaatgggaagtaggtttccaagcctttccatggtggagtttgtctccttaaagtggagctgaatcactgcacttcagcctgggagacaaagggtaaccctgtctcaaaaaacatttttgttaaaaaaaaaaaaaaaaaaaa

SEQ ID NO: 60028 - DNA, 1918 bp, Homo Sapiens
ttaatagtgtatggcaggaggcctgccagccctgtgtgccttggatgtggggcaactaaagcgcactccccacttttaagaagccattgacccagtggagtaaacaaacatgaacaacaaacaatatcacaatgaaataagtgtgagtggtatgtcaggagagccccaaagagggaagatcagaaaaggcctgacagaggtgaagctgggctgggaggaagggaagtgcctcttgattgaggctctgctctttctcctcttcccttcttcctgtgtctcctcactttccttccaccagatcctttccacttccccagccccgctattgtctggtcttagagggcaggaaaacgaggtctgctggtctgctttcagattttgtttaactatagaagtgctttggtttctttgtggtttctttgagcttttcagtgagaaagaagaaggcagtgggaatacattggaaataaacttatcagtgctttgtagcatcaccactgtggtgtgattgccccttgaggcgtgtgagaggaaaggtggaggaagatgaggctgacaaggttaagtggggcagagtgctctggcactactgggattgtagggaggggaaccgagggacatcatggcacaaatctggaacccgagcaaagcgagttttctgaaagataactccagcagtgatgtggagaattcttttaatggcaagagaccagatgctgtggttaccttgcagaagcaaggtggatccccaccctaaatttagtttggatgtcaagattgacgccatcacacataccaagagagcatgcacatgtttattacttacatcaagcttgtccagcccacagcctgcgggtcgcatgtggcccaggatggctttaagtacagcccaacacaaatttataaactttcttacaacattttgagattttttttttttgctagttgttttttttttaagctcatcagctatcgttagtgttagtgtattttatgtgtggcccaagacaattcttcttccagtgttgctcagggaagccaaaatattggacgcccctgacttacatgatgaggctttctggggaagaacagggaagacatcccaagctagttcaaaacagcttgggagagcaagaaaaaagactggcttgggatttgattttcatttatttttatttttagagatgaggtctcactatgttgcccaggctggtcttgaactcctgggctcaagcaatcctcccaccttggtctcccaaagtgctgggatcacagacatgagccaccgcgcccggctaattttttgtatttttagtggagacggggtttcaccttgttggccaggatggtctcgatctcctgacctcatgatccacctgcctcggcctcccaaagtgctgggattgcaggcgtgagccaccgcgcccggccggcttggaatttttaatagtggttacaatgtgggcaggggcttgtgtggtttggatttcctgcttgcaccaacaaagagcatccagactttcacatgagcttgcccagatgcaaggcacaagggggtgagggaaagggaaggcttaaaagttgttagcaggccgggtgttgtgactcaaaatactgtaatctcagcattttgggagacctaggtgggtggatcacttgagcccagaggtttgcaaccagcctgagcaaaatattgagactcctgtctctccaaaacaataaaaaataaataaacaaataaataaataaatggctagacataatggtgtgcacctgtagtcccagctgtttgggaagctgaaatggaaggatcgcttgaggcccagagtctgaggctgcggtaagctgtgttcgcaccactgcactccagcctgggtgatagagtgagaccctcgtctcagaaaaaaaaaaaaaaaaa

SEQ ID NO: 60029 - DNA, 3040 bp, Homo Sapiens
tttaattaaaagaatcaaagaaaccaaagttaagaatttaaattttattttggcatttgttactggttgtgatatataattttggtaacattagtgagggatcaggtttaaaaaatttctccaatgttgtcttctgcagattgcaattgtcttgcaactgctgttggcaaactaaaaatgcttttgctggttaaggtaaccagtcatttctgaactttttttcagttgtaagggcatagaatgaacgtgcacgcctgatttagtgtattaaaactaatatcatgtgaggacattttatagataagaggttagaaggcaaacgactctattttgagaaaaatttggagggaacctttctttcaagataaataaattatttactgtccagaagtttatcatgtaattatctggatttttttttttttcatttctctgagctttagctcagcctcgatggactctgatttcataaatacattacatttttcaattttagaagtcatgggaagaggcacacaactttgggaatttgtgaaacttaaagcaagtataatgaagagatacatactcattttgtttgtgttctgtttccattccattaacttctactatcactcaggttcatccttgttgaggcctagacgagtggaaggtttctcattttgaagttagttgttttttaattggtcacgcgaaagaaaggcttacattgattttgaaagacaaaacatgtcattgtttttttcactaatgcccaacttctacatggctgactggatattgttcaaattttccaaaagaatagaaaagagagagaaacacccttcttttggatccgaagccagtcatggaaaatttcatcctgaaaggataatttttcataaatatgcaagcagcagaatggcagtgtggctgcaatagaatctgccccaggacttccatgcatagtactttgctgtaaacacgaaactacaggcacacatatactcaaaagaatacacagtattggaagcctaattatttccactaagattgagattattccctctaagagctatactggagaaagcaatgtgtcttacttcactttattccacatcaattcacaaatttttatagcatatatactctgtgaaaggtgatactgggctaaagaaaataattctgccctcagtttgcaatctaacagggaaaataaagtccatatatattaaaatctaagtctgtttataataagtgccaagtagacaatatggacaggaagtactgtggatctaaggaggtcaagctcatgggtgtacaggttgtaatagttatgaagccttctcagtagcagtagaacttgaatgatggggtggatcgggataatgcacagagtgggtgcatgtggaacacttacaagaagaggggatatggggagctgatgtccaccaagaacagggagcctgtagtctgcgggtgtatgtggggccctgctgtagtggtgttgattgacctctgtaggcactttgccttccttcttctgtgttccctccagctagggtagagaggactggttcagcttggctcttccgggcctgcccaaaggaccatgcaacatgaaggtgaagtccttgtagagcaaagggcatgagaagtctctcttctaaacctaggctctgccctgtctccataattttatttcatgatgttagatctgggaagagatttagcacgtttctgtattagtagagcatttgagggagatgataactattaaacaagagaggtaaagagaaacattcagagatgaacaggtttattgggataaagagtgagggtacagatttgaggctaccattcacagaccagggctagctattctagaaacaatagatgtcattagacaaataatgacatgatggtttgatattggtgttctaaacctccagaggttaataactttgttggatttcagtggtggacaccagcaatcttaggaggtctagcagcaagactggttcttgccaagttaggagatgttagtttgttagtgctgattggatggaataagcatacaaccgctctgtgtgcccccttctttcccctctgcagggtgtgagaatggaaaaagagaattacacttctgataacctaaatattcgctaacctgtggtggggatgcttattttggccttttaggcgcaaacttgtttctttaactgttagttttatggtgcccagggttaaactttaaagttggactgtttacatgcttgcgacatggtgaaccaaacggggaaagtaagataaaaacaggcttgataaaggccagccgacttctgccagtaggctaaaactcacagactctcagatatatacatacatatatggccaagatgtcttgctgttaaatggtctttaagagagcagaaaagcctttttaacaaatgcacctattgtagagtctttccaatagcctatacctttcaacttgtgaagataaataagaacatatggtttgtctcaacatgcttttaacaaaaaccagatgaacacatgtaaaacaattagagagttgtcttaggtaccctgaagttcttatacaggatatttgctcttcattcaacgtttattgactacctactgtgttccaggccaccagaccctgtgttagaggttagagatttaaaactctagtaacttatgtattataatctatacatgtcatttaaagacatagcatttttgggctgagtgcggtggcgcacgcctgtaatcccagcactttgggaggccgaggtgggtggatcatgagataaggagttcaagaccagcctggccaagatgctaaaaccccgtctctactgaaaatacaaaaattagctgggtgtggtggcatgcgcctgtggtcccagtcactcgggaggctgaggcgggagaagcgcttgaacccaggaggcggaggttgcagtgagccgagatcgccccactgcactccagcctgggagacagagcaagactctgtctcaaaaaaaaaaaaaaaaaaaaaaaaaaaaaa

SEQ ID NO: 60030 - DNA, 1664 bp, Homo Sapiens
tttgttttatattccggtggcagcctataggcagatgcttgtagctgcctccagtttaagaaaaattccttggagaaaacctcagctctgcctcataactgatgctctcctctcccagaaagttgggaaagttccaccttgatttgaactcgctggccaaacaccagctatctctgtagacacagattttgacaggttcagacccagattggaaatgattttgattcaggttgcctttgagtctgtggagagtcagagtttatggcaatttcagcccgctctatcctctgtttgggattatgtgttcccagagagtaaactgtgtggccccagagtcaccctaggaggatctgagtgaccctgggttttgtgtttttactctgtggatgttgtggtcacgctggatcatgttgtgtggaggcttgggagcatgtgttggaggaacagttgagattttaattttatttttggtggcttttttggtacatccaaccctttcaggttaattaaatgccaggtagagctagcccacaagtggattttgttttgaaaatgtgcctgttttccaggagccctttgtggcagcctggtctggttgcccagatatcattttggcttcttggtgccttagtgcctgggatgaattggcctgcctgctgcagtctcttctcctcagccctgatatccgccaactgggtggctttgatgcctctgctgagggctctggtttcctgccagtctgggaggcgtgggatctcatgcgtgggaaaggtaatcaagcaataaaactaagcctgggtgtgagaggtggattaaagtgggcaaggaagaagcaggggagagggagggagccagctgtccagagtggccggaagaggcagaatgtgggctccatcctggctgggacctgtcagcccttgtgagaacttttagggcggtagtattatagtttggattttccccattcatcttctctccttcccctctcctaggttttagctgcccacagaatcctttgaggaggtgattcctggaaacctgtgttcactggatttagtagaaatccaccttgacttcctgttgaatatttgacatgtcctgacaagtgtttccctcccatccccgcaaccccgtcaccctgctttaacaaaaagcttcaaagttgagaccctttgctctgaggtagaagattttatatactcttatttttcagaaaagggcagaataatgcagtagttaggaacacagctctggggacagattgcctgggctcctattgcctctgctgctgattggctgtttgactctgatgagagatctctgtgtctcggtttcctcatctttaaaaagggctaatagctgagcatgctggctcatgcctataatcccagcactttgggaggctgaggtgggaggattgtttgagtccaggagtttgagaccagcctgggtaacatagtggaaccctgtctctacaaaagagtttttaaagattagctgggtggtgtggtatggcctgtggtcccagctactcagaagtctgaggtggaaggtttgcttgggcctagggggtcaaggctgcacaagccttggtgttgtgccactgtactccaatccgggcaacatagtgagaccttgtctaaaaaaaaaaaaaaaaaaaaaaa

SEQ ID NO: 60031 - DNA, 207 bp, Homo Sapiens
ttttccacaggaaatgttattgctcaaaatgcaattttaaaaaattcaatatggaacttgaggccaaaaaaacagaaggttactctcaatgccatccaaaagataaaagttaaaaaaaaaaaaaaaaaaaaaggggtacttttgccctttttttaaaccaagtttttagggggggtgacttccaggggagccaagggcccggggaaa

SEQ ID NO: 60032 - DNA, 2156 bp, Homo Sapiens
ttttttttttttttttttttgacaggtaaacagaagtaactatcatttggggttgtcaagatatgggtagtagatacctaattccatgaatgccttctctgtgcaagtgctggaaagtaacctcagacttccagactcatcactgagattctttttcttaagcaaaatagtgacgctctgcaggatttctataactgaagttctctaaaagataaatttatattgcattaagagggtagagggtagtatttagagctatgctctcttaaaaagagtaaagatttcatgtatatgaaggaacagaaagcatggggataagttttatacaccctagagtggacttttatgataaaaagtaatttacttgttaatcaatttaattcagcaatgggaaaagatctttctcttctttctgaaatcttacacagtgaagggatgaaaatggttatactactggtaatcagagatgttcctattttgttttgatgtgtagattccgtagtacctagtgttgttggatattaagaaaaattctaatccctgttcttgtgggaattgcacaaggagcaatgtaaacacaggtagtggaggtagagatgtgctgtcgtctacttctgctctaacttgagcagccacatctcactcagggtcatcccataggatgtccaggctgtggttggagagaagtggggggatgaagacgtggggtgcaataatgggaggaggatgggctttgggaccagaaggttgtgaatttgagttctggtccatcttcttggcagctgggtcgattagggtggtgaattagctggctgaattacttcacacatcagagcctcactttcctggtttgtaaaatgcagattgtgcccctctcccagggctgccatgagggttagggaggccaggaattaaaacatgtaaaccatgcattacactgcatttcaacccctgcaagggtgatgcagctagctttacctgattttacttggattgtttcttttttttttttgagacggagtctcgctctgtcacccaggctggagtgcagtggtgtgatctcggttcactgcaagctccaccttccgggttcacgccattctcccgcctcagcctcccaagtagctgggactacaggtgcccgccaccatgcctggctaattttttgtatttttagtagagatggggtttcaccatgttgcccaggctggtctcgaactcctgagctcaggcagtccgcccacctcgacctcccaaagtgctaggattacaggcgtgagccaccgcgcctggccttttctttggtggtaatttcctgatctgttgaaaggccaaaagtacactgtggattttagaagtgatgtcttttttttagtgatgagggtttttggtggtggtgtttgttttttgagaaagggtcttgctctgtcacccaggctgaaatgcaggggcacgatcttggctcactgcatccttcactttcttgggctcaggtgatcctcccacctcagcttcctatgagtggctgggactgtaggagtgtgccaccacacgtggctaattttaaaatttttctgtagagatgaggtcctcactgtattgcccaggctggtcttgaactcccggactcgagtgtttcttctgccttagcctcccaaagtgctgagattacaggcatgagctactactgcacctggccttttttttttttttctttttttaaaaagacatttgtggtgagtaagaattgctttggggtttatgcccacctgttcctcagagctggctatgggtgatcttatgagtgagttgtcactaatgtttgtatcgggactggaattctcagatggttgcaagtcatttgaggtcccagaagtccagcatagagatagggagattgtgggcagatctcttgagcctaggagttcaagacaagccttggcaacatagtgaaaccctgtctccaccaaaaaatacaaaatttagccaggcgtggtagtgtgtgcctgtagttccagctacctgggaggctgaggtggaaggattgtttgagcctggaaggttgaggctgcactgagccaagatcatgccactgcactccagcctaggtgacagagtgagaccctgctaagaaaaaaaaaaaaaaaaaaaaaaaa

SEQ ID NO: 60033 - DNA, 907 bp, Homo Sapiens
catctctagtgataggacctggaaatctgtactttcttaaaaggttcttcaggtaaggtttgctgaggtttattacaaatgtacccttgatttgatgctaatgctgtatttagggctgaaggaagcacacactaaatatctgagtgcttttcagattccatctatgctgaaaaagaatctaggagaataaacgcatttcaattagcccttaacatcttgcttcagaactttagcccactaaagcccagtagggcataggagagaacactgcaccaggattcagatctggattctaattttgttctgaaaaatagcaagtgacactggcatgccatttaacctctccgggcctcaatttccactatagatagtacctgatgtgtcagtaagacaactgatgtaactttgccaaacaagtagaattatccttcctcctttgtcctgctctgtcctagcttttaatacttggtctgccctaacattttcctgtatgtatttctttatcccagatattcgaacaattgctagcaaggaaaagtaatgacggattttcatttcccaatatagtctggcaaagaaatgaaaggtttacttctccttgctaattcaatctacatggtattgatggaatcattaaagtgccagcaagcaggctctggtgcatacagagggtagctacgtttatctgattatgggccgatatgatgaactcatagtaaaactctttagccaagttaatcttcctggtgcccttctacagcatggtttcgttcatggcctttggttccatccacgagtacatccaaagggaggcaaaggaaaaaagcttagaccagttgaataggggatagagaagatagggaaaaaaaagagaaactagaaaaagacaagccttaagaaaatcgaa

SEQ ID NO: 60034 - DNA, 638 bp, Homo Sapiens
cctggctctgaacttaggcctggctctgaacttaggctcaagtggtcctcccacctcagtctcctggaaagctaagactacaggcacgcaccaccacgtccagttagcgtgtatgtatgtatgtacgtacgtgtgtgtgtgtgtatgtgtatatatgtaactcctcctcccctcccccctccccttctcttcttttctttctagatggggtttcgccacgttgcccaggacggttctgaactcctggggccaagcgatctgccttcctcggcctcccaaagtgctgggattgcaggtgcgagccactgctcctggcccataagtctttcagtgtagaagagggaagcagaagaggtcacagtggtgccatgtgagagctcaacccacccttgctggaggaagggagccagagccaagctggaaaaggcaaggaaacaacctttgtgattacattaggcccatccagatgatccaggataatttattttacagtcatctgattagcaacttaattctcttctgtcatgtaaggtaacatattcatatgtgtcagagtggtaggccattattctacctaccataccaaccaacacaaatctacattaagactatatctcctaagttcagagccagggggt

SEQ ID NO: 60035 - DNA, 1813 bp, Homo Sapiens
ttttatttctagtttacaataaaagcatgtataatttagtataaaattgtaaatgcttcataggtaaaattttaagtgtaatattaggatagggcagcatctgagcaagaataataaaacttggtattacaaagctgggcgtctggacatgtcctgatgagctcatcatgtgccatctgcttcaataattctggccaccagcaaacatattttgccagtgagtactgtacaatcctacctatagttggttgactccttttttatgaatatttctacctggctatggacaacactatgacatgaaacatactagcaaactacaagttgtatattttaatagcacattttaaaactgaaggacaattaggagtcaattaagtctgcattgcctagattgtttccttcttcattcttttcaccttttgtagtaagaactgagaaaagtaaaccaagctattcccagtagctttccttaaatgtggtgacccatctgttgccatatgctaggcatctgcttttatcaccctcatttgtggtccttcaaagctagaagtgatgaattaacatcaaatttatgctaatctgtggtaggagagaacagctatttgcaaactatttaatctggccatagtcgttatcagatataaggaatacaggacaataggaatagaaatcagaaatatttttttgaattagtgcatgacttttaggtaactgtagcacctctatggttgtatttctgtatcagcaaaatgtgcgagtgacccttgcttgcaaatatttgttgattttacacccaagtgactacaatatccaatataatagggtagaatcattcatgaatgctcatgcaggtcagtctctgtttaacttcagttgtagaattgcttctttcttgaaagattattctttttttaatccagtcctaaactgtcatcagaaaatgttcatagaatatgaaaggccaattctacactgaccagaccataataaaaatattttcctattatttagtattgcggaaaaaagggaattagaatcagaacatcaagatatttgtcccatttctagcactaagtggtgatacaattttggccaagtcatcaagcttgtgtccacatatgtatcatagaacgcagtactctgactccaaaattaactatggtttcttttagcactagaaatctctgattcctctgtctgtctttagggtatattttcactgtggcttggaaatcataacttatgcatttatcgacacagttttcaatgcacatatgtaatttttcagagtaatacatataatatcagtgatatttacattgaaataacttttttaaagtaaaaattagataatgtgtattgggcaggttttgtatgctaaaaccatatataaataatcattttgaacaagagaacaaccagatcattactgaaaacaaattgtcagtttaattaacctacttaattacattatatttcaacatccttgaatgtggaagacattttaaaaaattaggccgggtgtggtggctcacgcctgtaatcccagcactttgggaggccgaggtggatggatcacgaggtcaggagatcgagaccactgtggctaacatggtgaaacctcatctctactaaaaatacaaaaattagccaggtggcaggcgtctgtagccccagctacttgggaggctgaggcaggagaatggcgtgaacctgggaggcggagcttgcagtgagctgagatcgtgccactgcactccagcctgggcgacagagcgagactctgtctcaaaaaaaaaaaaaaaaaaaa

SEQ ID NO: 60036 - DNA, 587 bp, Homo Sapiens
ttttgctgcattattttaaacaaagctctctgtgttcgaatctattgaacttgaggggatatattccatcaatagatggaattccttcctgagctagacctcatcagacatgataactaggaggcaggctgcttctgacattcagataaaaggggcttgcctggggtgagggggcaatgagggtgggggaaactgctgatttgtggctaagttatttcagtcaaatcttaacacacaatcatttaacatcaccaacactttcaatagacttttgaaggaggaaaaaaaaactgagcactcctcacttaccacatccaactcgcagaaataaaaatacctaaagcacatacatgaatggctttttaaaaagcctgagagagcagagttgatctttattttcttatttaaaatgtggggcatttttctttagagttaatatgcagtcttttattttacattaagtactcttatgatttcatgtcttcacaaaattgcgcttaacttttgaagtaggaggtactttaaacaaaaatactgtgccatgtcagcacttttttccttttaaatattgaaataaataaaatagt

SEQ ID NO: 60037 - DNA, 658 bp, Homo Sapiens
acgctattataaatgttttatgaatttaattttccaattatttgctgctggtgcttttttgtaaattgaccttgtattcttcactagaggggagaagaatcacctaccttttggatgcctcccactctacttgtctccctgaggtgatatggaccttaagtccacgatggtgacctaaactcagttaaaaattcttgcctagcagcaccaaagagtggtatgtgattccatgttttctcccatttacctttgcctacacccttcctttaaaaaaaaaaaagactccgtaaaattgtagggaacaaagtaaaaatgggaccatttctagaaattgagaactcagagtcatataaaatcctgagtgatacgtagggtatttaataatatgggagtatatttaacccttccacttatacagaatcttataatttagaaataatttgtaacatatcaactcacttgatctttgcaataattttatgaggtaattgagataggcattactctcctcatattaaagatgttgaaccaatgatcagagagcttaagtgacttgtacaaggtcacacagtgaattagaagttgactcaggatttgaaactaggtcttttgataatagggtactactgtatcttcccaataactataattggatcaa

SEQ ID NO: 60038 - DNA, 2233 bp, Homo Sapiens
ttgtggtgcttataggcatgttgttgtttctcaggtagattgaaagctttgttccattataggatctttgaggatcgtacctctttttcacctttgcctactgaaaaactgtggcaaacttttcaagtgtccaaatcaatggctctgtgtcttctaagttttctagctcatcatcatctgtagtggatttcagcagactttgaagttcctagctggtaagggtttctctttgcttttcggtgtgttccttaacgtcatcctcagtcatttcagacagcgttccccaccaactttttttgcaacatttcacatattcttaataactgcattaatagtagggaagtccttgaaatcattgactcccttaccccatgatggcttgtaacatgtattggctgtcctgggctttagggcatctgtagccttcccaataagcacaattgtatttgtaattgtgaagctcttcaataaaaccactgtggcacattcaaggttagcatcaagactccatgaattcacccaaggatgtaagtcacttgaatgcacttgatgccttgatctagtgacgcagcagtgatgtagttttaggaggcagaaatatcacttgcatgttcttttaggcaaaacagagattggagagatggcctggagtgttgtcaattctgaggaagaccttgagtggcagtcccttctctttgaggtattccatcacatcaggagtgaagcattgctagaagaaagccttcttatgttcttgccaggacacaggccagcaagttttgcttttgtcctaaagaacctggtgattgctcagtagacgaagcctcgcttgttctcatgaactaatgcatggcctgacagcaccagaaaaaggtggtctttccaggccttgaaccccagtacctgcactcatgtatgaaggtaccattgggcatcttctagaacatgcctgattcatgacaatagaagatttactctggaaggtagtgtcttttttctgttttatgagctcttctaggaatgctgttgtttccctggcatcagccgatgccaattctcctgtggtcttcaagttcttgggctgcactgtgttgcatagttagcctagccagaacttactggcttcaaactccttcctcttgctctcctcagccccctcacagtgatgcttacagaggctaagtgttttttgttttcttttctttctttccttctttttttttttttcttttttttgagacggagtgttgctctgtcgcccaggctggagtacagtggcgtgatcttggctcactgcaacccccacctcccgggttcaagtgattctcctgcctcagccttctgagtagctgggattacatgtgcgcgccaccacacccagctgtcttttgagtagagactgggtttcaccatgttggtcaggctgatctcgaactcctgaccttgtgatccacccgccttggcctcccaaagtgctgggattacaggagtgagccactgcgcttggcctggctaagtgtttttttcaagtatgatgttaccatcagtagggctgtggttctgtgacgtgtcctctagccacacacttaatgcttatccttagtttatcatgaactagagggatcatttttgccactgtaggggcagctctaacactttgaggaacttcagcttctctctgctttagtgtgtgatttcttggtttgttcttaccttatgatgaactttccaaggtgatacaccacttttcaaaacatcttaggtttgtattttcttattgagagataccactttttgtcccctgctagccttttagggataggtttgaccacttgattccttcttaggagccattttttaacattttttatttttttatatatgacatctcaagggtctctgaatgaacaaaacagtcttcaaaagccagaacaatggccagatgtggtggctcacatctgtaatcccaccgctttgggaggctgaggcaggtggatcatgaggtcaggagttggagactagcctgaccaacatggtgaaatcgcatctctactaaaaatacaaaaattagtcgggcatggtggcgcgtacctgtaatcccagctactcaggaggctgaggcaggggaatcacttgagcctgagaggtggaggttgcagtgagctgagatcatgccactgcactccagcctgggcaacagggcgagactctgtctcaaaaaaaaaaaaaaaaa

SEQ ID NO: 60039 - DNA, 370 bp, Homo Sapiens
tttttttatcaaaaatgtcttgatgtttattgttaagcttgaattcccacacaattttagcacttcccccattttcttggtgtctcaagtgatttttcttgggactcagagttcagagaaacatgcatttccagaaaaaagctgggaagggactctaaagcactttcaccttggtttctggaaacaggcacattgcaagctacagtttaggacctgatgccactttgaaggtgtgtcagctggacacagaaaacgaggttacggaaacaatggtcccagcacagctcactctccaccacgctgcgctctctctccttagtcttgtggggctggaggcacagtggcttagaagtggggtgactggttgtga

SEQ ID NO: 60040 - DNA, 523 bp, Homo Sapiens
tttttttttttttttttgctgtgaaaactgtgttgcttttattgagattcacattttagttcaattcaaatgttagacaggggctacatgacaccttcctagtactaatataaactctggaattgcttctggctaatagaattacttagataacagagagtttatatatgtagctgagatgtgataagggtgggagccagcggagaagttagtgactaactataactcagggcaggatagggaaggcccagcataaagtgggaagagataaaaataaggaaggggagggtctcatagagcagagagaaagatgggagggggtgatgattcagcttcttatccccttattttccacgaactgtccagaatgtacaccccaccccctatacaagacgtctgccttcctccatagtcaggaagattctagccacaacttccgatctcgcaaatcaccaacagtgccctggtttgcacattcttatcctggttttaatttcctctattgtgaaacctcctcgtgccg

SEQ ID NO: 60041 - DNA, 301 bp, Homo Sapiens
  misc_feature (211)..(211): n is a, c, g, or t
ggtagagacagagtctcactatgttccttggggttgttgcaaatttctggggtcaagaaatctcctgccttggcctcagaaatgtattttcttgatttgcatttgacattgctgtctgaccgaaaccaattcagctccacaaaggagtaaatataagtctttttattttaacaggcattttataatccctaacaaaaatttttctccattnttttctttattggtaacataaaaattaaattttgatattaaatgctaccagtattattcctttttaaagcccagtttagctcccaataag

SEQ ID NO: 60042 - DNA, 2088 bp, Homo Sapiens
tttaattactaaatattacttataggaaaggaaaaacattattgaatatttatttaaatgtcacatctaatcaacttggtctgtttttgttctttttcttcttttaacctccaaaccatttcttaacccagtttcctctatctcaataaataaccccatcgtccactatccaaaaacctgcaggccatgttggattctgcttttccccttgttctttccttatccaatctaaataggaaattctggcagctctacctccaacgtatatcatattcatttatttctctccatctccactaaagctaactaaagctaaagtcactgaagctaacttgctttcaccctttttctggacattgtaattggcacctaaatggtatagcccctcaccttccttccaacctccaaacagcaggcatagaagctgtagtatatatgtgtgtatgtgtgtgtgtgtgtgtgtgtgtgtgtgtgtgtgtgtgtgtgtattgtttagacggaatcttgctctgtcgcccaggctggagtgcagtggcgcaatcttggctcactgcaagctctgcctcccgggttcatgccattctcctgcctcagcctcctgagtagctgggactacaggcacccgtcaccacgcctggctaatttttttgtatttttagtatagacggggtttaccatgttagccaggatggtctcgatctcctgacctcgtgatccgtccacctcagcctcccaaagtgctgggattacaagcgtgagccaccacgcctgaccagtaatagtttttgaaatgtgaattagatcaagcttaaaccctttagtgggttccacctagaaaaaaattacactttttttttttttgagatggagtctcactctgtcacccaggctgcagtgcagtggcccgatctcggctcaccgtaacctccacctcccgggttcaggcgattcttctgcctcacctctcaagtggctgggattacaggcacctgtcaccactcccggctaatatttttgtatttttagtggagacggggtttcaccatgttggccagggtagtgtagaactcctgacctcaagtgatccacctgcctcggcctcccaaagtgctgggattacaggtgtgagccaccgcgcccggccaaattacacttttgaaggcctgttttgccatccttatctcctctcaccttaccttctgtcaccagattctacccataagcagccctttggcatttttctgaacatgctgagatccttccttctttggggcttttgtgcttactgtttcttctaacttgaatgttctttgtcagtttttctgcggcgattcctctatattcacgtttcattgcaactattacctcttcagagaggccttttctaattttccttaatagtgtagtgccccccccaattattttgtattaaattactattttctttccttcatggtacttatcataatctgaaatttatttattatcatttattttttaaattcaataaatcatgacatcctctttccaatgagaatatgagccccatgaggaaagcaacctcaactgtcttcttcaccactgtacccctgcagtgccttgaacaatgcctgacacacagtagactgcatgaatctatgctgagcaaatggtgctaaggaatactaaagattgacaattgccaaattattatgccctctttggtactatatgccatggatgtgaatttcccatagaagctggtgacatgttcctggaagctctgggctacacctggcatgacacttgctttgtatgctcagtgtgttgtgaaagtttggaaggtcagacctttttctccaagaaggacaagcccctgtgtaagaaacatgctcattctgtgaatttttgaaagtcaacagttcaggagaagagaaggaatttgaagagaaaaaggaaaattaaaattactaattaatttttagattcaatatttatatggagttttgaaaaataatagtggccctgaaggaataaattccagctttaaaaaccaaaaaaaaaaaaaaaaaaaaaaaaaaaaaaaaaaaaaaaaaaaaaaaaaaaaaa

SEQ ID NO: 60043 - DNA, 1977 bp, Homo Sapiens
cttttgatgttaggcccagtggccttccccctgaccctagcagcctctcatgaagacccactgaaggaatgggacaagagtggaggtaggttggtacatcacagactcatggggcagcatctgcaagacccttttatgatttatgcagaggaagcctggcttggagttttttagaccacccgggtcaggatcttagttctgccacacactgtcttggacacgttatttcatatcttgtgagttatgattttttcatctataaatctggcccagtgtctcccttgcaggattgttgtgtgagtccaactggcaccaaggaggtgggaattctgcaagaacagctgtcagtggtcatcatacttgtgctgtctatgtgcatggctttattgatactcggtgttcataaattaatattcccatgtgaattaggcagttttttctgagtagcaaaaacctcaggatttcagaggcttgtttgacagcagatatgtatcttcatgctcaaggatctatgggttggttgtggtttggctgatctagttgcatggctggttcatgccggacttgtggttgattgggatctgctccacgtgtctttgatctgagttcagactaaaaggcagcaacagacagcggctatggagacatattccttttgtggtgcatcataagagggcaagaggaatagacttgggaacagcacactgtcacttctagccacattccattggctacagcaagtcagtgatccagtccagaatccagtgggacagggaagtaaacaccattcactctggtgggaagtactacaaagtcccatgacaaagggcagaaatgtgtagttcacagtcatgttggaagtgaactgggaagactcatgcagtctaccatactaactcagctgctccacttgggtgaagcaaggaaagcaaaagaataataaactgaggagcaggctgggagaggcattgactatgtatgcaagtaacagatacttatttttcataagcgtgtgcttagtaaagttgggttctggaggtcaatattataggaagatcatgatctttgattctgaaggatagcatatgtttatccttatgccagtaccacactgtcctgatttctttcaaagtcaggaaatagaagtccaacattgttcttcattttcaagattgttttggctatcctgagtccattgcatttccatatgcattttaagataagcttgtcagttccccatctaatttaaatttgtgattcagtgctcaggaagattcaattgctgttggcatctaagtttgaaggaaatggtttgatcgtttatccaacaaatatttattaatattgttgtgccgggcattgtagagttggtgctgcaacatacaccaataaacaaatccaaacacaatctttgtatccacatggcttacaattgaagaaaattagcagatattaatcagtcttcacgttgaaacataattaaaaactgagataaattccatgatctaatctgaagatgcagagtttctctgagaatataatatttaaggaagtacaggagttacctaggcactgaagatgagagaggaagccttccagacagagagaacaacatgggcaaaggacctgtggtggaacaactgcagcatgttccaggatctaagaaaatgtccaatgggccgggcacagaggctcacacctgtaatcccagcactttgggaggccaaggtgggcagatcacctgaggtcaggagttcgagaccagcctgctcgacatggcgaaaccctgtctctactaaaaatgcaaaaaagtagctgggcgtggtggcggacacctgtaatcccagctacttgggaggctgagggaggagaatcaattgaacccaggaggtggaggttgcaatgagccaagatcgcgccactgcactccagtctgggcaacgagtgaaactgtctcacaaaaaaaaaaaaaaaaaa

SEQ ID NO: 60044 - DNA, 101765 bp, Homo Sapiens
gatcatttgggaggtgcagtggctcaggtctgcaatcccaacactttaggaggctgagatgagaagattgcttgagcccaggagtttgagatcagcctgagtaacgtagtgagaccccatctctacaaaaaaatttttaaaaattatgtgggcatggtagcatgctcctttggtcccagccacttgacgggcagaaatggtaggattgcttgagccctggaatttgaggctgcagtgagccttgcaccactgtactccaccgtgggtgacagagcaagtccctgtctcaatttaaaagacagacagacagacagacagagagagagggagggagggggagagagagatcgagatcctcttgctttatagtgttaggatgcaggacataaaatttacaggtttgaatctgaccctacctctttccagctgtctgggcaagttactaacttctcagtgtcgtctcatctgtgaaatgagaatcatacttgctttttgcactgtaggagatttaaataaagtgattaatgtaaagtatttatctcatttcctgatagtcaagccatactaaaatatggtagcaataattaataacagcttcagagaagcataataaattgaaaagagtaacaatgcagttgacatttagcattctggagatttgtattggtgtcacaatattaaatgaacacacactcagaccaacatgcaagtaccagtggtagcttagttgctttataacttatgacccacagaagagggattctctaaataccaaaagaaaaaatgtgttgcaattttttaaggtgatattggtgaaaatgttagtaaatgcattactttgtagtgaggtagaatcatttgatttcctcagcagcctagaagattctctggatttcctttaccattttagcaaaattctttccaaaggaactttataataaagaaagttaaattatgtgattatttactttaccatcaacattttcttttagtttttaacaatgcctcaaacaagtctttctgatcaactcatgtcatacaactctaaaaaatctagcttcttttttgttatgtttttcctttttattttttaaaaatcctctttttaaatttctttgagcattttaaacttacctattaagctcattttctatttccttgtgttcaaattctgtttgttaccatattacagctcctctttataaagctttattccttgaatcttttgtaatccttgtaagtttatcatacttttcatgagaatcccacacactctgtgctaggaaacatagccacagggcaatctccctttcagctctgcatggcagagttcctagagcttcattgatttcatatattcctatatgaatttcttgtcttagggttcccacatttcgtaagtattataaaattggatctcacatccacatacagtacaaacctgagtgtccaactgcttttgagctacacctttttcaccaagagttcctggtggtctgtaatttccttccagctatctgattcctcatctgggggctacacaactcttatgtagactttcaagattttaagagtgaagccctttttgttttacagggtctactgtgtagataggagctcactcctatgcacaatgtttgtttatgctttctccctcctttggaatatgagctctcctaaggctgagatcttgttagatttggtcacctcttttggcctcatgataagctaatattagtcaatcataaagttaatgaagaaatagataaatgttgggcctatggatttgagtgctccctggcctattttttttacatcttgggggtacatttactccagtgtgacagatccagtcttaattagcaatgtgagtgtggacatccaagcattaggatacaataatagagaagatacttttatacaaaaattaaaaaatagcattttcttcataagaattagagatattaccgtcttgagaagaacaaaacaacattctgtacagttctgtattccagttataataaatagtagagattttaagtgtaatggctgcatttacttacataattgctttcatattaggaaccacttagatttaaaaatatccaggatatgtcttatcattgtttgtttttattagattatgaataaaataacataaaatacagtaagacaaagcacaatagacatagtaagacataaagacataaatagtaagacataaagaacacaatgatcacttgagtagccaccctccattttgtggggacagaagaacgttatggttaactttgaagtccctcttgtgtcactttctgattctttcccattccattctcgaatgaatcatgatcataaatttttgtgtttttttcttttaaaatttattcttacttataacatgtactatgtatattgtattataaaatccaagtaaatgtctataatatattgcttaatttgtctatatttttaacttgcttctttgctctgcattatactcttggcttatgctattgcatgtggttagaatatgttcattttcaatggagtaaactattccattgtctcatattttttactttgtttgacatttggtttgtttcctataatttttgcttttactacttcagtgaacattttggtacacatgcttgatgacatgtgaaagagtttttctataatagagcttttcaagagttgtgccatgttaagttacagattgtgctacaaaatagtggtctccatcctgagattatctagtgaggcctgggttagctagaatccctggacaagttgctccaaacactggctgcttcattacactcttctcagaggattaccagagcaaaatggagtcagatatggtactccatgttctccttcagttgtgagcacactaagtgtcctgagatgctaaaatgcttgtcacatggacatctattttaaacgttggcttcaaagtgaaccattgcccatggtggataaggggccctaggaactgctgagagcttgtgttccagatggccaaaaagcacagcctaaaaaacacagccaaaaaagcagaggtgagactggtcaagacttgggttttggggccaccagatgttattcctgaattcctgccttcaaatataacagataattctgtttaattatgacaaatgtgcacttctattaagaaaaagggcttgctacaattggctttatacatattcatacttctgtatgattttgaaattgttgacatgaaaaagaccaattgaattcaaaatatgttcacatttttgaattatttgcaactttaccttggaagaaaaggaagatctgttttatactctaaatatagttagaactgttgtgcatgtttattgattttgagaaattaattttaaactttttaccacctatttgagtgaattattgctgatgctggtttttgagtatgtatagtgttcattatgcaggagtcatgataaaagattgcatatggcaatttcaagtataagtctgataaagttataatcatgaaaaagttgaacattctcaaatattttaaatcatatttagaactttcagataaatttaatattgaattccatatatttaaaaatttactttaaaaatattaattgtataatccaaagagaacctaatagccttttaaaatctgtgcctcattatgagtgctctcataatccctaaagtttacaccagtatacattatttgcatactctcattgtttacatgtgtcataatttgaaaacctgggaagcattgtgctacagtatgtatttagaaatagaaattctgggttaaacgacatgaacataatctttaaatgacaatgcctaattgttttccaatttacactccactccgagcagcaaagttcaaatgtacttgttccaaatctctgccagcacttggatggttttaaatttttataaatcttggaggtgtgcattttaaatttgtagttccctggttaccagtgattttaaatatcatcttacatgtttattgatcactcaggtgcttcttctgttaaatgtcaatccatatattttgcttacctttattgcttatctttttcttgtagagttatgtgagttctttgtttatcctggataatagtcctctgtaaattatttgcattgcagtcatcttcttcccataggttggtagacttctcattctctttctggagtcttgaagagcagaagattcttaagtattccttatggtttatatatttatatcttttgtaagatatgtctcctatagcaaaattattttcctatattcctgctgagaaagttttatggtttcaccttttacattagattttaatcactcatgaattcgtttgggggtaagtagctagagatcaatttattttttaatttcatataaatatttccatcactgatctacagtatagttctatcataagtcaagtttctgtatattttggggcactgttttgagactctccagtctgttttcatttataacttaaatctctgcacatatactccacagtcttaattactatcttattaaagtaactctaagaatgttagaatttttactgtaatttcattgaatcgataagaattgaaatctttcagcattaatttttgaatgtatgaacttgttatatcttgctattagactttaatatattttattatagtattatattttttcatgaaggtcttatacatctttttagatttactcctagatatgtatatttttatggtaatgtaagtaacgcatttttatgattatattttctacctttttgttgacaggaaattcagttggaattcaattaattttctgcagtgataacgtgtccagcaaactcgttatattcttctatgggtgctgaaaatttatctgtggactctttggggtactttatatagacaatcatataacccaaaataatgaaagctgtgattcttctttccaaactgtacctgttttatttcagttactcctcttacagtgatggccagaaactcttattttactttgggttttttttctgctcactcttcttcatgatgtcttcttggtacatgcatgtgtgtgtgtgatttgcgatggtgaactcatattttggggaatattatgtaatatactttgaggcctatgtgaaggtactcttcttactttgaagagtagggggatggtttgtattcgtttctatcaggtacctggggttgctttaaacttttgagttattttcagtacaccaagctagggtaaatttggttggactaagatatgttttggatttgtgtccacacccaaatctcatgtcgaattgtgatccccaatgtagtggaggggcctggtgggaggtgattggatcatggcagcagatttctcctttgctgttctcatcacagtgagtgagttctcatgagatctggttgtttaaaagtgtgtagcaccttccccttcattctctcttcctgctgctctggccaagtaagatgtggcttctttttcttcaccttcagccataaatgtaagtttactgagacctccccagccatgcttcctgtacctcctacagaaccaggagagccaattaaacctcttttctttataaatgacccagtctcaggtagttctttattgcaatgtgagaacggactaatacagactacaaacctgcctatgaattatcttatactcaaatgttttgtcttttttctattctgtgacagaattggagacaatttttttttgtctcccttaagttggcatgtttaattctagttcccacaaacctgaagggacatgatggttaactttttgcgtgtcaatttggctaggccacagcaattggatattttgtcaaacattattctagatttttctgggaaggtatttttagatgaaattaacatttaaatcaatgaagttttaataaagcaaattacatttcataatgtgggtgggcctcacagcagtagaaggtgttaatgaagactaacctcttctaagtaggaagaaattctgccagtagactgcctttgaactcacattgctgttcttacctgggtctccagccttccagtctaccctgcagattttggacttgtcagacttctacaatcacatgagccaattccttaagataactctcgccctctctagttctctttctgctcttatcctgttggttctgtttctctgaagaattccaacaaaagaaaaaaaaaagcttcttacatggcgggattctagctttatgtgaagggtcttctatttgactttccattttgaagctcctgggcattcattgtctccttgctttcaagtacattcagtctctgggttcaacaatctgcaaataaacaccaatgtcaatgcctagcttaccatcatgggagtgtgttttcatttagctttaagcctttaagtatttcttattaaattgatagctaattcatgcattagaggtatttttaaatgctgtgcatttttaggtattattttttgggggagttagagggttagccagggtcaccatacaactggaagtaaaatgataatttgtttccacagtgctatttctcatttgtcctttatctcacacatttacttcagctttgaagtagcagccctgatttctaggaaaaaaaacttatgtgcttcaaggatagcaatcagcagaatgcatactgctctttttagaacaagcattaaattaaagaggctgtggtgagctgaatctgagatgacatccatgattcctgcctcctgatgtccattctctgtatcatcccctctctgagtgaggacaggactctgaatacaatgaatttcattcccacgattaggtcacactttatgacaaaggctaagagattttttggatataattaaggtcctaaatcggttaactttgagttcattaaaagggagattatcctaggtgggcctaatctaatgaagtgatcctttaaaagagagcaggggcattgctgaaagaagtgattcaaaggatgagagaaactctcctgcttgcctcaaaggagccaatctgccatgttagagagccacatggcaaggacctgatagaggtctgtgggtggtgagagtaatcctaatccctggcagcaagtcagcaagataacaggacctcagtcatacatctacaggaaacaaattctgccaacaacttgagaaatctttgaagtggatcttcccttagtcaagtctcccaatgcagatgaagacagccatcatctttactttgtcttgagagacactgaacagaggacctagctaaaacaccaaactcttgactcagggaaacaatgagataatatatgagtatttttataagccactgagtttgtagtaatttgttatgaagcgttagagatctaatacagaagcaatcacacctaatgcacagagcacctacctctttttcctttgtcctcttaaatctcacatctgtttcctcctctagcagagagaagcagctttctcacaactattttagttccatgtggtactaatgatacaattgtagaaaaacctttccaggttttctttcttcaccctaatgatgtgattgattttggaaggaaacagcattcttctttgtaaatttagataaagtcttcaggttagtatggcagactagagaaagtttactttgcttcatttataggcattcttagcattttaagatatgaacaaattcatgtagaaaactaattatatttttaaaagaaaaatacaaattaagggaaattaattttaaaacctataaaaactaaaataaaattataatgatgacgattcatatcatcactgtataggggatataataagtgacaagggaacaccctggtaactcattcagtatgataagaaaacatccagtttctcctcataaaatatcatttatttaaagtgcaacgtaaagagcttcaacacttgcaaagcagtgtaattttgttttcaaatttatagttgacagaaaaaggtgcatgtacattacaatagttgtgctttgagggagacaattatttttgaccattgctaactatcaacatgtgctatcaaaaatgacatcttataccttgaacatcttgcaaaagtacactggcccaggacctacgtgaagaattggtttacggtgaagaagtgtttgactctgaatctggggaatcatatttgttagctctcacaaatttgttaataattctacacttcagcaaattactccaggtagaatagaatactagaaccaaagctgagtgacttcatgcagatgcatttgtttcatactatcccattgagttacatatatcataaaaggcctgagagtccagggctaagatgagaaaataaaaaagaattatgatagtcttagcagaaataaaaatgatagccaaaggcaccagcactgcagtgagaaaaaagctctccacttgttctttctactgcatgcacaggcaaacctttgcagagcctctagacatctaattactgtatttgtccatcaagaacaagcaaaactaaacaaaagcaaacaaaaaaaaaatcaatattcattgagaaactaggtatgacgaaatggggaggatttaaaatgtctgatcagggctaccaagagttggtatgtaagttactgcgagtgtcactgtgacagagtccttgccaggttttccgagggtgacagcctaaaaatggaaggaaatgtcttagccgtgtgttctcatcccactccacccctgcacaggaattctagttcttatcttatctattttaagacgagtagacctttgctgcatgtttgcagtccagtccaattccatgattacccttaaatacagcaattaacaaaaaagacactctcttgggtgctgaggagtctatgaaaaaatgagacataatctcttccctctaggatcttactgccagttgcaaatgcctgtgattgcactaataataccccgaatcccactcctactcagtgttgaccgtatctgccctcacctaatctctttattggtttcattttcttgatcctgagctacccactagattcatggtttatgttgcctaatctagtaatagtactttgcatcagtggtatttgaaccttgtgatccaaccaacttgtctgtcactcttattctgagcttcctaggttgtctcagcaagaatgtgcaactccaggtctggtagcacagaatgcagactgcagccttggccagcactggggatgttctatcctcccttctttctcctttgaagggaaaatgagaataggctctctaaagatttccctagaaatgttgctcagttagtagatactgacaaaaaggaggctgattaaagactacagcattctctccaaatacagaagaaacagtcagacagcacggcgctaaatgctaagaaatctgtgaattttggattggacagagggtatgaatctcaacaatgccacttcctagttgtatcctgtttgaaaaattactcaataatttaacttcagttttcttatgtattaagagaggaaaatatttttattttgcagaattattgtgagtgttagaataagattaggcatagtagtcaccccttaaattatagctgaacagtatagaatcaggtacaaaatgaagtatagctattaccacaaaattaatttttttatatgctggaaaaaatgactttaagggcaagaaaatgctaaacaatagttacaatcaaatattcaagcacaaattgtgtttgtcctgtagcagggtaaaaccacaaagaacctatccagggaatctgaaaatagtgctgaaattcctctgcgcagataatagatgtcttaaatacatgtgtgtttcacttatagaatagttcatttagatcagcgttcagagactatctattcttattttatcaaaaattttattaagctttgctttctaatttcctagttcataatatattagaaattgcaaactaaatggggagaaagagttctggatggaaaataaaggaactgagaatttaattactcaacaattaattccttgagtgttcagtgcagtatgtattttacatgggatttgggtgttgaaaaactaatctttacattttgtaaaatgtatgatgctatatatatatgtgtgtatatataaagtgtatgatgatatatatatatatgatatggcatagttatatcttgaaattctaaatattaaacctcacccacagcaaacaatgagaagacatgccagtaagttcttctaaaaagaagagcactaatataaatgatgtgactttttttaaattcctgacccaaagttacctttctgagagcctgtttgagctgaacggaacactgtgtattaagtagggtcaccttttcaatgacaatcaggagttttctccaacacaagagaagatctggctttattttcccacaaatgtttgcaaataaagtcagtttacaatccttttataaacagagaaatttaaaatattccacttgggatggataaactagattactacaaaacattttcatatttctacaatgtagtaatatgccaaggactacacaaaacatagaaattatcctactattttgctttggatagccctgaacatctaagaaatggtaatgccctgttctcaaggtagactttattgtctaccttcctcatgtcatatcaggcctttctgatgcataaccaagatactttcttaatgtcaagaagtattgcccaagaagtaaatggtacatatttatatacataatatatattctaaaactcagtatatgtattaggctgttcttgcattgctgtaaagaaatacccgagactaggtaatttataagaaaagaggtttaattggctcatggttctgcaggctgtacaggaagcataatggcatctgcttctgcggaggcctgaggaagcttccagtcatggtggaaagtgaagggagcacaggtgtctcacaaggcagagtgggagcaaagggggcgcactgtacacttttaaattaccagatctcacaagaattcactcactatcatgagaagagcacaaaggagatggtgctaaaccattcatgagaaatccaccctcataattcaatcatttcccactaggcaccaccttcaacaatgggattagaattcaacatgagatttggatggtgagaaatatgcaagctatatcgatcttatgttcttcagtgactattccccctgctcttaatataccaatctataaagttaacaagaactttttaataatatatgtgattcatacacatacgtacaattttacatcttactctatttcatttctctatttcataatgatttattttctttgagccctgagactaatttatattaattagggttctccagagaaattgaaccaatggaaaatatatatatatacacacataattcagtttatgtgtgtgtgtgtgtgtgtgtgttagttatataaatagattcatatcctattggtgtaactctaggtccaagggagaaggtctgagaacaagagcaggagggatgcactactggagtccgaaggcctgagaataaggagctccaatgtcaaagggtagaagaagatgaatgtcccagctcaaaaaagtagagcaaatttgcccttcctactcctttttgttctatttggaacctcaagagattgaatgatgccagtaaagtgagagtgatctttttgacagtctactgattcaaatgctaggctcttccagaaacaccctcacagacacaccccagaaatccagaaatgttctaccagctatctgagcatcccttagctcagtcaatgacacatttgaaaaacattttattccaaaatcgaaaacataaaaaaaaatatataggtaaaaaatgcattctatacgtggacacagtggctcacacttgtaatcccagcactttgggaggctaaggtgggaggattgcttgatccccagagttcgaggttatagtgagctgttatcagcctaggtgacagagtgagacctcatctcattaaaaagaaatacaagcattgcttaaagctgtagtacacagtatgtaaaataattaacttttttctaaatttacgtttgaagaatttacatataattatttcatttatgatttttttttgagacagggtctccctctgttgcccagactggagggcagttgcacgatctcagctcacttcaacctctgcctcctgggctcaattgattctcctgcttcagcctcccaagtagctgggattacaggagtgtgccaccatgtccggctttttttgtatttttagtaggaacaggctttcgccatgttggccaggctagtctcgaactcctgatctcaagtgatccacctgtctccgcctttcaaagtcttgggattacaggcatgagccaccatgcccagaccatttgttctttttgagatttgatagtcataggggaagaaattaacttggatcactagcttattaatctataccaaaataattactttgtgatgtattgttcaatgagctttgattaatgcggagtcatgtaagcccatattcacccaacatcacaatcaacaaatcttattatcctaccaattccttcaggttgccctttgtagccacttttcccattgctaactcctgataaccagtgatctcttctttattgctatagttttggctgttgcagaaagtgatgtagatagaatcacacagtatgtaaccttatgagtccagactctttgattgaaagtaatgtacttgagattcattcctattgtgagttataaataatgtattcttttgtgtggctgaatagtattctattgtatgaatgaatgtaccatcatctgtttatcaatctggcagcaaaagaacctttgggctgtttgaattttgttatgattatgctacaaagctactataaacatttacatatagttttcctagtgtgaatatttttttttttttgctcttggaccaatatctgggagtaggattgctgagtcatatagtaaggatgtatttaatttataagactgtaaaactgttttcaaaagcgactgtagtatcttgcattcccaccagcaatgtatgagagtaccagtagctgtgcatcatcactagaatttggtattgttggatgtttttatttccattgtaagaggtatgtagtgatatctcattgtgtttttgagctgcatttccttaatgacaaatgctgttaaactccttttcatgggcttattagccattcttgaattttctttggtaaaatgtctgctcaaactgttcccagttttcaattgggttttaagttttcttattattaattttgggagtcacttacatattctcaacacatgtccttaactagctacttaattcagaaatattttcttccgatgtggcttaaaaattaatgtattttaaaagttcttaaaactcttcaaagagcagagctttttaattgtgatgaagtccagtttattcattttatttatgaatcattccattgattttgaatgagtttgctcattagagctcaaatgtttgtcttgcccaaggtcacaaagattatatcttgagatgtatttttaaaatttgtatagttgaacaatgtggggtttatggacaccaacccccatacatcaaaaatctgtgtataacatttgattcccccaaaccttaactgtcaatagccttcagttgaccagaagccttaatgataacataaacagttgattagcacatattttgtatgctatattatatattttgtattcttataataaagtgagctagagaaaagataatgccattaagaatatcataagaaagagaaaatatactattcattaagtggaagtggatcatcataaaggtctttgtcctcaacatcttcatgttgagtaggttgaggaggaggttgaggaggaggataaggaagaggaggagttggtcttgctgtatcatgggtggcagaggccaaagaactgggggaggtagaaggggaggcaagagaggcaggcatattcagtataattttatggaactacactataatttctaactgacttttttgctttttcaaaatttctctaaaaatactatgcagtattcaatatcatataagaaataaaaagcagtgctgagtaattcaaacccatcttccagattacctgatatcaatttgttttctggcactgcttcttctatgtcttcttcctcatcctctggcactggttctgaagtgctcatcttcaccaaattatcttctgttaattcctctggtatggttatctattagctccaagattcatatatgagacaacactttgtctcctctccacccaccatcatttttcccacatccacaatctcttacatgatttctttgattggctctgttgtatgtcctgttaagtaatgtacaacatctggatacagttttctccaggaggaatttattgttttgggcttaacgggcttttacagctttttccataaagatgatgccatcttgactggtgtaattcttcacaatttttatgatattctgtcaggattctgttccatagcattgacaatcatttccataaaatactgtgtgtaatgagccttaaaggtccttatgacctcctgatctagaggctgaattagataacgttgtgtttgggggcaagcagaacagttgacgtctttgctgttgaactcatgacactctgggtgtccgggggcattgttcattatcaatttattggtatttttgccaaataagaacttaaaaggcagtcacctactggcaaggcacttcctgacttcagggacaaagcatcgatgtatcccatccagaagaagtgttcctgttgcctagtgtttattttctcccttcaaggcttgggggttagcagctttgtagataaggacaatcctgatcatgaacctgactacatttccacaaaacagtggagttagcctgtcctttcctgcctgaagtcctggtgatcactcctcttccttactaataaatgatgtcctttgtggcattttttccccatagaatagagcattatctttcatctgcattgaaaacctgctcaggcagatatcctttctcctcaatgatttttcttaatggcatctggaaactccctggtttccagggagcctcttggtcattagttgcttcttctccttttattttgacattttaaaagccaaacctctttctaaaattatcaaaccacccttcactggcattcaattctacagctttagatccttcaccttccttttgctttaagtagtcatataatgactttacttgctctcaaatcatattagagtttataggtatgccttataacaatcctgcacccacataaaagctatattttcaatacgagataaaatatatttcacaaaaagtgctatgttttcatacctgctggtgtagctgcagggatggtttcacaaacttcctttttttaaaattaaaattttttaaacaattgtttttacactggattcacttaccttgaaatggtggacaactgcagctgttgacctcaatctgtggtacatatcaagcaattcagctttttcttgtaatattacaacttttcctctgcttcttgggagcacttttagcatcactagtgacactctgtataggtctcatggtgttattcaaggtttacagtattgcagtaaacatgaaaaatacacaagaaccacaagagatcactttttagtgtgatacacaatttattggagagacaaactgctcatgtggagatgactagcatcacacagcattttaagtggaaactcgcaacactagagctcactgcgatagcaataggaggtagctataaaattattacagtagtatggtatgtgctgtaattttatccagttataattgtatactgcatttttatgtttacatttctctcaacagcaaatagtgccatatatggtctgtgtttgtgtaaattttgatacattttaactttttatcatggagttgtgtatattttatagtaaataaaataggctagtacctacatatattttacacattgataacatacctaacttttacaccacttttttttatgtttctgggctacatggtttgtctgtgagttatcttaaattattgcaaatcttgaaaataaatttcaatatatttattaaaaaatatccatatattagtggaccagcacagttcaaaccagtattattcaagggctaactgtactttatatttagatgtctgccatgctgtttatttttgcttgatgcaaggtatttattcccatttttactctgtatgctggctgcacagttctaggaccccacctgccctcacatcatagccagaagataaaagaggaaacaagaattcaggaaattccccatgataccagttggttttcaagattttactcccttcccattgggcttacttcagtctttaagtagctgttttctgtatcctctctagagtttttggtgaccattggtgagagagaaaggctatagagagcttcctttatcttgggtgtcaacagaagtcagatttttaccactttatattagtttttacccatcccagaatttcatataaatgggactatacaggaggtactcctttgtgtctttttttctctcatgtttttgagattcacccatgttcttgcatataacagcgttttgttcctttatactgctgagtaattccattgtgtgaatgtgtcacagtttgcatatccattctctctcttttttaaaaaaattaatgtttatttccatattgcttaagagccggtgcaagtacagcttaagaccattcagtggttgctcctacctgttcagtggcctgagcggtgggagccacacatcagtcttctgtggcaggctgagcactccaggcttcagaaggaaactgctgaataggcacagagggcacctgcatgccttcataccagtctgcaacttcaggctgagtagcggtgaactcaggagatggagaagtccattcaccctgaaattcctccttggtcagagccttttcagcagcagcttactcttctttttcagtctcttcaggatctctgtagaagaagagatcaggcatcccctcccacaggtgttcacaggaaatggtgccacacatgtgcagaagtttccaggccagcatccaccacatcaaacccactgagtgagctcccttcttgcatgggatggcaatgtccacatagcacagcggagaatctgtattacgtggagcaatggtatgtaagttaacataagatgcctctgtgagaggcagtggtcagccctggaatcagtaaagaaaagatgctgtggctcctggaaggttgcctggatctggttagtgaagattccaggagtgaagcggccagcaattggagtggctccagtggcagcagcaaacttcagtatggccctctggccagtattcctggaggatatgacgcggacatcagcagggttttcaatggcaacaatggcacaagctgccaacagaagcttctcccaggtcctcttcagatttatgatatagacgccgtcacatttctttttataaatgtattgtttcatttggaagtcaaggttggtgccacctaagtggattcctgctgcaaggaacttaaggacatcctcctcctccatttgcaggacatcaagggctctgtacactgtaaaagtttccctttaagttacaacaggaatctagaacatcgccatatggacccctctctgggtagcacaaaaaagcccattctctagttgatagatatttgggttgtttccaggatttggctattatgagtaaaactgctatgaacatccatgcataagtctttttgtgaacataggctttcatttatcttgggtaaatgaccaggagtggaattttagatcacttagaaagtatgtgtttcactttataaggcactgtcagactgtgttactaagttgatgtaccattttataaatccaccagaaatatatgagcagaccagttttttaaaatctttgccaatccttgatattgtcaataatataagtttaaaaaggggaacaataaaagtactagacagaaatgtagaacatattttgtaaaaacagaataagagaaattgtttctaagtgatagttgaaagcttgatgtcataaagaaagcttgactccataaaacataaaataactacatgacaataataatgtcaaatgagaagagaaaaaaatgtctaaaatatttgtcggacatattaaatatattaatgtccttattttttaaagagctcttataaattaatatgtaaaatacatcgatccagcaaaggtgaagagcaggcagttcataacagaaagatattttaaaggtgtataaagttgtccaatttcactcaaaattattgaaatatgaattaaaacaaaatatgtcatacttctatcaaataaaaagatgatttttggctatgtactgtgttggcaagagttttgggagaaagagcttctcatacactgttattggctatattaatttgtattttcccattggaccacagtttactgtatacacagtgctttgggaagtactctcttaaatgggtttttcttctgctctcacaccaccacaataataatcaacacagaagaagacttctctgaccaaaagtgaggggtttttaaccatacaacaagcagtggacaacagctgggtgtcctcctattcagtaccaatactatatacccagagacagtgtcagatcccacaggttaatactcaacaccataagatcatcctctccttccctgaagtcgcaattccaggcctctggaacttctgaccaattggcttcaagttggcgctcccacgatcccatctttgagattgatttatttgttagagcagctcacagaactcagggaatcatatttactggcttactatcaagcatattttccaagatacaaataaacagccagatgaagagatacatggggtgaggtctgggaggatttgtaagtgcagcagcttctgtccctgtagagttggggtgcaccaacttcctggcatgtgaaagagtttttcaccttcctgtcatgctcaatgtgttcagctctccagaagctcctggaactccatcctttgggccttttatggagaattcattggttgtcaatgattaaagcatggacaactatgtcaaaatgtgattggacaaaaaggatgtggcctaaactcagcaagccttgtccattcagattcttcttgatctctctgtacagcattccttcctctggagtagggggcaggaccctctctagaatgagggttttatgacctataattggactatagtcctatctcgggtgggtaaaaggaagacagaagttcagagagaaagcttttgtttcctcaggcttgcttctgagccctaaatttctccaacattataaccaagattgtgacaatgattatgaaagttacgaactaggaaccacagatggaaatgaatcataatatcacacaggcattaggatttaatgttgaatgtttataaagtgtattttacatatattgcctaaatttatactaccaacaccacaagaattagttattttatattctcattttaaaaataaaaaacctagagtttagagagatgccttatccagtcaggtcatataactagtaagtggcatagcttggtatagagcccttaactttgaatttcaagttcagttacattttcattaatcagagttgacttaccttgaaacacatgtgttttgtacatcaatgcatgtcactatttcatgcaatgaatgtaaagatgctacattttattacctagataatgtgctggttttgtcctatttctaagtttgtagaattgctgtagaaatattgagaacattccttttttttccttattaaaatcttgaagaggtgcttttatttttatttatttttgtctgctttcaggacatgttttaaaatctatcatttggacaatttgggttaataatctttgttttagtgttttaaagaacagcctcagtgaaaatgctttattaacgtgataaatgataagtttaaataaaataaatgaaaaaagaaagtgtggttttgaaataatttatctggcacagcaccagattttgagagagttaattattacaagttgctgaacattactgcaattttcacatggaaatatttgcctctcctatttccttgtgttattgaagacatattatgaaagccataatatcagcagcttgcaatttggaactcatttgatttaactgataagaatctttttcatttcacaaaacataacttcactcagaaatataaaactgttctgctgtattaaacagtgaataatatcaggataacaatgttaattggcttttggactgggagtatttgaatgaactctcttctccatcatttttccattagattttgcttgaattactcaaaaaaccaaggtatttatcctgatttgtaacacaatacaacatttctctgataagtgttttcacatttttagaaattctctgcactgtaaacagacagagaaaaacaacaactactataagaaaacaaaacaaaacactaaagctactctagaatgcatgttgagctggatggccattaaacatttgttcaatattcaatgataatcttcatgtcaaatagatcagatagggcattaggttatattaagataaaagaacacagatgagtttgggagccaatcctgttcagacttgaatactgactgcttttgcagtctcccctcttgtggcaggattgggtactggttaatgatgtgaattctgccctaaagtcacctttctttggccaccttctagctgtgtgatttagtgaagactaacttgctttctgtacttcaattttctcatctgtagaataaaagtaaccacctgcacacagagagagttttaagaattaaatgggataaccaagagagtgcctagtccagtgtgtggaacataacaaatattaaataagcattcattttcttttttccccactcctttacttctcctttgccttccctccagctatgaaagttttcagctcggaggggcttgttgtgggccatgcactgtgcctagactacctctcaggaagacacctgttgcccctgctatggttgtgcattggtagagagccttcagctgccagcccctccagcgattgcgttggatactgccaactgctttaataaaagtcagaccctttcccagggcagtccacttctaaatgacagatcactccttgcatgcagaggctgggccatctctgcccacatccttgtcactctgaagggtcattctaaatccagagcttctctgtggggtctctgaggcacactctatgtgtgcaggtggttacttttattctacagatgagaaaattgaagtccagagaagcaagctagccttcactaaatcacacagctagaaggtggacaaagaaaggtggctttagtgcagaattcacatcattaaccagtacccaatccaccacaagaggggagactgcaaaagcagtcagtattaaaaccttgataggattggctcccaaactcatctgtgttcttttataataagtttatcataagtttttttttaacctaagttcattaggcctgcatcacaactcaatgtcttgctctgttcaatgctgctttcctctctctgttctacagagactgatccaaaggatactttgataaacaacttttagttaaactccaactcagagtttgttctgcagagaactcaagctgcaaaccagctcctctctgctttttaaaagactttaaggaacatttgattcaaagcacagccaagagcacccactttactccctcatttcacttcctccacctgtttcacaccactgccagtaatctctcagcctaggtgagaaaagatccagcaactaatgtagaacactcactcctgataaaaaaaaaatccttagtttgagtaataatcatttctctcaggctgaaaagcttcatttcaagcaggctggactgttaattctataggtaagacccaaaaagattgtgaaacagtgatattaaaatctaatttacctcagtgttatattctatacagaactaggctgagattttttaacagcatagtcttatttggacaaaacaaaacattcaataccagtgttctgccatcaatagtttctactgctattaccaacgaaagcaacaatggcaataataattcctaaaattttgtataccatattacatttaaaaaatccaatatgtaataaagaaataagaaggttaacagtattacttagttactatatataaagaaaatgaggcccaaactgcttaacagttcatgaaagttcacagaactaattggtggaattgaggctgaattcagacttctgacattagacttgatggtttttctcctacattgtgattaaaccccatatcacttacaaaaatcaagtctgtttgggaacatgaatacaaataaatagtgttaattttttcatattggattactggaaaaatgtatattaatagaaatacttgtccatagaacacagctttgcagcatattcatcccaaagagctgaacttgcctgcgcacagcaacaaacaaattactttactaatacacatacactgacaatagttatgaactccagttactaacacaggcaatatcacaaagacggataatgtggctttcccaaggataaatatgaaatcggtggggcatgtgctagggccatagtttgggaaaagtctacttgtgtgttctaaatagactttcccagggagtaaatggaagcttggaattagaaactgggtttcttcgttccaccatgtgttgacctctggatacagaaccaaaggaagctacatagtgatttgaacagcaagtgccctatagagtgttctatatttagaaatcacactgaatacattggcagaattataatagcatgatgtactttgtggcattactttgctgagaggagtctaatgattgttttgttgacatatatcagatatctcaactgacatatgtcaaatgttaatcacaaaaacatgaaacaatttcattttattcacttaatcattttgattgtcattttctcaacattatcaattagcatgcatgttgtttgctgcaattcatttgtaagatcaattcaagagattccaaagtattgaacaaattttgctcaaaatcagtgaaaaaagcatcttttattaaaattcaaaacaatgaaaattcataaagttgtattggtaaaggaaaattttgctgtggcatgttcatcattagatgatagcaggtgttatgaaggacagagctatttcttaatgttaatgtcccatatgggtgcacaggcaacaattatggtctgctggggactgggctgcagacttctctgctatgcatcacaagtcacaataacagctacagtgaactagagtaataaatctttcctgaaacaacaatttggtatttacttaagtttgtgatgactgcatgctctattttgaagcatagaataactgagaattgctttatgaaatcttatgtgacatccacaattctagaaatcctctccaacctatacaaacaagaagaaaatctcaccaaatctaatacttttatatatctctttgctataagaggaaggaagagaatggtttttatcattttgggtcttctttctggctaaattgtcgtgtagaagaatatacaatgaaatattttctcaatattttatacatttttggcactattcccatcgtaaaaaattgtcctggcatatttggatgggtttttggattttcacacttggagcaatggaagacttggtaccattttattcatctttttagctgaatacctatcagaacactggcccatagtaggttttcaatactagttattaagaggatggcaaagatgaatgaagcacactctctttgttctcatggaactcattagaacttcatggagacacctgtgtgagatgactttttactacacttaaaaagagctttatcatgtttaaagcaccatttatttctgaatcactctgtatccttctttccatgacagatgaagaaaatcatcaggaaaagaatccccttgtcccaccagctgtgacatctccatcactgatttttctgctgtaattactaatagcagaaacaaattactgatgattgttaactatgataaaaatgttggatatagctcatacagaatcacaaaagcagaacagagttctggcctgtgctctttttccatgccaaatatggttctgattactaagttacttagtaaaggcattctaatttaaattcttcaaacaatgattcatcctaggggataagaaagattactcgctttgggaagtagaattccttgacctttggttctttcttgtttgctggctctattttttttccccttcttctcacatggaggtgctcctgggccttctgtctttggccctgttctcattctttatgttttgcttcagcaatatttattccttcactttctactattacctgtaaatcaatggaacctatatttgcacaaacccactatttctagtcacgatcttcccagcagtgtcaggcccacctttctgccatctaactcccaactgaaattccaaggcaaatgtatacacacctgtgtaatcactaacccaattctcatctcgaatactttcatcaccctaaaatgttctctcatagctctttccaattaatccactctaatcaccatccccaaagaactgattatctgatttttaccactatatattagttttatgcaaaccagaactttttataaatggaattatacagaatgtactcttttgcatctgacttttttctcaacatgatatttttgagactcacccatgtttttgcatgtatcagtggtttgttcctttatatattgctgaggaattccatacgaatatataacagtttgcatattcttgttgatagacatttaggttttccccagaatttgactattataaataaagctgctatgaacgtccaggcatgagtctttttgtgaacatttcttttagataaatggccatgagtggaattgcaagatcatatagtacctatatgtttgactttctaaagcactgccaaactgtgtggcaaagttggtgtatcattttataaatccaccagcaatagaaaagaataccagttccttcaaattcctgccaatatctgatatcgttagttcttttactcgttctggtagatgaatagcagtatctaattccgcttttaacttgcattttaaaaactactgtgtactgagctcattttcttgttttcttagtcattttaaaattatactttacaaaaggcccatcaaatcttctgtccattttcaaagttaatatgtttttcttactggattgtaagaattatttatatattttaaatgcaagtcttttgctggatatatatatatttggcaatattttcacccagtttgtggcttgcctttcactttcttaaaagtgtctttcaaagtgtcttcaaacttcagattctgggttgaaaattatttgatttaagaatgttgaatattggtccccaatctcttccagcttgtagagcttctggtgagaggtctgctgttagcctgatgggcttccctttgtaggtgacctggcttttctctctggctgcccttaacaggttttccttcatttctaccttggagaatctgacgattatgtgtcttggggttgatctcttcgtggagtatcttaatggtgttctctgtatttcctgaatttgcatgttggcctgccttgctaggttgggaaagttctcctggataatatcctgaactgtgttttccagcttgttcattctccctgtctccttctggcactccaatcaatcataggttcagtctttttattaagtcccatatttcttggaggctttgttcattccttttcattctttttttctctgttcttgtctgcatgtcttatttcagtaaggtggttttcaaactctgatatcctttcttccactttgtcgatttggcttcacaaggttctcatgctgtgtttttcagctccgtcagatcgtttatattcctctctaaactggttattctagttagcaattcatctaaccttttatcaatgttcttagcttctttgcattgagttagtacatgctcctttagctcatcatagttttttattacccatctcctgaagcctgcttctgtcaactcgtctaattctccgttccattctgtgccctcaatgatgagacatggtgatcatatggaggagaacaggcactctggccttttgggttttcagcattttttcattgattctttcttgtcttcatgagtttgtctagtttcggtctttgaagctgctgacccttggatggggtttttgtgggggcttttgttgttgttgatgtttttgctgttgctgatgctttctgcttgtctgtttttctttcattaggtccctcttctgtaggcctgctgcagtttgctgggggttcacttcaggtcttattcatctgatttgctcccgtgcctggagatgtcactaaaggaggctagagaacagcaaagatgggtacctgctacttcttctgagacctctgacctcaaggggcaccaacctaatgccagtaggattgctcctgtagagagtgtctgactatccctgttgggggtctcactcagttgggtggcatgaagagcaggacccatttaacgaaccactttgtcccttggtgaagagagtgtgttttgcttggggcaaaaccactcctctgggctgcctggatttctcagaaataccaggaggagaggctaagtctgctggtctgcagagactgtggccacccctccccaatgggctcaggcccaaggagatctgaattctctctctgagcctctggttggagttattggagatccttcagggaagccccacccactgaggaaggatgggtcagggttagacctgaagaggcactctggctgcagactgccacagccagtgcgttgagctgtggggaaaagtcttgggaccaagcagtccagcctccctggctccagcattgggaaagtgcagcctagagttacagaaatgggtgccaaccttcccctgcccaggaagcttagtgtgtcaggcagttgctagtcccagtgctggctgctgtccctcccacaaggagctcaaaaggcttagacagcagacaggggcagcaggtgctggtcacccctccccctggggagtttggtaggcttaagcagattccagctgagagtcagtaagaatgtggacattctgggattgggattccaggccctgttggtgtgggtttgtgagtgggatcttctgatccatcggttgcacagttctgtggaaaaagcacggtttccctggctgggtagtgtgctcagtcactgcctcccttggctgtcgggaggggttccccttccctgtgtcgctctcaggtgggttgccacaccacattgttcttccttctctctgtgggtcacaccagccttctagtcaattttgatgagagaatctggataccctggctgccggtgaaggcttcacatgcttattatggtttttttcggtggaagcctcgaaacggtgctgcttctagtcagctgtcttggccctggcccccccaacccatggcatgcatctttttatttgtattttaatcatgggtttatttagttttttttttaggtgttaaactttatcaaaagttttttgagggctattgaaataattttcttcccttataaagacagtgcaaatgcattttatcagtacaatttccaattttgaactacagtatacattcttggaatgaaacccattaggtcataatgagctgttctttcatgtagttcatttgataatagcatgcatcatatttcattttaatcaaccatgatgtttgtttttagtcagaattataaattcacatatttcagagcaaattaggtaacaaatttgtgaaaaggctgagtattatgtaaacaagagcagtcaaggctgtaaagaactgaagagtatttttcttgcctaaagacattatttctttttatttgtttatctgcttgtgtcctcttaaagttacaccaaattagctgagacacgaattcaccaggtattccaggctttttattcctggtatataatttttcaacacttattcagtgaaaagccaggccacagagaatctaagggggaaaaaagatcttgcttttttaaaaaattattttttaagttttgtgatgaggacaagcaataaaagccctctgttgaggattccccacacctgttaaaatatttcagatctctaagtggttctacagtaaggaaatctgttcatgccagtatttcccaggcatatttgaccacagcaataactgtttgcatacaaatcaactatgtatttagataaatagtgccctgctacgattgttccatcccttcattagatgttttcttagtgttatttagtactcaacaaacaaaagaaaatattccttattttacttgaaattgtaaaagtgtaaatagcattagaaacatacacgatagttgaaatgcttaaaaggttggaaatagtctcaacagaatttgtctgggctcagcatttgatgcgatagtggagagcagaaaatgtgaactgtggtcctttaaaaatgttgccaagagggaagacaaataaataaaataaaaaatgaaaaagaaagcttgtaccaagaaatacaaaggaccataagagactgctatgtacaattatatgccaacaaattggataacccagaagaaaaggataaattcctagataaatatgccctacccagaattatgaagacataggaaaatctgaacagaccaatgacaagtaaggagactgaattagtaatattaataaatgtctcacattaaagaaaagcctaggatgtgatggcttcattgctgacttctaccaaacatataaagaataactaatatcaatcttcctcaatcactttcataaaagatcaaagaggagagaatattttcaaacttttttttttttatgagaccagcattgccctcataccaaagtcaggcaaggacattacaagaaaagaaaattacaggcccatatccttattcaatatagatgcaaaaattctcaacaaaatactagcaaactaaattcaatgcattaagaggatcatccaccatgatcaagtggggtttattcctgggatgcaaggacagttccttgtatttctagtagtttttcatctatatttcagtgtgatgctaaaggacacataaatcttcagtattattgtaatgtttgcaaagtcatctcagaattataaaatagctttctcctagttaatattttattatagtatatattatatattattatatattataaattattttaccggtattatttcttattttgtgtataggtttgctaggcatttctctgcttattttttattgtctacatatttaaataattttctgtgtgtgatatgattattacatataacatacaatagagtttccatttttaaactcaactgagtttttttccagtggtcattttccttttatatttattgctgtaacagatatacttggcatattatcattctatttcaaacattctgctaaatgcttccttaatttctttttgtcttgcttaatttattttttaaaaattggattcattttcttgatctctgaaattagacccctctgtccctgcaataatctcgaaggtacataatctgtttaaattctacttgtatttacttttattcctttaaaataattacttaaatacataaactacatttctcaccataacataatagcaagctacatttctcctgcctaccaccactctaccaatattctgatattaactggttgtaattttatacccattatattaatagtgattatcatttgatatcacgaggcttttcacaacaaaatttagcatttgtattcaatgtaataacataataatttcatttatttatatctatcattcaaatggagtcagtgctcactgccaatccttttgtgccataattttattattcatgagtttatattttaaattcatattgaatatgaatgattgatgtatcttactgaggttttgcttatttggaaaaatgtatttctttttcttcacatgtgaatgataattaggtttgtgtgtcagacattcttggctacctaaccattatctattttatcttctaacttgccaccaaaattttcgttttgtttgggatggcgatgtacccagctaaatattttttttttcaactttctgagataataagatatttgtagtacgataaaagagtacacatgcgggttgattggccctctcaaccttctcttgaatacgtacaccacaagcatattcagtgttcttgggccttgaatcttagaaggttgaagacaatagctaacaggctaggaatgttggagaagaaaacatagtacctggccgctgagctgctggaccaagcatcatcacttgtcagcctctaaaatgcttgttatttgagatgagtggtgttcaagccacatcagtttgggttttcaattaccttgagctgaactgatatagtttgacattgaatatagctggttttaaccttgtccactattaaagcaaaactagtgtaaatggaacctctaaagaacaatagttatcctcgtagtcttcaatccaatttcaaacttctagagatattttcattatgttgatgatgtaacccaatattcagtattattctgggttactgatccttgcttgaacgtgtgaccagtcttaaaagctactggtctagaaccatgaggttgaatacaagtagctactagcctcatgtgtccaattaaatttatgtttattaacattaaatacatttttaaaaaaattagtacctctgttgcactagccacatttcagttaccacatgtggttagaagatgccatattagaatagcagatataaacattttaccgtcacacaaagttttattgggcagcactgtctttgctacacaaaatgtgctctcaagaccagaagcttcagcatcacctgggccttgctagaaatgtagaatcttgggtcctactacagagatactaagtaaaaatttgaactttgataagatttccaggtaactcatataaaccctaatgtttgatgtgcactaccctataagatctggtcctgcatgtatattggtcccaatatttaataataagctaacatttattgatatgtagcaagttactaagaactattctaagaactctacaaaatctcagtcagtcctcacaaaatgttaaaagggacattatctcccttttacgtattaaacaaaaaggcacagaaaagacataactttactaaaatcactctgtgaatacatcagggagccaaaaataacactcagtcattttgactagacaactcatagtgctggctccccagaactctttattataattgttctctttaaatactaggttttaggctctctgagggaaggaccatgtcttattctttaattaattttaatttaattttttttttagaccgaggcttgctctgtcacctaggatacagtgcagtggaatgatcacagctcactgcagcttcgattttctgggttcaagccatcttctcactcagcctcccaagtatctgggactacagatggacactattatttccagcaacattgattgattgattgactggttgattgtagagacaggtctcactatgttgttcaggctggtcttgaactcctggactcaagtgattctcccatcttagtctcccaaaacactgggattataagcatgagccaccacacccaaccatgtcttatttattttttgagttcagagcatagtagaatacttggcatacaagagattctcaatttctatttatagaatgaagcatgcatgaatgaatggagggatcaaggctcattttgtctgatgtcaagtggagctcctggtaactctgtcacaaagcctattctttttagttgaagtgaagaagactttgtttagctttggtaaaaacagaaatttgaaactattccacacaattttcactcttaagcaaataacagatccagcaaagagcactgtgtggagtactatgaaaagtgagtggatagatacccttagtgataagcatccactaaagcagttataaatggtttggagcataaaaatatgttaatgaccaaatcagaataatgacagctgttgtaataaacagacccaaattcccagatgtatactgctttaaacataataaatgtttatttcttaataatggaatattcaaaacagctgtacctaacaggcagctagctcctctcccaatggtgttctttccttgccttttgtgactctgccatgtttaccacacagtttacaagttctctatgcttattttgttttgttttgttttgtttttaagatggagtctcaccatgctaaccaggctggtcttgaattcttggcctcaagtgatcttcctgccttggcctcttaaagtgctggggttacaggcatgagtttatgcttatttgtaaaaattcagaagaaatggttaaaacaaaagtgtagagaaagcaaaccttctttctttctttcgtgttgttgttgttgttgttgttgttgttgttgtgtctgtggagacagagtcttgctctgttgcccacgataaagtgcagtggcgccatcttggctcactgcaaactccacctcctgggttcaagcaattatcctgcctcagcctcccgagtagctgggactgcaggtgcatgccaccacgcccagctaatttattttgtattttagtagagactgggtttcactgtgttccccaggctggtctcaaactcctgagctcagacaatccacccgccttggcctccaaagtgctaggattacaggcatgagccactgaacccggctgcagagtttcttttttaaccctcttgggtttaatcctcttggctccacctacatgcaagttgaggaaagtgctatgaaatttaatccctggctgagcagcctttccaaatcacacttttgtattatggtagagccaacacaaatactttgatggacaagtattcccctttttgtatatgctgagagcaaaaaaaccatgatttattttagtttagatcttcctaactgcagagcacgaagcaaggacttcgatgtagatagtttaatggaaagtgattccagcaaccaaggtgattgagtagagtcagaaaagaaaggaaagaagggaagctacggagctggttactgtggtacataatgaggcaatctcatttatgactctgacaaaatgtgtagaatgcatgtatattttccctctaaagtacagaagacaagaatacttagcccattgactcccataccccatgagcattaccccttcagatattaacttcgctgtagtcccaggctatgctgcaggttgtgttaagcagtcttgccaagatttggagaaaattctgaagcagaaaagatcggagtgtgttcagagctgtctacttttggaggctggaataggtagggaaagacgatgcaaaaccctgcataacaaaagaaaaagtatacacaaaacaccatacaaggaaagactagtaaactaaaattaggagagaaggacaaggaagaataaaagattgtcatgaaagagtcaaaacctttataaaacaatgtctctctagcataagagacatgatggacagatagaaaggaaagtaacatttgtcaaatactaactatattgaatttttacatacataacaccatttaattcacacaataattgtgaaacataggtattgttctcattctacaagggaggcatcgtggcttggaaaaaatgagttaattgttaaagcttatgtaattggcaagtgctgggttcctaattcaatgtcagtatggctccatgtcaatgatccttccactgaaaaagcagaggataaagaaaggtgactaacgatctagacagtaagattaagaaaatgaccaaggccagtgcccctcatactgtaatatgcatattaatcacctgcagcattttattaaaatgcaggtctgattaagtaggtctgaggtgaagcttgagattctgcattttttcatgggcttccaggtgatgctgatggtgctggtttgtggactacactttagttgctaaggtctggacatttctactgaagtcttgagaaaagagaattgttaaaataatattttcaacacccattcatgacttttataataaaaaagaaaaaaaaactctcattaaactaggaacagaggggaacttccttaaattgatgcagagtatctacaaaaaatatacagctaacgtcatacttaatggtaagaaactagaatccttcccacaagatcaggaaaaaggcaaggatgtttcctctcattactcctttcaacactgtactaaaagtgatagttaatgaaatagaaaaggaaagaaaataaaaggtatacagattggggaaaaaaataaaactgtctttgttcacacatgacattattgtctatgtagaaaatctaaaagaattgaccagaaaaactcctggaaataacaaacagttaaaataggttgtaggatacaaagttaatatacaaaagtcaatcacttttatgtataccggcaatgaacaagtgggattttaaattcaaaatacaatactatttacattagtatgcacaaaagtaaaatacttaggtataaatctaacaaaatacatacaagatctacatgcagaaaactgaactaaatgaatggagagatagtccatgttcatgggtatgaagactcagtattgtcaaaatgtcagttcttcccaacttgatttatagattcaatgcaatctcgatcaaaatcccagcagttattttggggatattgacaaactggttctaaaatttatgtggagaggcaaaagacccagattagctagcacactattgaaggagaagaacaaacctagtgaattgacactacccaacttcaaaacttattatgaagttctagtaataaagacagtgtgatattggctaaagaatagacaaatagaccaatggagcaaagtagaaaacacagaaatagacccatataaacacaatcaactgatctttgccaacaacatagcaaagatagttttttttttcaacaaatgtaaacctataaaacccctagatgataatataggagaaaatgtagataactttgggtatggagatgactttttagacacaacaccaaaggcatgatccatgaaaaagttaaattttagtaaaattaaaaatttatgttctatgaaatatacactgtcaagagaatgaaaaaacaagctacagactgggagaaaatattttcagaagctatatctgataaaggactgttatccaaaatatccaagaacacttaaactcaacaataagaaaacaaagaacctgcttaagaaatgggcaaaagttttatgattgggttttacatttaagtctttaattcatcttgagttaatttttgtataaggcataagaaaggggtccagtttcagttttctgcatatagctagccagttttcccagcaccatttattgaatataaaatcctttctccattgattgtttttgtgagatttgttcaagatcagatcgttgtagaagtgtgaggatatttctgaggtctcttttctgttccactggtctagaagaaaacctaggcaataccattcaggatgtaggaatgggcagagacttcatgatgaaaatgccaaaagcaactgcaacaaaagccagattgatgggatctcattaaactaaagagcttctgtacagccaaagaaactgtcatcagagtgaacaggcaacctacagaatgggagaaaatttttgcaatctacccatctgacagaggtttaatatccagaatctacgaggaacttaaatttacaagaaaaaaataaacaaacccattgaaaagcaggcaaagtatatgaacagacacttcgcaaaagaagacatttatgtagccaacaaacacatgaaaaaaaagctcaacaccactgatcatcagagaaatgcaaatcaaaaccacaatgagacaccacctcatgccagtcagaatagcacttattaaaaagtcaggaaacaatagatgctggcaaggctgtggagaaataggaatgcttttacactgctggtgggaatgtaaatcagttcaaccattgtggaagacagtgtggtgattcctcgaggatctagaaccagaaataccatttgacccagcaatctcattactgggcatatacccaaaggaatataaatcattctactataaagtcacatgcacatgtatgtttattgcagcactatttacaatagcaaagacatggaaccaaccccaatgcctatcaatgatagactggataaagaaaatgtggcacatgtaccccatggaatactatgcagccataaaaaggaatgagatcatgttctttgcagggacatggaaggagctggaagccatcatcctcaggaaactaacacaggaacagaaaaccaaacactgcatattctgacttataagtgggagttggacaatgagaacacatggacacagggaagggaacgacacatactggggcctgttgggggctggagggaaacgggaggaacttagataatgggtcaataggtgcagcaaaccaccatggtacacatatacctacataccaaacctgcacgttctgcacatgtgtcccagaacttaaatatatatatatattatattatatatatataatatatataatatatatttatatataatataatatatatattatatatattatatatatataatataatatatatataatatatattatatatatataatataatatatatatattatatatattatatatatatattatatatatataatataatatatatattatattatatatatattatatatatataatataatatatatattatatatattatatatatataatataatatatatataatatatattatatatatataatataatatatatatagagagagagagagagagagagacagacagacagaaaaaaacaaacagaaaagggcacaagatctgaacagacacccacctcaccaaagaaaatatacagatgacaaataagcacattagaagatgctctacatcatatgtcatcagaaaactgcaaattaaataaccaatgagatatctattagaaagaccaaaatccagaaaactgacaccaccaaatgctggtgaggatgtggagcagtaagaacgctcatttactgctggtgggaatgcaaatgctacagccactttggaagacagtttggcagcttcttacaaaactaaatatactcttaccatatgaccctgcaatcatgctccttgctaattattattaagaaattatacaataatttctcaatacttagaaatatttactcaaaagagttgaaaacatatgtccacacaaaaacctacacatgaacatttctaacagcttttttcgtagttgctaaaacatggaagcaaccaagacatctttcagtagattaaaggataagtaaagtgtggcccataaagacaatggaatgtgattcaacactgaaagaaaatgagttatcaagccatgaaaagacatgaaagaaatgaatgcatattgctaagtaaaagaagccaataggtaaaggctacatactctatgattccaactatgtgacattttggaaaaggcaagactataaagatagtaaaaagattagtggttgccagtggctagacgggtggaaggaatgaataggtggaacacagaacatttttagggcagtgaaattactctgtataatattataatggtgaattcctgtccttatacattttcccaaacccatagaatgtacaacactgagttaaccctaattaatataaattatggtttggtaacaaagatgtgtcagtgtaggttcatcagttgtaataaatgtgccactctgataggggatgttgatgctgtaatggaaaagactgcttatgtgtcaaggcaggggttatacaggaaatttctgtgacttctgctcaattttgctgtaaacctaaaactactctaaagataaaatcaatttttaaaaagcgggctgggtaaggtggctcatgtctgcaatcctagcactttgggaagccaggcaaaaggaatgcatcagtccacctgttgcagtcctagttactcaggaggctgggacaggaggatttcttaaatccaggagtttgaggttacagtgagctatgatagcatcaccgactccagcctcggcaacagaacaaaatcctctctctaaaaataataatgaaaactaatgatttttaaaaggagatattcttgcttaaataatggacttaaaataatttgtttatgtttacattatttagaggattctatttcaagctttatccatagagtaattaggattttctcaaaaatctgtattttctaattattgtagttaataaaaaatagagaaatactggcatcatgagaaatatacaaatctatgataccaccaaccacctattaaccaaggttattctgttcttaactgaatcaacctatacctctgctatttggcagattggtagaaagagatgatacccaaaaaggcttattttatacactatgtaaattcaagtgtataaaatatattgatgccacaaataaaattaaaaagtgtatattaaataagacttcctcacttttcatttggcatgccacttaaaattctggtatctccatggaacactccactaggtattactgatattgtaaaaacaaaacatacccaaagtctggcttctgcagaggtgtccctgatgccaagatttgcatttttgacctgggacagaagaaagcaaaaatggatgagtatccactctgaggccacatggtgtcagatgaatatgagcagttcttctctgaagtcctggaggatgcccacatttgggccaacagatacatgataaaaacttgcagcaaaattggctttcatatccaagtgtggttctactccttccaagtcatgcagaacagtaagatgttgtcctgcgctagagctgacaggctccagatgggtatgaaagatgcctttggaaagcctcagggcactgtggccagggttcgcatgagccaattcacatgtccattcactccaaactgcagaacaaggagcatgtgactgaggccttatacagggccaagttcaagtcgcctcaccagcaaatgattcacatctcaaagaagtggggctttaccaagttcaagtcagatgaatttgaaggcatggtggctgagaagcagctcatcccagatggctgtagggtcaaatgtcattgtgggttttgccattaaaagtaatttcttttgcaccgccctaatacatcctcaactgtggcctcctggaccagtggcagatgctacattcatgagactttccactgtgccctctcctctttctgcccaccaataaatcctacttcctataaataaatagtaagtaagacttaaatttaagcaaatacagacctaccatttaatagcctcgtgaagctgggcttgtgatttctttaaatctaaaagtctccagacttttagataagggtgaactaacacctatcccataaatgtcttatgctagtgttttatgctagagtgcctgggataaaagaaaagccaaaaccctattacccatgttaatattgagcccaaaagtaaatcaatagcagaaacagaatcaagcaaagcagctgggatagataactgtaagaatttcagaaagagtaagcaggaattttactcttaagccttggctggaaaaagaagtattcccattactattacagagttggctttatacaatgagtagcatattagtaagaaaaatgcctatgggtgttaggaatgtttataagtctattaatttcagaactaacactttctgaattcttcaaggtgaaatcagtttttattcttcctagcattgatccgtctccacaactcactctaaaaaaaatcaatggcagtttctcgctgggctctgtttggaaggaactggaagcaagtcaaacagctttggagtttatttttgttaaagggtgggcacaatagaggatgtcctcgacatctgcagcatctgtgatgaattattcattcctgattattctgagcagacagacttgtttgcagcaatatgtcacacatattacaaaagttagaatgcaaatgaaagggggtcaatcttatttttagaaccataaaaatttcttaatgtttagaaatattgtcttagatgttaatgataagaaatcttttaaatcaatttttggcttctaataataccttactcttatgtttatatttatattttatttatcaacattttagtggttggatcatataacaatcttatttttatgggtattctggaggataaatcttaaatatgacatctcattactaatttaacttgaattgtcttaactgttttcaataatgggttgaatatagaaatataataaaaagtcatttttaaattagtttgaatacatgtgaatcacaattgagaaacgtggtaaaaagaaaattccatttttttcttaagaataaaatatgaatttagtcttagtgtgtgctgttttattttgcagtttattatgaataaaataatattcaagagctatctttcatttaactaaaatgtatgtaattgctgataaatgtgctgctcaaatattccttatttagagtataggtagctgctattgaggccatatgtatcatttgctaaaaaaataccacttcatattttatctataccagaccctcaccaaactcttcaatatctccaccattgtcatcagcaatcaagagtgagcatacttgtttggtcatggctttgctaccttgataatatttataagattttattgtcagcctgcttcagtgaactgatgaataactgtattagtatttctatggaaaaacattgtctctccacctacaatagatagacctcaaagaacttgttagttgaaatgttggttggtactgtcaaagttatcatttctaaattggttttctattatattccttttcaatacccacttttatatgccagatttacagttattattcataaagaatttgaaaaattctgataattaacatggagaaaactttaaaatgatatgacacatcactttggagaactctatacttattttgccatatttccttctaagaatattcctgtctatattcgtgtctttcatatatacagtttttttaaggagccactgaatcatattatttttaagctgaattttttactataatatcttaagtatctttgcattttattaaatattataccacaacaaaattttaatgactacatagtatgaactgtatgaatgtaccatggtttcttctttattttctaatttgtcctgtattagaaatttaggctgctttccaatatttagctttagaagcaattttgtgatgaacaccattgtagctatactctgtccatatttctatttccttgggataaattctcagaatagcaattcctgggtgaatatataaaaacctcttggctgggcatggtggctcatgtctgtaatcccagcacatagggaggccgagacaggaggatcgcttgagcccaggaattcaggaccagcctgggcaacatgaagagactccatctttacaaaaaaaatgttaaaaaatagccaaatgtggtggtacgcacctgtggtcccagctacttggaatacttgactccaggaggtagaggctgtagtgagccatgattgcaccactacactccagcctgggtgatagagtgagaccctgtttcaaataaataaataaataagattttcaataggtactgacacattgtctttcagaaatatattaggtttgtgcaaaagtaatagtggttacttttaatggcaaaaaattgtgattacttttgcaccaaccgaatagtatcaatttatacttccaccaagtatgtttaagggtcctcttttacttgacccctcatcaaaacctatggtccactatattcttcagagtatatactagaaaatcaagggggagacatacaatcagggatgggggaatagtgagagtagaaataggaagacaaggaggccatgacctccaaatgttggataaatcacaactctgagatcactgtggaatgaagaacgtgtttgtttgggagactttgaggtccactgtgattttactatatgattccctgaaagtctctttcatgacttcccaagaaatttctcatcattggttttctcaggaactttctgctgtacgagtttgaaatgtcagggctaatttgttctctcaagagcctgattataaaagcattttaaaatcatgaaaatctatgcaaacatagaaaatatcgatagaaaaatgctatgggtgttaggaatgtttataagtctatcaatttcagaactaacactatctgaactcttcagaaagttagaaattatgataattcatactaatatcccaacaagctgataatcccaaaatattgttagaaatattaattattcataatgtgtctcccatttagtgtcttgggattatatcttctctcacctgatcactgaagaacagagcacacacttagcctattattatagattgcaaaataatttatagaagagagattagatgatctataaaaatacagtcactcattgctcaatttactgggcacaggttcaaagcattgttcaatgtctttcattcacactgtgtttcactcttctgtatccagctggctgcttctcaagactcacattcaccaaggtcattaatattttgaggtagaattaaagtgtgtgtgtgcatgcacgtgtgcatgcgtgtatgtgtgtggagagagagagagagagcacgtgcgcagagatttgagttcactttacatcaaatggaaactgctatcccaatgcccgtaaaggcaaaccagcctctatactctgcttagggattcctccaactaagttttttcctctgttggatacactgcatttcttctctatcttgagctacttttcaagttttaattatcacatctgattttagctaatatgctttttaattctaaaatatttatatgtcaatcttataatttttcgctgtggcctacaacatcaattatgaactcattttcataagatcactcagcttaattttccttaggagaaaaccttttgtcatttaaatccgttaaatatatcttcagcctcatttcatttgaggttgacttggaaatggtttcgttagatagaatatcaaattataaaaattgaataactatctttataaatatataaagttggatcttacactaccatttcaaaataagcttgttgaaatggctctactatgaattttatagctcaagttcattggactgcttattttttatctaaataaaattatgtgccatttctataggatgaatgactcagaagacacattttaaaaattctggcaattaatgagtgtctacatttaaatccgttttctttttttttttttttttgagatggagtctcactctgtcgcccaggctggagtgcagtggcgccatctcggctcactgcaacctccacctcctgggttcaaatgattctcctgcctcagcctcttgagtagttgggattacaggtgcccaccaccacacccagctaatttttgtatttttacatagtagagatggggtttcaccaccttggccaggctggtctggaactcctgacctcgtgatccacctgcctcatcctgccaaagtgctgggattacaggcgtgagccaccgcacccagcctaaaatttgttttctttaatctttcaaacccatattctaataactacaagttgtcagtgttgatggagaaatagatttaacattataaagttcctttttctagtgctcacagacttttatttccctgtttcttttaagtaatttttaatgtgtagcttttagaatctttgaaataaaagcagcttggttaatgaagatgttagagcattaaacttctttcaggaggtccaaaattcttatatgatcttatttgtatatccacttaattcattctgccttttgcaattatttgaactattaatttattattattattattgagaaaaagtctcactctatcacccaggctggagtgcagtggcatgatctcggctcactgcaacctccgcctcccgggttcaagtgattatcatgtctcagcctgccaaatagctgggattacaagcgtgcgccactatgccctactaagttttgtatttttagtagagacgaggtttcaccatgttggccatgctggtcttgaactcctaacctcaagtgatccacccgccttggcctccaaagtgctgggattagaggcgtgagccaccgcacccagcctgatctattattttaaatattcctaaacagttgtctccctttaccatggttccactttacatggtttcagtcactcactgtccaaaaaaaaaaaaaaatcaaatggcaaattacagaaataaacaagtcacaagttttaaattgtgctactctgagtagcatgatgaaattttggctatcctgcactctcctcctctggacatgaattatctgtccagcagatccacattgtagactttctctttccatgagtaacctagtagccctctcagtcattagatcaactataatgatatttcagtgcttgtgttcaaataacccttattttacttaataatgaccccaaagcacaagagtagtgatgctaacatatttttgtgattgttctattttactactagttattgttgctaatctcttactgtgcctaatttagaaattaaaatttatcataggtatgtatgagtaggaaaaacacatagtatatatacagttcagtattctcagtttgcaggtatccattggggctcctggaatgtattccctgtggataaggggtaactattgtatttcagtttgacaaaaagaagtcatgtttttaaataaatgttatcattgtatatttagtctgtattagagctattaagattcattggtttgctgggatggaaagtataacaacagcccccagggatattcaagtcctattctgtatgttaggttatttgacaaagaaaaattaaggttgtagatagattgaggttgctaatcagttgatattaaagtaggaaaattatcctggtttatctaggtgagctcaatataatcacaggagtccttaaaagtggaagcgggaagcagaagaggaagaatcagagggtggcagcatgaggactccaccagttgttgctggagaaaggggccatacaccaaagaaagtgggtgacctctagaagctagaaaagacagggaaatggactttcctctcaagcctccagaaaaatacatagccttactgaccccttgatcatagcccagtgagatccatgtcaaatttctgatctacataattagaagataataaaattgtgctgttttaaaccattaaatacttggtcatttattgcatcagcaaaagaaaaccaatatagttggtaatttggctgcctaagtaaacatttagattaaaattctacgttataatttaaataggtttaaatatactttgttttcccaactctgatgtttgactctatactttttctccacatagttttagtttaagttctagtgagcatttgtttattttgcaaaaggccgcaagctgtctccctgtttctgcttatccctatacccagtcgtagaaatatttcctgagttgcaattttcatttcatcaccctattgctcacaacttgggaatgacttctcaacttctttctcaatataattataattcttgattatgagttcttttttctctaccaacaaaccccaccttcttgggcaagtacatgtgccttcccagggctccaacagtactttgtctatacttgtattcccacctttcattgcactttggtttactcatatgcatccatctgctcccaccagattatcagctctttgggatattggtatagtgtatggcacatggaagatgatcaatgtatagtgaatacatgagtaatttctacaagaatactttctagcatcacatatatactgtgctttttattgcttctaatttcctgtatattccactaaccctgcactatacaggaggtgccttccatttgtttgcttgcttgcttttagacaaatgaattcctttaatactggtctctctttattctagaaaacatccattgcaaatcttcacgtgcaccgatgctgtcagatgttactttaatgattatgtttcagtgaattttggtgtctgcgcattttggtagtggaaagggctaactgtatttttatatgactctgagattgtatttattttttctgtctacttgccattccactcattttgttcagcctaaggactctggtgaaaggaaaggaattgtctcctccagattattgacttgacaaactggcatatccaggaaggataccaggctgtacaattttgaaacaatattatattagaaataaagatatgtttatttagcatgaagtaaagacaaagaagaaatctatttatctattcatccagagattgaaagactaccatataaaagaaggagtatatttattttcgattcattgttgttttagacattagaacttggatcaataggtgagaactatagggagaatctagcttacactacaattaaatatgtcagttctttttaattttaattattttgagagattagagtcttgctctgttgcccaggctggaatgcagtggtacaatcacagctcactgtaacctcaaactcctgggctcaagcaatccttctgtctcagtctctcgagtagctgggattacaggcacacactcacgttccactaattttattttttatttttgtagggatgggatcttgctatgttacccaggctggtctcaaactcatggcctcaagcaatcctcccacctcggcctcccaaagtgttgggattacaggcatgagccaccatgcctggcctatgtcagtctatgtgactatgtaggcactggtttcctgcatattttctaacaaaggttgtgccatcatctaaataaagaagatacatctttggggtgaggacaggacacctcttaactccatcttataaataaagtatgatattttttattcaccctcaatacaagatagatgtttagaaaataactcttgggttgaactgcttagttttgaatcctggctcccaagcttcctagttgtttgatcaagcaaacatttttttttttttttttttttgagatggagtcttgctctgttgcccaggctagagtgcagtggcatgatctcagctcactgcaacctcaagccattttcctgcctcagcctcccgagtagctaggattacaggcgctcgccaccatgcctggcgaattttttttttttttttttttttttagtagagacggggtttcaccatgttggccaggctggtctccaactcctgacctcgtgatacacctgcatcggcctcccaaagtgctgggattacaggcatgaaccaccgtgtccggccgatcaagcaaacttttaaagtattatgtgactcatttttcttctctgaaatctggggagtttactcccagtgctattgttaggagtaataagattaggcatgtaagatacttgagaagaggccaggcgcggtggctcaagcctgtaatcccagcactttgggaggccgagatgggcggatcacgaagtcaggagatagagaccaagctggctaacacggtgaaacccgtctctactaaaaatacagaaataaaattagccaggcgtggtggcgggcacctgtagtcccagctacttgggaggtcgaggtgggagaatggtgtgaacctcaggaggtggagctggcagtgagccgagattgcgccactgaacttcagcctgggcgacacagtgagactccatctcaaacaaacaaaacaaaacaaaaacaaaaaaacaaacaaaaacttgccaagagtgcttcacaactggatatcaataaatgttagctaacattattctcaacagtactggattagttaggaatgaggttcatttcccaataactaaaatacttaattgttttaattttacaattatatatgtaaaacagatttttacaaaaattggtaatagagtaacatgttcccctcaaatcccaacagtaatataaattactattcccagtctaatatatatcatatgagaattttatatatataaaatatttatgacacctatgtgtatgaatttacctatgtgtatacacacatatttactatactgcaccgtgttttcttgccttaattattgcatacatgtctccatttgtgtatataaggaacagctgtatcttattttttcacagctaaagactactttatattaaggatgtattgtacgtttttaattcttcatagatgaatatttaaaatttttaacaattgctatcagtgttatgatgaatagtcctgaacatcttgaacatattctattagtatccctttaagaaattcctagatctataattgattagtcacattttacatttgttacacttaacaaaattgtccttctgtaatttttagccaatttgtacccccaacccaactgtatgagtgtctgtttcccatcacttttaataatatgaggcatgaaaaagattttcaattttatccaaagtcatattttcttattttgatttacattcccatagttaatagcaacccttcatctgttttatttgatatttatatttacttctgttatttttactcatttgtacaaaaaaaaggacaaacatcttctcaaagttaaattctttgttttacttttgggctatttgtcattcttctaataatttgtagagactcctcatattctaaggagagtcacattttgtaacacttaaaataaatatacatattttcacttcttcattgatttttcaactttgttcatgtcttctgaaaaatataatttaaaaatatgaaccaaatgcagcatttaaaaaaatgtgcaccttgaagtcagaacaaaaaggctatttctaacctacgattataaacatatccttgaacatttacagttcgagtacatgacatttacagttctactttttctctaaatttttaatttatctgaaattcattttatctcttctttatttgcaaaagacacttttttccccagtggatagtcaaatatcctcaaaccatttattcagtaatccatttttattccacttattggtaatgtcagatatatttaatattaaattctcatatctatattggacctgtttctgggctttacattttgtttgctaatgtgtttctatttctatgtcaatatactacagtgatttacttgctagcaccttataatatttattgatatctttctcacaattaacttggttactcaacgaatgtcttcacctaaataaccactttgtcaaatcccttacctcaaaagaagaaagacaaaaattacaaaaaatagagaaagaatgatgaaagaggaactcatatctactgccattttgggagaaattcatttagtttacctttggtaacaatgtacatattaaggtgttgaagcttctcatcctgaaacattaattccctccttttatgactctccctgctatctctctcattctctttcttctgtattcatattagtattctagtaaatttatagctgaatttgacaaaaattgatagcttactcaatgtttaccttagtatttgcctgtatattttttctttaaaactaatgtctttgaatactaagcttttccaaagaaattgtttttttaaaatatcggctcagctcatttcttgttatctttattcctaggcatttgattgttatgattgttattctttttctttttaaaattatttgcttttgtaattttttttattatgtatctattatatttttatttttaaaattttctaatttgttattgttggtactgcttgtttcattgttattgtttggtattgtatgatttcttgaatttgaccattttttaattgaattttcactttcaaatggaatgctgctgctgatccctaactttgtgactttgtggatcagatagtggtcctgtttagtcatgtgatcacttgatatctcatggtcaggcatttggcttctatcaggaaccaatgtcaagccaggaattctttctcaaaacaggatagtcatctgtaaaagaggtcatggctttttttttcatgaccctgtgtcttgccctataattctcctattgggacttgccgtacttgagctgtacttagtgcaggtcaccactgaatgcagactttagtcaaccaaaaagcatatggagccactctcaccctcttgggctagtacaacaaatccataatctctctggcatgtgctcccatattaaactcaacttaattgaaacctatgttcctttttcctaggtctggaactcttagaatagattctcacatttctcaagtttctacacgcataatttagaaaaattttgtaattgttttgggtcataccttgtatttggtcttcagggccaagtaggaggtagaggagcatgttggaggctatgagtggtaagacatgggcatgaggaaagttcatgtctcctcaagaaaatatattaattgatgtcactgaagagccttcatgcaggtcagactagcataccaagacaacaagaaaaaaaaaaacactcttgttatcaaggatgactcaataggacattttggttaacagtgctcagacttatttatcaaaatactcaaattcaatttcttagtatttctatccttcgcaatagatatccaaaaattcacataaaatatatagtgaagctattaattcaatttacattgtttcattaatccattgtatctgatggtctcattttcagaaatattagctgtgagattcctttagaccatcgatagaaaatccctagtcctctgatcaggcaaagagttatgaatttttctttttgtttttgttttttaaatatactctattttttagagaagttttaagttcactacaaaattgagcagaaagtaaagagagttccattatgctcccctatcctcacaggtacgtaggtttcccactatggatatcctaaaccagagtgttacatttgttataactgatgaacctacaccggaacatcattatcactcaaaggtcatagtttacactagagttcactcttagggatgtacattctgtgggtttggaaaaatctataagaacatgtatccaccatgttggtattatacagaatagtttcactgccctaaaaaatttccactctctgcctattcatcattccctcctccctaacccctggcaactgcttatcttactgtctccatagttttaccttctctaaaatgacattcagctggaattatatagtatgtattcagactggcttcttaacttaataataggcatttaagtttcctccattttctttcacaattcattttttaattttttaggatggaatattcttccattgtctggatacacaccactctttatttattcactcatctacagaaggaaatattggttgcttccaagttttcgcaattatgaaaaaagctgctattaacatatatacagactttcttgtgtgaacgtatgttttcaactcctttgtgtaaatactaagaaacatgatttctggatcatatggtaagaatatatttacctttgtaagaaactaccaaagtgtcttccaaagtggttgtatcatttgcattcccaccaataacaaatgagagttcctgtggctccacatcctcacaagcatttggtggtgtcagtgttctagattttggtcattctaataggtgtagagtgacatattatgctgattaatttgcagttttctgatgacatatgatatagagcatcttttgatgtgcttatttgcaatctgtatttttttttggtgagatgggtgtctgttcagatctcttgcccattttttagcaggttctttgattccttattgtttaatgttcttggagtttaaatgttcttggatattttggatgacagtcctttatcagatatatattttgtaaatattttctcccagtctgtgacttttcttttcatcctcttcaaataatttttttttattttgccagtgttgtgagaatctacccactccacagtacctgtgatccccattcacactacgtcctatatttaccctcacttaacctgccttccatgggaatgttcttacaggcaattactaacaataatttaagtaacttttttgcctttgcactctatgggccaatattttattttccaactgcaagctgattagcattgtcttcagatcctaccaggttagataccagttacagatgtcctttcctacaggtctattgcatgaagacattcatggtatctaatatggtattagtcaagttctaactcaaacagaaattacactaaatttttttaagaagaaaggaatttagtgcaaagaaacaggtcttatcatttgaagagctagagaagtagcaatcaggaggctatcactataattattgaattcaagggtataccattgttacaacaattcaggtatcaaaggaaaaactattatgaatagccatatcactacaacattgtttgcctgtagaagcagcagcaaaaatagagctgcagttttattttgctttcaaaatctcatatgaatacatctaattggtagaaactagcttttatccaaaaccatggcttcagagtatggaaaatatattttagtgttctggactccatagcacagaaagacacacaaaagagaataaatgctaactatatcagccttagtcatactctataattaattacaacccacacacattattaaaatgtataattttgtgctaggatactacttgacccacagtaatagcgacacaagggttagctattatgattattatatttaacatctctttctagactgaaattgatatgaattcttattaacacatacgagtgacttcatcatgtccttatgtccttgtaaattcctaaaggactctgggggtccagaagagatttttaacaggtaaacaggtggcagtgaaggttcatgaccaagctccagacaaggagaataggcaggcagtgaggagttagatgggctccccacccctcacctgctctagctccagagaagcccttagttcctttgtgtcttgcactgttgtgataaagttcagctgagcattctcacagggagttgtgaaagagaaggaatcaaatatgtgcccttagatttttatactaaccttccatttccagagagaaacagagcttgaatccagtcagtgggagtgggggcagtgggatataggcattgtgaaagaagagttctatgcctgtttttttgatgctgtcttaatttttctgccaagcccgtatttttgtattaaatagtaatagtagaggttaggattgagccagtatgctgcaacatagactattgtaaggaatttgtttgaaaacttattttcacaatctagaccagaattaactacaattaggtaaaaattaattgctttcagattcagatattcagattgcagaacataaaagatgatcctcacatctttattttccaattccctgttaaaaatatgatgataaagacagcttctgcaacacactcaaaggctcttctacttccttataatttcatttcagttattctaatagagatatctcaagagtcaaaaaaaagtggatgctaaataagtagctaacattgattgctaaaacatgagaaattagaacatttccctaaaactacatatatatatcctggttctctgtgaaattaagttagcattttttttttgttcatgttctctctgttgcatcaggcctactgaaagttgatatggcagaaaaaaatagaatagaaaaatctgtgtattatctattgaaattcattagagaatgttcctccctgataatttttgctccattaaatacttattccaaattatcaaccataacatatttatgtttgagaagctcactgaaaaggaaactccatccagaggattctcatcagcttttccactttaacctgctttcccaagagaccctgtgctctgattgctaatcttcttatggagaaaaacgggagtaagatttccttagagacacccccgtccctgaggtaagaatgggtgaagattactaatcagaatggcaggagatacagaattttaaaaatgtaactcagttcctcttcagatatttttataagctgctacaaaaaatgaagaaaaactaggtctaaacctcttggacaaagtatactacttacccactccataacgattaaattgagacagaaggaggttctaaaaatttatttcagaccctctctataaaaatgcctgtttgtgagctgacccctcaatatgcctttcttggaagcattaatcactcattttcaggaacttttttttctttctccagggaacttaaatagaccatgtaaggctagaagtttaatgtaaatacaactttttaattttcttctccagatcattataggctgaagtagaataagaaataaattacagaaattatattataccttatcactggacctagttttggtcataaaaatgatacatatcattcagagtctgccagtgttggaagttcagactaaagacactttttcaattatggaggagaaaaaaatatttgttaaaaaattgctctattaaaagttgttggcctttctgcaaaagagcaggtagactcttcccattctaagcttttttttccttttcattatcatgcatttacttctcaatatagaatcacttgatgctgttcaatatatgaaattttacctgagagcaggatctcagcttatagttcagggagtgcaatatggccccaaagggtattcccaaaaggaaacagacacaaatgccatccttatagccagggtgcttctccagtgaagtgagtaacagaaatataaccaagtgacatttgttccagggattcctacacagttttggataaatctttttgaaaacagtttatcaaatgtaagtgtagcatacaaatctaacaaaaatgattcactttaccaagcaccatatcaggcactaagcaaacataaggaagtatcactgtattaaagtaatgatgtaatatgccttgggatccaacagacttggatttaattcttgcttaatcacttccttgttgtttgtcttaatctgttctcaagctggcttggggaaaaggaatttattgaaaagtccacatgtttctagactttgcttctcttctccttctaggttttattccatcagacaggcttgtgccacatggctgaaaacattgctactagaggtgactttgcctcattatctctggccccaattttggatcctggaaaaagttttataattgtctgatttaaggtaagcaccaatctcagagacaacggtctatttctgagagtagatggtcggatggtctgaaatggtattaataagaatatggcattttcaattcgtactatgtggttgcaatgatttccatattagagaatggcctggtggattcatgcctaaatccatttcagttagcctcctttgctacaagtaagagaaattcagaccaaactggcttgggcaaaaaggtatttattgtccagcattacagaaaagtccagttttagattcagctatacaaaggtgttaacatcatatcatcaatttctagtattctctttctctctctctctctctctctctctccatttcttggcttcacttcattttggacttcttctcttaaaaaaaactttcattttggtgccaaaatggctgcagaaactccatctttgtagttttaaacccactggaaatggcaagcctctttcctagtagcccccatggaaatataaaggtttattccagttagactgccttaagtcacattttaacatgtgaaactgatagtgtgactacaataacgttggatagtttagattgactttggcttgagtcaggtgctcaagcaggtagcagaggtatggagccctacacagaagatattgaaaattttttaaataactgatgctcatctaaaaactggggttattgggagagaattgtggaatggaggctggaaaaggcaaacacaaaagtctgtaaataatgccctatggagaagtaataagtataaggtacagtaattgtgttaacaggacactttctcaaaagtaaaagcagttctaatttgatgtcaaaagtgacaaggtaggtcacaacaggtattgtaagtatattctccactcatctcctcagaataccagttattttcagtacattgagggataggatgtgtactttaggtatatagtttgagtagagccaggaaataatgtgttccgggagcatcattagtgggaagatggccctaaaaaacttcagagaataacaaagaacataagaggactattcaaaaactaatgagtcaccttgggtatacatagatatttgtgacatcaactcgatgatgataacagctggtgaaaagtgattattaacttgtttcacaggttgtattcatagactggtgaaaccccaggaaactttagttaaaattacccaaaaaatctccaaacagtaaatgcactagaaatagaggaaaaaaatacaggggaagagagagaaagcaataaggtagcaagaaaaagaggaagacaaatttagttcagcaagttgtatattgcaagtcacagttatatgggagggaaaaaaataaacttgacctgaatcctgctctggaagaaactctaatctaggagtaaatataggacatttacctaactaaataagatataaaaaacagtaaagagtactgtattagttcattatcacactgctatgaagaactacctgagactgggtaatttatgaagaaaaagggtttaattgactcacagttccacatggctagggaagcctcaggaaatgtctaatcgtggtggaaagggaggcaagcatgtcttaccacagagaagcaggtgagagagagagagcgaaggggaaagtgccacttttaaaccatctgatctcctgagaactcacaatcatgagaacagcaagggggaagtccccccgccatgatccaaacacctcccaccaggcccctcctctgacacttgaagattacaattcaagacaagatttgggtagggacacagagccacaccatatcaagtaccttgtattcttttgagaatttcatgaaataataaaaatgcatgatgcatttagcatattacctggcatacagatgaagcctaattaatgtaataaatattttttagaagaaaacagtgaaaacattaaaaagttacattaaaaaatactatgagggttttggatgaagaacacattgaaagaagacttttctggtataagaaaatagcagaagtagaagtacaatagcaaagatttcagagcatttgtattattaagttgatcagtttaatcagagttgaggaatgggttggaagtgcctggttagcaacttatagtaagaggagaagcagcaaattaattcactgatagtggactcccagaatacagcaatgtgcactgtgatgggtaatacctgttctgggtagcaaaacttagaactgataataggcatgccaagaacatgccatcccagatagagaggaaaaacaaacagagtggaaactgagccctgaaaaagaggtatgagtgaaatgttaaaagtgaaaatgctatgttcagaaacttggtctttttcccacaagtgacagtgagctagcaaaaatttttgtgtaagaagatgatattataaatctactttagaaacatagcctggcagcatgtgaaggagggaggtacaaatttattcagaaaattactgctatgatcctgctggaagtagtgataaggcctcaaataggactatggcaataggaatgaaaagataatggataaaaaaattccaaaatacaatgaataaatcatattgcaagtgagaagtaagtgagaagatgagaaaaaaaaaacattctgtggtttctaatttggatttccatggggatgtaatagaaatcataggaagaaaggaaatcttggagagtagaaagaggaaattttggttttggacttttgagttagtgccagcagaacatccagttaaagtcactcagcagatatttaaaaatctgtcttcagccctatagaaaggtgagacctacagattaaaacatgtgatgaattttccaagtgtcagtattagttaagaacagggaattgattctgtttgcttctagactaatgaagcattcaaaagtattgcattgatcataggcatggaagaagagttagagctgcccttttcacaaatattctaaacaaggccacttcttgaatgaagtgcaggctacacaaaaagaatttatctaatggaacttgtaaactgaggaaaaattggagcaacctatatacaaaacaaagagataaaaagcaagtatttgacatctaaggaagaaaaaaaaaataaaaataatgcaacataagtgattagtattgagaacctttgtggagaagctaaactttgagctttaagtctttgaggtaaaggtgaattttaattataaatttagtttttagataaatgaagtatttttaaggaaacggaatattgttttgtagtaatacaaaagtccagcagacactgagctattttacaaaatgtgcttacaacggatgctcatagaagtttggttgctttcttctggagtttccatttacaattacagcactgattcccttaaaatgcttaaagtgtttattgacttcatctctccaggatgtagcaactggtaaaagacttgttctcccagtgtgaaaaacgataaaactggacaaagcatatgaggcaattgttttcaggcattgaatatgggcagttcagaaccttctgagagaaaggaattaaaagagataagcccacattcactcaagctttcatctgggatcaatttcccaaacagcccaaatgggaggtgaggctcaaacagtgaatggagcacttcatgatgagaagaacagatcagagatcaggactggggaggaggctactagagaattggtaggagtataaatcaaggaggaagaatcttcacacgagataccctagaagtctgcaggtgactccctgtaggtccttggctgaggaccgaattgcacacattcaggacaaaggtttacaatacatagcatagtgtggttgcagtgggtctgggagctaaaaacaataccagaagtcttgtaggatgaggagatgttagagttctgacccagctcggatagacagagcttactgagcaccatgggaattccactggaaaacctggaaagaccataccttgagtaagaatcacctactgaaacaatgacaatacccaaggactaggaagcactgaaacaaacttaccccaacaacaagtaaatccaaactaagagaatcaaaattattttctagtgatttaactgcctgccggagcaaaatttaacactaaagaaaagcaatacaatctagactcccttcaatgaatcagccacaatatttagtctacagtaaaaattactggacatgcaaagaaccaggaaaagacgacccatgattagagaaaagagttgtcaataaagagatactgtgaaatgactcagatgttagaattagcagacatgtatttttcaaaatgctattatagacatattcaggacttaaaaaaatggacataataaataaagagatgagctatctcagcagagaaaataaactttagaaaaggctaacaaagacttttaatgaaagagaaatagagttggaagactcatgttctctgattttaagccttattgaaaatcagtagtaactaaaacagcatgatgttggcaaaataatggagatatagactaatggaagagaaaaaataatgatggtcaattgattttcaacaaaggtactggcccaaattcagaggataaattaatctcttcaacaaatggttctagaacaagtagacagctctaactcatacaatccacaatttgattcagtatgaagcacaaatgtaaagacaaaagtggaagctgtaattcttttaaaacaaagcataggacaataactatgtgactatgggttgggtgaaattttcttagaatacaaaaagaactataggccaggcatggtggctcacacctgtaattcctgtacttaggtcaaggagggagaattgcttaaggcccagagttccagaccagcctggacaacaaagagagactgctacttttacaaaaaataaaaaaattagctgagtgtggtggcttgcacctgtaggcccaggtacttgggaggctgaggtgggaggatgcttgatttaaggagtttgaggctgcagtaagctatgattgtgccatatcaccccagcatgggtgatggaatgagaccctgtctctaaaaaaaataaaaataagaaagaactacaagaaaaataatatgttagacttcatcaaaagtaaacatctctgcttatcaaaaaccagtgttaagaaaataaaaaaagaatggctaaatattggaaaaacggccgggcgtggtggctcacgcctgtaatcccagcactttgggaggccgaggcaggcggatcacgaggtaaggagatcgagaccatcccggctaaaacggtgaaaccccgtctctactaaaaatacaaaaaaaattagctgggcgtagtggcgggcacctgtagtcccagctacttgggaggctgaggcaggagaatggcgtgaacctgggaggcggagcttgcagtgagccgagatcctgccactgcactccagcctgggcgacagagcgagactccgtctcaaaaaaaaaaaaaaaaaagattggaaaaacatattctaagtacacatatttgatgaaagacttgtttcctgcatataaaggatattttcaagttagtaataagaagacaaacaacctaattaaaaagaagcaaaggatttaaaaagacacttcacaaaacaaggttttctaaatggcctctaagcacataaaaagatgttcaatagctttggtcatcataggtattcaaattgaaaccacaatgagatatcatttcatagcccctagaagaaacaaaattttaaaagctaacaacataaaacattggcaaggatgtggaaaaactggaattctcatgcactgctagtgggaatgtaaaatagtaccaaactcttcaaagtttttttataaacatacatctaccctactacttagcaattacaattgtaagtatttacccaagggaagtgaaagtatgcattcataaaaagaataatacaagaatatttataggaactttattaaaaatagtcccaaattagaaacaacctgatgaactgagttccattaacagagaatagaagaacaaattgtggtccgtttactcaacagaacattattcagcaataaaggaagcaatgaactaataaaagcaataacatggatatatataaaaacctgctgaacaaaaaaagccaaacatactatactccatttggatgacatacaaaagcaggcaaaattaatctatgaccatagaattcagaacagtggtgctgcctatgggtagtgaggactgacaagaaagggacaggaaggaattaacttggtagtggaattgttctatctcttgattagagtgttggttacatagaattgtgtgttttaaatctatacattttattgtatgtaaagtttacatgcatacacatgtacatacataagaaagaatgtgtattgagcttccactaagtgcaaagctctataacaggcatcgtgggggattcatagaaaagtgagataccaatgaatgtccaagtgttcccagaccaaactgagggctgggctgctatttcttgtggcccaataacaagatgcagatgaagaaagttttattttctgcaaccggttatgggagaaggcctagaaattattgccagaccaactcaatattacaaacttctccagagcttatataccttctaagctatatgtctacgtctaagtgtgcattcgtctaaagacataaatgattaacttcttttaacctataactgaggtctgagtctggaagaacttcccctggagcctcagtaagcttacttaatctaaatgggtcttgatcctggggtgattaccattatcatttctcctactaaatcataaaggttttgagagttcctttaggccccaataaacttgtttgtgcaggcctgggaagtttcttcagacccccaataaaacttgtttaattcttaaaggatgctgttaagaattcctttgttatcttgtcacgcttcaaggcccaggaaaagcctaggcaaaactctttgtgggctttttgttacattccagcctttgtataagggcactggctcaatcagcttttaatgtttgacctagttactcagtcagcgctgggacagttgtaatgaaggcctgtattagtgagacctggtctgccacataaggtgtcaaaagctttagtaaatcactcttttgcctttaacaaagctagctttctttttcattacaatacttagacatttataaacaaacacaattactaattttttaaacaattaatttagaagttaaatatattttgtaaaaatatttataccttggaacgcttctgtttcactcatttctttttaaccatattcttctttttatatttaaatgtaacaccttttataataaaactcattcttatctcttaatgttttccatgcctgccttttcccaaaactccagaacctcttcccaactttttaaaggtagctttctttcatttttttctctctagggagagagctgatcaattccatcctaatcagagagtaggcattaagttgtctttttagcattctaaattagattgctcaacaccaagcatccctgctgtattccccctgacatccacgtttcttccccctcctcttggcaaaacaggagacaaaaattatgcagcagcatgaagcctctagtctgaatgaaaattctgtaattgtcttttcccaaccagcaagttctctggcagacagcttctaaattgccttaagctcccctcccagaagatatgctagatgcttactaattaatttgaactgaatgggccgttagcaaccctcattcacagaattaaatctcagtgctttgtagatttgaaaaactataccctccaacgagagtgtaacatgttccaacctggataacatttatgggcagaaaatagtttctatatgcagcaagttcagcctcactattgtagatcatacgacaaagaaaaggatgtgaaaagctagcttatggagaacttcagacattaaacggagtcacttagctttaattcaacagattttttaggtgccgattatatgtaataacacaataagaaagcatttgaccatagtttatgtattgtttctgaaagtctggagatttcatttattatttatttttatgtagttgatcttcaagaatggggaaatacatcagattctaaaagaagaaaaactgaaatatcatttcagatgctcataaaaatgttagaagtggatgaatgttagttataaaaggggaaaatgatagttgctcaggaatatttagattaatatcaactctgtaatgcttactaaaaaataaattatagaaggcacccacctgtaatttatcattatcattacagaaaagaatttttagaagaaagaatgccagtgatagcatatattactggagctgaagtgtctcctggaaataaaaaatgttgagctccttcaaaggaaatatcaggcacctagctagctctgagaagtaaatgaacaactgaatacacaagaaggaaatagtatcttaaaacaatagccagggaagttagaatcagaaaattttcagctccctgtagaaactgaagataacatcttaacgtatagtccccaacgtgttcttcagaaacccggatcccaccaaacagaagattcgctggcacgtagacctcagataagaggaaactgagcactgaactctgaccactggttatttgtaatttcctcctgaggggcctagaggaggtcatgcccacccgcctgagctcacattcttttctgctgatcccaaattctaggcaacattttatatccttaaccaatcgcaattcagaaaatctttgaatccatctgtgacccatccttctgccctctctttcagatgtctggctttttcaggtcaaaccaatgtataccttccatgtattgatttataacttttcctgtagcctctgcctccctgcctttaaaaatcctcacctgtggcccggcgcagtggctcacgccggtaatcccagcactttgggaggccgaggcgggcggatcacgaggtcaggagattgagaccatcctggctaacacggtgaaaccccgtctttactaaaaatacagaaacaaaattagccgggcgtggtggcaggcgcctgtagtcccgctacttgggaggctgaggcagaagaatggcgtgaacccgggaggcggagcttgcagtgagccgagatggcgccactgcactccagcctgggtgagtgagactccatctcaaaaaaaaaagaaaaaaaaaaaagaagtccttacctgtaagctacctgggaatacaggtctgaagcatgaactgcctggttccccttgcttggtgcccagcaataaatgcctcatttttaccgatatctccatgtcagcatttggctttgctgtgccagtgggagaaccccaggccagttggataagactgtgataagtgttggtacttctcttactacttgcaaatgtatcttcaaatttatggatgtcggcacctaatgggcttggccatgctagcacactctatagtggctggtttgcctccatgacccatgagttaactctaagccatgcctaaggtttacgcaatatctggaaattctcaactctggtttcttattagaataaagtatggagatttgtaagcatacagaagcctttcttactgaatgaatatcttcaggggagcctttacacctgtaaatatttagagtggcatacatgattctgatgtgtagctcagcttgagaactactggagtacagcaactctcgagaatgtagtgagaactaaaataaatataatttggtctctgtgttaaattatattgggaccgggtatacgttaccatttctatgctaaaaaacactggaattaagcaaaaataatttagctacttacttcaaggaatatttgcactaagaatatgtttgtgaactaaccaaaaaaaaaagctaatttatcaagactaacagcttttactatttgaagactcttcccttattgtgctcagaagtccaagctactatgtgataaaatctgctaaatcccgatcagctcttgcttttaaactgggctttaaatttctagctcaggcctttacaccctataaatatccttcttgaccactacacccctttggagaaagttttaaggctgtcaaaatggtgttcctctgatggtggtaggaataaacctagctttgcttgatcaacctgtattttggtaaacttgaagtcactcaattgcataaattatatatttcataacaatcaccttattttataaaaatatagagtttgattgaaaggcacaaactacctagttataataaactgacacctggaattaatctggcatttttgcaaatggtctcttagtttttcctatctacagaagattttgttcttacatgaactctagaaatccttcaagctttaatattccagaacttccttgtgtaatcttttgacccgagtcagctgtcaaaaatctctaagtatatataatctgcttattatacctaaaaccttaaataattcaaacttcttactctcccaggaatccagaatccctgatatttttccatatcggaggtcattctgttgctgctttcatctgttaatgtatttcacaaatagaattaaaaatcagagaaaacaccattttctataaaaaccctgtgctaaaccaatcaagaaaatattacatatggcaattaggcaatgacaacatttactctagcttcatcttgctcctttctttaaaacagccagtttctatttactttatacagaaatagcacaatgttactctaattctcactctgggcctgactttagacaaaatttttttaaaaaaggaaaaaacttgagaaagtacatctgaactcatgacctgagacaccaaaacggaaagtaattcaagactaagaaactcttcaaggaaaaaggaaaaaataattcagttaaaaaaaaaaaaaagaatctgagagaaacactggggtacatataaaaaagacaaatagggaaatcccatgggaccgatgagcttagacttttaaaggacacctataaaagatcattaggaaggaatgtgataacagaggaatgatgtgaaagtccagaaggaaagcataagaataataatctggaataagattaatgttgccacacaaaagaaaaatgacattaaagttaaatttggcaataatcgccttttaagttatgtgtataatatgaagaagaaaagacactgaacttgaaaaactggatggggcagttacaactcctcttggaagtatgtggctaaagctcaaaatctttaaaatcttttcaatcaacttcactaaacctcagatatctaattatcttattcataaagttttccatcattccatatttaagataaagatacaccataaaaataaatttttaccatatacatttgtgacctactagttgaggctttgggacatatctggtttaaagcaatgaagcaagaaattggagtcacacaacacctgagcttaggaggatatttacactggatctaaggacctgcagtcaagctgcatgttcagatacaagtatgatatgtggcactgtgtatgctaggactctatggcatattttaaaagaaatgagcattagatttatccattattgtaatttatttctgactttatcttacgagaatttgagaatcagtagttgtgtagggaaaaaattctctcccaccgtgtttttcttctgctctcataccatcacaacaattatcaacatagaagacttctgtaactaaaggtataggaggttgtcccctacacaccacacagaagacaaaaactgggtgttcttcaattcagttccaatactacctagttggagatagtgtcagatcccacaggttgagctcagcctcacaagagaacccctttctttcccccagtcacaagtctgggcctccagaacttctgaccaactggcttcaagttggggttcccacaatcctctttgtgaatccaattaatttggtagaggggctcacaaaactcaggggaacactttcttatgtttactggcttattaaggaggatattttaaagggatagggaaaggaacatggggctttcatgccctccccaggtgcgtcaccctccaggaacctccacacgttcagatatgccgaagctctctgaacccagtctcttgggttcttatgaagcttcatgatgtcagcattccttccctaagtgtacaggatgggaccctctctgaaggatcttaagtcttacaatcagaaaggtgggggaagattagagtcctgccttggagcaagtgagaggaaaacaggagattctgtttcttgaggcctgcccctgagacccaacacactcaacattgtaataaaagactgtaacaagggctatatctgttatgaaccaggaaacatgaatgaaaaccaatatatattataacacagcagtggtaaaggcagcaaaggtgtgcaatgagtgtggacacctaaatctaccaacagacttctgaagacctatggaaagatgctttacaagacttagatactacactgactgggatagcaagaatcaatattgtgaaaatgaccatgctgtcaaaagcaatctacaaattcaatgcaattcctatcaaaaaccaccaccattcttcacagaaagattgtttagaaaaaacaatcctaaaattcatatggaaccaaaaaagagcccacatagccaaagcaagactaagcaaaaagaacaagtctgactttaaactacactgtaaggctacagtcactaaaatagcatggtactggtataaaaataggcacatagaccaatgaaacagaatagagaacccagaaataaagcaatatacttacagtacactgaacttcaacaaagcaaacaaaaacaaaaaatataaagtggggaaaggccactcttttcaacaaatggtactgggataattggcaagccacatgtagaagaatgaagctggatcatcatcttcaccttatatgaaaatcaactcaacatgggtcaaagacttaaatctaagacctgaaaccataaaaattctagaagataacgttggaaaaacccttgtagacattcacttaggcaaagacttcatgaccaagaacccaaaagcaaatgcaacaaaagcaaaggtaaataaatgggacttaattaaactgaaaatcttctacacagaaaaagaaataatcagcagagtaaacagaaaaaaaagagcaaaagaaataatcagcggagtaaatggtttgtaaaaatcttcacaaactatgcatctaacaaacgattaatattcagaatctacaaggaactcaaattatcaaggaaaaaaaacaaacaataccatcaaaaagtgggctaagaacattaatagacaattctcaaaagaagtatatacccaaaggattataaatcattctactataaagacacatgcacactcatgtttattgcagcactgttcacaatagcaaagacttggaaccaacccaaatgcccatcaatgttaggctggataaagaaaatgtggcacatatacaccatggaatactatgcagccataaaaaaggaagcattcatgtcctttgcagagacacagatgaagatggaaaccatcattctcagcaaactatcacaaggacagaaaaccaaacactgcaggttctaactctaaagtggaagttgaacaatgagaatacatggacacagggaggggaacatcacacatcagggcctgtctgggggtgggtggctagggcagggataacattaggagaaacacctaatgtagatgacgggttgatgggcatagcaaaccaccatggcacgtgtatacctatgtaacaaacctacatgttctgcacatgtatcccaggacttcaagtataataaaaaaaaaaattaaaaaagaagatatacaaatggccaaaaacaaaaaccatgaaaaacttctcaatatcattaattatcagggaaatacaaatcaaaaccacaatgtgatagcaccttactcctgcaagaatggccataatcaacaaatcaaaaaatagatgttgatgtggatgtggtaaaaaggtaacacttttacactgctggtgggaatgtaaactagtacattactatggaaaacagtatggagattccttaaaaaaaaaaaaaaaaccaaaaaactaaaagtagatctaccatttgatccagcaatcccactactatatctacctagagaaaaataagtcattatacgaaagagatacttgcacacaatgtttatagcagcacaacttgcaattgcaaaaatatggaatgagctcaaatgtccatcaatcaacaagggtttgataaagaaactgtggggtgtgtgtgtgtgtatatatatatgaatatatatgtgtatgtatgtttatatatatacacatataaaatggaatactactcagctataaagaagaacaaaataatggcatttgcagcaacctacatggaaggggagaccattgctcaggaatggaaaatcaaacattgtatgtccttacttgtaagtgggagctaagctatgaggatgcaaaagcataagaatgatacaatgaactttggggactttggggcaagagtgggaggggggtgaggcataaaagactggacattgggtacagggtacactgcttggatgatgggtgcagcaaaatctcagaaatcaccactaaataatttatccatgtagccaaacatcacatgttacccaaaaacctattgaaatacaagaaaaagatttttaaaaagcaaaggaaaaagagaatattagacttctattgcgtacttcccagacaagaacaaaccttttgaaactatagaaagtaaaacacaggcaagcattagttaaaattcaaaataagtaaatgatctataaaaaaatcaccaggagacctctagtttcagctctgatcttaccattagaaaaagctaaaagttgaaaatcaaaaactcgttttggccccaacaggatacggaggttgtaggacaaaatctaaagagaaaggcatacccagagagacacagcagatatctgcttacttggagcagaaaatcaggaactataaactgctgggaacacttcaatggtaattttgataaattgctggaggctgagtttgacccagtgtgagagtaagaaactcctggggccacagttttagaggcaccactacactttcatgcattttacctccaggaaacccaccaggtcctcagagcaaagaaccagaaagactcccttgtgtctctgagagagaggaaaattcatctttgtgaagtgcatcctgagaattctccataatgaaggtgtattcttcatgggaaaatactttatcagatccttacccatctggaaggaagacatttcccctcttattgactctttataagtgtgttttttacaataaacacttgtaaaagtcacaacccatggacacagatctagtaacaaactgagatttaattataagattatgctgtagaatcttccccttccctataccttaccactgtattaaaagagctccaatacaatcacagtggattaaagctgaaagatctgcaagacacagactgtatttaagaagaggctctcagaaaattccaaagacaggaggagagaaaaaagcaagggcactagagtaatttgaagaccctggcacttgcagctacaacaaacattaaaaacagtctaactcctagacagatcaacttaaaaccttatgctaaagtctatttactcaattcctattatctaatacatcatgtgtggttatcagtgaaaaattaaaagacatgctaaaaggcaagaaaaaatacaagcagagaagacaaagcaaagagaagaattctcagatatgacacagattttggaattatcacacagagaatttaaaataactataatattttaagacctctaaagaaaaaatagtcaatatatgtgaagagatggctaatttagtagtgagatggaaactaagaatcaaaagaaaatactacaaatcaaaacaataagagaaattaagatgtctttggagggcttatcagtagactggaaatagatgcagaatgagtgaggttaaggacacaccaagagaaatttcccaaattgaaatgcaaagaacaacaaccaaaaacaaacaaacaaaaaaaaacagaactgaatatccaagaatgggaggacaatcaaaaaaggtataaatacacataattggaataccagaaggagaaggaagagaacagaggcaaagaaatgtttgaagtaatattggccaaaaattttccaaaattaattacagatatcaaagcatagatctcagaagctcagagaatattaagaaggacaaataccacaaaaatctgtaggtaggcatattatattcaaatggcagtaaaccaaagacaaagtaaaaatcttaaaagaaggtaggagaaaaatactttacttacagaggaacaaggataagaattatagcagatgcaggaagctctgagaataataagcaggataaacacacccacagaaattacacctaggcacatcatgttaaattgcagaacacgaaagataacagaaaatattgaaagaagctggcaaggggtggggtggagtggagtggaaggtggggagatacctacttatagaggattgaggaaaagaatttcaacagactttcatctgaagccatacacacagaaagagagtagaataaaatatttaaagtcctaagatgtggggtggagggggcgggagaccataccaggataggattctccatccagataaattatttaaagtcctaagatgtggggtggagggggcgggagaccataccaggataggattctccatccagataaattatctatatgaaggagagctaaagtctttctcagaaaacacaaacaaacaagcagaccagacctgccttgcaagaaatgttaaaagaaatgatgcttcagggagaaggaagtatataggtcagaaatgaggatctacataaagaaaggaagaacttcggagaagaagaaatgaacataagagaaaatattttacttttcttattcttagttggtctaaaagataactgtttaaaggagtaatagtaataataataaaagtaataataataatgtgttgtgcgattttgacacatggttaagtaaatgagtgacagtaaggccagcagtgacgaggaggaattgggaatactctattaaaagatatctgcatgaaatgtgaagcagaatagtgttattcgaaagtggattaagattcattcaaaatgtataatgtagagcaaccattaattttttattaagtagcatgtataactgatatactaagagaatagagaaaatatagccatataaaacgctcaattaaaaccagagaaagcagaaaaatagtgaaagacaaaaaaaaatagaaacaaaacaaatggaaaaaagtcacaaatatagtagatattagtccaactatatcaatcattataccaaatgtgagtcatccaaacataccacttaaaagatgtagagtgtctgagtgaattaaaaacaaacaagtaagcaaacaaacaaaaagacccaagtatttgttgactccaggagacttaccttaaatataatgatacagatatagtaaaaataaagggttggataaagatttagcactctaacactaacaaaagaaagctgaaatacttatattaatttcagacacagcagacttcagaacaagcaaaattatccgagataaagaagggtattacataataataaaggagtcaattctccaagaagacatagtaattcttaatacaagtgcatttaacaataggtcattaaaaccatgtaagacagctgtggtggcacacacctgaaatcccagctactcaggaggttgaggcaggagaattacttgagctcaagagtttgaagccagcctgagcaacttagtgagaccttgtctcaaaaaaaaaaaaggtagaaaaaaaatgcgacacaaaaactggtaaaacatgcaaagaaaaatagacaaatccactttcatagttggagatttcaaaattgctctttcagtaatggataaatcaaacaggctgaaatcagtaggatttatttgacttgaacaaaacagttaattgacttgatctgacatttatagaatatttgatttaataacagcagaatacatatacttctcaagctggcgtggaacatttattaagatttaccaaaacctggaccttaaaattcaccttaacaaatatagaagaattgaaatattacaaagtatgtatttcatacccagtggaattaattccaaatcaatagcaaaaggaaagctagtgtattatccaagtatttgtagaacaaagaacctacttttaaataacacatgagtgaagaaagtatcaaaagaaattaaaaagtattttgaactaaatgaaaataaaaatacaatgtatcaaaatttgtcatatgcagcaaaagcagtgcttggagaaaaatctatagactcacatatttaaaaaaagaaatatcgaagattccactttaggaaaaaacacaaagaagatcagttgaagtctaaagcaaacagaagcaaagaaataataaaaatcagagaaattaatggtaagaaaaaatagagaaaaacaaaaaaattagctggttctgaaaagatcaatacaactgatacacttctaaacagagtaacacaaaagaaagaagctacaaattactaacatcagaaatgaaagaggagtcatcaccatagattctagggacactaaaaggaaaacaaagcaatactgagaaccagctttatgctcacaaatataacttaggaagacctttctaacaaattagagccttcaaacacagaattgttttcttcatagaaattttttttttactttctaaaatatctccatggttgttttattaatacacaattaatagatgtcatatgaaatagagaaaaccaaaatgaagaagaagatgcaatctatattctcaatgtcagagaaaatatttgctagtattttggcagacatacctctgaattttatgtatgtagatatagatacatagcaaaactgatgtaatgcagtatatacatttttaagttgtagtaaaatgcacataacaaaatatcttaaccattttaaaatgtactgttcagtagtgttaaaatgcattcacacttttgtgcaaccagtctgcagaaccatcttgcaaaactgaaactctatatacattaaacaactctttatttcctctcgtctaagtcctatataatgttttataaaccttttaacttattgatatgttgtcaaagacactcatcattcattttgatatctgcattggatcataattgatttagttatcaaactatttttgaaatgttgatgttttagtcctcaaacattcttaaactaaatatttttacacactcctcattattttcttgagataaactcttagaagtgcaaattctgcaccccttattattcttttttgaatttattattattattattattatactttaagttttagggtacatgtgcataatgtgcaggttagttacatatgtatacatgtgccatgctggtgtgctgcacccatcaactcatcatttagcattaggtatatctcctaatgctatccctccctactccctccaccccacaacagtccccagagtgtgatgttccccttcctgtgtccatgtgttctcattgttcaattcccatctatgagtgagaacatgcggtgtttggttttttgtccttgcgatagtttactgagaatgatgatttccaatttcatccatgtcccttcaaaggacatgaactcatccttttttatggctgcatagtattccatggtgtatatgtgccacattttcttaatccagtctatcattgttggacatttgggttggttccaagtctttgctattgtgaatagtgccgcaataaacatacgtgactgcacccattattaatcatgcacattattaaggcttttctctcattacttaagctgttaaagtccagttggtaagaatttatggatgagaaaatttattgataagaaattgtatctgtgaaaaaaataaggcaagtagcagggaccttactatatcacaatacagtattttgatatattaagtattacaaattggcaacagatggataagcaataaatgtaaggtcaggtgatctggagtcaaatgcccacaatgtcacctattactggagtctcctgatgcattgactctgtaaacctattttgtcattttaaagttggattaataatacctgttatagaaacctcttatggttgtttaaaggatcaatatgaaacaagcagataaagcccttagaaaatgtatattttcattaggaatagggctaaatggaagtcacagccagccctcagggagtgtccgcagtatccaaaggagaccaagtaaggctgagtaggttaggaaactgcccagtgccatgaccagccataaacttcaatgcatgtgttgtttggagaagcagctactaaactaaggaagcctattttctactttctgttgctatatcagaaattacacttcattgtataaataattattcaccattttccacagtttctttttttaaaaaaactttacgttcaagggtatatgtgcaggtttgttacataggtaaaatgtgtgtcatggggatttattgtacagattatttcatcacccaagtattaagcctagtacccatcagtaattttttctgatcctctccatcctcccacgctccaccctccagtaggccccagtgtgttgttcccctctaggtgtccatgtgttctcattctttagttcccacttgtaagtgaaaacatatggtatttggttttctgttcctgtgttagtttgctgaggatgatggcctccagctctatccatgtcattactaaggacatgatctcattcttttctatggctggatagtattccatggtgtatatgtaccacattttctttatccagtttatcattgatggacatatgggttgactccatgtctttgctattgtgaatggtgctgcaatgaacattcacatgtagtatctttataatagaacaatttatattcctttgggtatattctgaggaataggatcactgggtcgaatggtatttctgtctttaggtctttgaggaatccccacagtcttccacaatggttgaaataatttgcattcccaccaacagtgtagaagcattcctttttctccacaacctcaccagcatctgttattttttgactttttaataatagccatgctgactggtgtgagatggtatctcattgtggttttgatttgcatttctctaatgatcagtgatgttgatctttttttcgtaagattattggccacatgtatgtcttcttttgataagtgtctgttcatgtcctttgcctactttttaatgggacttttttgttttcttgtaaatttaagttccttacagatgctggatattagacctttgtcagatgcatagtttgcaaaaattttctcccattctgtaggttgtctgtttactctgctgatagttttgtttgctgtgaagcagttctttagagtccgtgtatcgatttttgcttttgtttcatcttcaacatgaaatctttgcccctgcctatgtcctgaatggtattgcataggttgtcttctggggttttaagcttatgtcttaatctatcttaatttttgtatatggtataaggaaagggtccagtttcaatcttctgcatatggctagccagttatcccagcaccatttatcaaatagggaatcatttccccattgcttgtttttgtcaggtttgtcaaagatcagatagttgtaggcgtgcaatattatttctgatgtctctattcttttctatttttctatgtgtctattcttgtatcagtaccatgctgttttattactgtagctctgcagtatagtttgaagttggattgtgagatccctccagctttgttctttttgcttaggactgtcttggctattcagactcctttttagttccatatgaattttaaaatagttctatttctatgaagaatgtcactggtagtttaatgggaagaacattgaatctacaaattgctttgggcagtgtgaccattttcatggtatcgatttttttctatccatgagcatggaatgtttttccatttgtttgtgtcatctctgattctttgatcagtggtttgcagttctctttgtaaagatctgttacctccttagttagctctattcctaggtattttattctttttgcttccacagtttctgagtgttaggaattcagacaaggcacagaagtgacaattgcttgtactatctttcttagggctcagacggaacacttgtaggctggagactgaaattttctcttttttttccctcagagagaaacatttaacagggacttaaaacagaagtgagaccttaggccactgagagaaaatgaatccctgaacttgccctccagaaagtaccttttctatagcaagcttcttttagtaaacaaacgaagctgctcaggtcatagacactcttgtgaaactctgaccattggagaggttcgagaaacatctttatgaggggttatctatgctacaggtactgtttcttgacctctctgcaagaacattggtatgtaggagtcaaatactggcattatggcaatttcacttcaagacagtgttattcttgccatgaaaaggactgcttgcctacatggagatggaaacttctgaagattccttcagtcctatgactggcatctgatgtcagctgtcagctgaggccctagttggactgtcacttggaaaacctatatgtgacctttgaagaatgtgccctaatttttcttaccacattgtggctaggttctatggacatacatcaagagaaccaggaggaagacttcttgccttatatgaactaaccatggaagtcacgtggcatcatctccaccacattctataggttgaagtagtttcaaatgcataccctggttaaagaaaagggaacacagatgacacattttgatggaggcgtttctatgtgtcaatgtcatatggaagaacattttatgagattggctatatcttaggccatttttagaaaatataatgtgacaaagagccagaatacacaaaccctataactgttacttttcccctcccccataaggctataaaagctacacacttcttcctaactgctcaggagtcatcttgtgaaagtgctgatcatgaagggtagaagacgagaaatatgacaggttagaattatttcaaagaaaggctagcattataaaaagccaccttttaaatttttttatatgaacttatttctaaattggataggattaacaactaatttttttactacccaatgcatgggggttggcagggaaatattgattagtgatacataaaatttaaaaattatattttctcagtacctttattctaagttgaaaattatgattctgtttttattgaattgggtttgtaaaaaacattaccaatggtttagagataattattgatattacagaaaattgcttgcttgcatttaaaatagcaagttgcctgattaggattagatagtaaaattgttgacattggaaaagcctcatttggagttctggcagacacctttgaaataggaaattggttatatttccataggcatctataaatatgcactattaaacagagatctgatcattacttttgggggaagttccaaacctatgactgttgatgcccccagactaaaacctgaatatgtagagttgagagaaatttactatttggtattaagattaatttttgtgattcatgcatgccagaatattcagttaagaaaatgggaattctcagtaccagtatagaaaagtgagaaaaggaggcaagctttgggcataaagagattaaaaacaaatagttcccccttcctctggccaagggatacctggagattcgttttttcatgttcctttgagctgccagtcaggagtcatatatgggcctgtgttattgttctaatctttgtcttttgtttttttctattttcttaaagaggtcctagattgtatcttttatctcctatactaaatttcttattttagatatcgtatttttaattcacaaagttttctttttgtaattttcctttttatgctttttttaatgaatgctctattttctcttacctttctaaggatagtatatacaattgctttgacttacattttcttttttttccctaagtattttctctgtttacttattatgtggctattttggtgttaaagaatttcctcatttgactggtgattgatttttgactgtgtggatatatttaagatcgagacaccaaactgaattggtagctctgtcagtgggtatcgctcctggactagaaagcttccctgcaggatgacagggtgaacagctaccttttcactaaggatatcctatgtcaatatctataaatcctgtttcctttggttgttcagcttttccagagaaggattctccagtattatcacaagcagttttaaagccaccttctgaaagacagaggaagttttcacactattctgtatgcacacatttacctaatttctccctgtccactttgctccttgacttcctgtgtgcttaccttctttatatttagaacttctctggtcagttttcttcagagattaaacacatagtctccttggggttaaacaaggggagtcagctatgtttgtttacagcggaaacccaaagggtacaactatccctaataaagtcttttatggaatttcctagcccccaaacattcacaaattttatactgaatattacaccaacttcctgggcctttctgtggttccatagagcagattgccatgattctcaccaaaccaccccaacaattgcaagaacattggtaaatatttatcttctcccatctgccttgcatcatcatgcattgggataagagtgttatagaattcccctggcttcattgaatccagaattcatatttctgttctttgttctccttttcttgagataatttttttaagaaaaaagaaaaagatatgttcactatacttttttgaaattgtaaatcttgttttataatagtgtatttttattaaaaaattaatgtgcttaagctagaagagattttaaatagaaatcacaacctaaaaatcatccttaatcctgtcactgagataattgctattaaagtacatattcttaattgacatatttgttctcattctattatatcaatctgacccaaagctaattgttaaaccactcaggttctcaagattttatctcacaaaacaaaaagattagaccaaataaataagtgaaatacacctttcagagcctgtttaccgtttaatggaatgaagctttttgttagaatttcaattatatttatttctatttattatccctattttagtatggtttttatcaacatcagaaagcactacctacagacatgtactttaagacttgatacttactttccatacaaagatacaaataaataaaccaggttaaaaacaaaaactttcatacagcaaagaaaataaaaggtgttagtcattagttgctcctctaggaaggaagaaattatctgtagtttcatttctcacagcttagaaacaataacacttgtaaagctcacatgaactacctaattaatcaatcatgattcaggacattgaaaactcctttcacaagagaggccatgtcttatttgtccttatctctttcatggtgcctagataaatgcttcacacatcttgactcctaagaaaaggaaattaaatacctgaaaaaatacttctgaaaaaacttaatagactatgtttttacattcaggtgaggtttttccctttgctgagattaatttcaatttagcctaagatataaggaaaaattaatttattgtgcagatggcatttgcaagttaaaatgttttcctggctttcctctgaatgagcattctttttctctctcaagcaaagaaaaacatcatttcattaaatatgtatggaagatgtctaactttcaaaaatgccaaaagaaaagtggtatatttggagtgtaatgagtttggtcaattaaaatttttaaattttaatgattatgttttactaaacaataaatgtttattgcataaagataaaaatacggatgagcaaaaacaaagaaataaacttagaaccataattccaacagtcaaagataaccactgtttatattttgctctagtttttacttatgtttatcatacttaaaagcaaggaattgtatgatttaaacactaaaaaaccagaaatgagcctatttttctcaaaggtctcacagtcagcctgaggattaaagacctgctaaagcctctgatatggccgatcaaaataagcactcaatactcatgctcaacacaaaagatctgtattatggattgaggggttgaggatcctgtgatcttaccaactactggtatcctttaatctcccatcttgctttcatttttctctggaaagaatacaactggattaagatggaaaaccagcgactcatcttggaccattacttgcatatgtctgaaacttatatcttttcaagttagaaaaatcgtccaaacaagtaggatgtgcaatcattctgagcctgagcaaatccacggtttagtacaagggttggcaaaccaaattcagcccactgcctgttttcttatggcctatgagctaaaatggttttaaaatttctaaatggttgagaaaaaatcaaaagaagaataatactgcctaacacatgaaaattatgtgaaattcaaatttcagtgtcttaaggaaagttttattgaaatagccatggccattcatttatataacatctgtggcttctttcatgttacaacagcgttaagcagttaagacagaaattgtagggcctataaatcaaagctggctctttacagaaaaagtctgctgactccttgtttaatcttttcatttcacttctaatatcagcatcaggggcttgtcttccatggcccctgttatctatgattgatattttaggatgagtagcttaatcctatttggctaattcacgtaagactaacttattaaaaggacatctattttttaatttgttcagctgctgtatcttgaataataaagcaaattttatcgaaactaaaacaaatagggaaacatctgctaatgaatacattttatctgatgcctttattaaaaggttatattccagctatatccattgtatactttcttatgacctctttttcccaagtaagataatcattgaaatatcatttttaaaaaacactcttttttaagttctggaatacatgtgctgaatgtacaggtttgttacataggtatacatgtgccatggtgatttgcaacacctatcaacccatcatctaggttttaagccctgcatgcattaggcacttgtcctaatgctctccctcctctttccccctaccccctgacaggccacagtgtgtgatgttccccaccccgtgtccatgtgttctcattgttcaactgccacttatgagtgagaacatctggtgtttggttttctgctcctgtgttagtttgctgaagatgatgatttctagcttcatccatgtccctgcaaagagcaagaactcattcttttttatggctgtatagtattccatggtgtatatgtgccacattttctttattcagtctatcattgatgggcatttgggttggttccaagtcattgctactgtaaatagtgctgcaataaacatacgtgtgcatgtgtctttatagtagaattatttataatcctttgggtgtatacccagtaatgagattgctgggtcaaatggtatttctggttctggatccttgaggaattgccacattgtcttctacaatggttgaactaatttacactcccaccaacagtgtaaaagcattcctatttccctgcatcctcaccagcatctgttgtttccagactttttaatgattgccattctaactggcatgagatggtatctcactgtggttttgatttgcatttttctaatgacctcagtgatgatgagctttttttcatatgttttttggctgcataaatgtcttcttttgagaagtgtctgttcatatcctttgcccactttttgatgggattttttttttcttgtaaatttaaattccttgtagattctggatattagccctttgtcagatggataaattgcaaaaattttatcccattctgtaggttgcctgttcagtctgatgatagtttcttttgttgagcagaagctcttcagtttaattagatcccatttgtcaattttggcttttcttgcaattgcatttggtgtttcagtcatgaagactgcccatgcccatgtcctgaatgatattgcttaggttttcttctagggtttttatggttttgggttttacatttaagactttaatctatcttgagttaatttttgtataaggtgtaaggaagtggtccagtttgttttctgcatatgactagccagttttcccagcaccttttattaaatagggaatcctttccccattgcttgtttttgtcaggtttgttgaagagatcagattgttgtagatgtgtggtgtgatttcttatgtttctgttctgttccattggtctgtatatcttgttttcgtaccagtaccatactgttttggttactgtagtctcgtagcatagcctgaaatcaggtagcaggatgcctccagctttgttctttttgcttaggattttcttgtctatatgtgctttttggttccatataaaatttaaagtattttatttaattctgcaaatatagccactggaagcttgatgggaatagcattgaatctataaattactttgagcagtatggccattttcacaatatggattcttcctatccatgagcatggaataggattgtttgtgtccactcttatttccttgagcagtggtttatagttctccttgaacaggtccttcacatcccttgtaagttgtattcctaggtattttattctctttgaagcaactgtgaataggagttcactcaagatttagctctctgcttgtctattgttggtgtataggaatgcctgtgactttcgcacattgattttgtatcatgagactttgctgaagttacttgtcagcttaaggagttttagggctgagagaatggggttttcttaatatactatcatgtcatctgcagacacaatttgacttcctctcttcctatttgaataccctccatttctttctcttgcctgattgccctggccaataggagtggtgaaagagggcatccttgtcttgtgccggttttcaaaagggaatgcttccagtttttgcccattcagtatgatattggctgtgggtttatcacaaatagcctttagtattttgagatatgttccatcaatacctagtttattgagactttttagcatgaagggatgctgaattttatctaaggtttttcctgcatctattgagataatcatgtggtttttgtcgttggttctgtttatgtgatagattacgtttattgatttgtgtatgttgaaccagtcttgcatcccagggataaaactgacctgattgttgtggataagcttttggtgtgctgctggattcagtttgctagtattttattgaggattttcacatcgatatgcatcagggatattggcctgaatttttttgttgttgttgtgtctctgcgaggctttggtatcaggatgatgcttgcctcataaaatgagttagggaggtgtccctctttttctactgtttggaatagtttcagaaggaatggtaccagctcctctttgtacctctggtagaactgggctgtgaatccgtctggtcctgggctttttttttttttttttttctggtaggctattaattactgcctcaatttcagaacttgttattgatctatttagggattcgatttcttcctggtttagtcttgggagggtatgtgtccaggaattcatccatttcttctagattttctagtttacttgcgtagagatgtttatagtgttttctaatggtagtttgtatttctgtgggatcagtggtgatctcccctttatcattttttattgtgtctatttgatccttctctcttttcttttccttcttttttttgctgttatttcactattgtttattttctttttttttcttcttttttctttttttttattatactttaagttttagggtacatgtgcacaatgtgcaggttagttacatatgtatacatgtgccatgctggtgtgctgcacccatcaactcgtcatttagaattaggtatatctcctaatgctatccctcctccttccccccaccccacaacagtccccagagtgtgatgttccccttcctgtgtccatgtgttcacattgttcaattgccatctaagagtgagaacatgtggtgtttggttttttgtccttgcgatagtttattgagaatgatgatttccaatttcatccatgtccctacaaaggacatgaactcatcattttttctctcttttcttactagtttagctagtggtccatttattttgttaatcttttcaaaaaacatctcctggattaattttttgaagggtttttttgtctctatctctttcagttctgctctgatcttagttgtcttctgctatcttttgaatttgtttgctcttgcttctgtagttttttcaattgtgatgttagggtgttgattttaatctttccagctttctgttgtgagcatttagtgctataaatttccctcttaacactgctttagctgtttcccagggattctggcatgttgtctctttgtcattggtttcaaggaacttctttatgtttgcctcaatttcattatttgtccagtaatcattcaggaacaggtggttcaacttccatgtagttatgcagttttcagtgaatttctcaatcttgtgttctaatttgtttgcactatggtctgagagactgttatgatttctgttcttttgcacttgctgaggagtgttttacttccaattacatggtcgattttagaatacatgctatgtgacgctgagaagaatgtatactctgttgatttggggtggagagttatgtagatgtctactaggtccatttgatccagagctgagttcaagtcctaaatatctttgttaattttctctattgttggtctgtctactgttgacagtgggtgttaacttctcccagtattattgtgtaggagtctaagtctcttttttggtctctaagaacttgttttatgaatcaacagttattttaaaccgtaaaacataatctggagaatatcttgagaacattaagttttgaagggagaaggacatttggtttatcttcagtcctgggtgtttattacctagatatatatttaatatagtaaagtatatattactgtctgtggccacattattttttattttcttcttttattttaggtttagggcatatatgtccaggtttgttacactgataaattgcacgctactggggtttggtgtacagatcattttgtcactcaggtaatgagtatagtacccagtgggtagttttttagtcctcatcctcctctcaccttgcaccttcaatagactgctgtgtccagagttctctactttgtgttcatacatagttaatgcgtacttcccacttataagtgagaacatgcggtatttgattttctgttcctgtgttaattcgactaggataatggcctcttgatatctatgttactgcaaaggacatgatttctttgtttttggctgcatggtattccatgatgtatatgtaccacatgttctttatccagtccaccatcgatgggcacctagattgattccagatcttggttattgtgaataatgctgcaatgaaaatgtgagtgcatatgtctttttggtggaaatatttgttttcttttggatatatacccagtaatgggattgctgggtcaaatggtagttctgttttaagttctttgagaaatcaccaaactgctttcacagtgattaaacaaatttacatttccaccaacagtgtataagtgttcccttttttctgcagcttcatcagcagctattgtttgactttttaaataatagccattctgactggtataagatgaattctcattgtgattttgatttgcatttctctaatgattagtgatgctgagcatattttcatatgcttggtggccatgtgtacgtcttcttttgagaagtgtccatttatgtcctttgtccattttaaaaaatagggttatttggtttttacttgttaatttaagttccttatactaatactaaatattatacctttgtcagatgcatagtttgcaaatattttctcctattctgtaggttgtctgtttattcattgatagtttcttttgctgtgcagaagccctttagtttaattaggtcttacttgtcaatttttgcttttgttgcaattgcttttggagtctttgtcatgaaatatttgccagaatctatgtctagaatggtatttcctaggttttcttctagagacttttatgctttttggtattacatttcgatccttaaatccttaatccatctcgagttaatttttttatatgatgaaagatgggggtccaggttaattcttctgcaaatcactagccagttatcccaacaccatttttttttttacttttattttaggttcaagtgtacatatgaaggtttgttatataggtaaacttgtgtcacgggggtttgttgtacagatttcatcaaccaggtattaagcctggtacccattagttatttttttctacttctcttcctccacccaccctccaccctcaagtagatcccagagtgtgttgttctcttctttgtgttcatgagttctcatcatttagctcctacttataaatgagaacatgtggtatttggtttactgttcctgcattagtttgctaaggataatagcctctagctccatccatgttcccagaaaatacacaatcttggttttcatgtctgtgtagtattctgcggtgtatatgtaccacattttcttaatacaatctgtcattgatgggcatttaggttgattccatgtctttgctcttgtgaatagtgctgtaataaacattcacaggtatgtgtctttatggtagaatgatttatattcctgtgggcatatacttagtaatgggattgctgggtcaaatggtagttctacttttagctcttcgagggatcaccatactgctttccagaatggttcaactaaattaaacttctattaacaacatatgcgttcccttttctccacaacctcaccattttttgactttttagtaatagcagttttgattggtgtgaggtggtatctcattgtggttttgatttgcatttctctaatgatcaatgatattgagcttttttttcatacgtttgttggtcacattgaaaagtgtccatgtcctttgcccactttttattgcaggttttttttttgtaaatttaagacccttatattaatactggacattagacctttcacagctagcaaatattttctcccattctgtacgttgtctgtttactctgtggatagtttttttttttttttttttttggtgtgtgtgtgtgtgtgtgtgcaaaagctcttaggtttaatcgtcaattttttctttagttcctacaccatttttttttaatagggtgccctttccccattgcttattattgtcagctttgtggaagatcaaatggttatagatgtgaggctttattctgggttttctaacctgttccattggtctatgtgtctgtttttatacagtactatgctgtttaggttactgtaggcttctagtatagtttgaagttggctaatatgatgtctccagtttggttctttttgctttggattgccttggctatttgggctctgtgttggttccatatgaattttaaaatagttttttcttgttttgtgaaaaatgtcatttgtagtttgacaggaatagcattggatctgcaaaactgctttgggaagtattgccattttaacaatattgattccttctatccgtgagtatggaacattttaccatttgtttgtgtcatctctgatttttttcagtactgttttgcaattcttgttatagagagctttcacctctctgattaactgtattcctaggttttttgttttattttgtggtgattgtgaatggcattgtgttatttggctctcaggttagacattattggtgtatagaaatgctactaatttttctactttgattttgtatcctgaagccttgctgaagttgtttatcagatctaggagcttttgggcagaaactatggggttttctagttagaaaatttatcatctgcaaacagcaataatagtttgacttcttctcttcctatttaaatgccttttacatttttctcttgcctgacttacttgctaggacttccagtactatattgaataggagtggtgagacagggcatccttgtcttgttttggttctcaagaggaatgcttccagcttttgcccattcaatttgatgttggctgtgagtttttcatagatggctcttattattttgaggtatgtttctttgattcctagtttgttaagggcttttaacatgaaaggatgttgaattctattgaaagacttttctgcttcttttgagatacctacatattatttggttttgttctttctatgtggtaagtcatttattgatttgcatatgttgaaccaaccttgcattctaggaataaaacctactccatcatggatggtggattagctttttgacgtgctgccagatttgatttgctagtattttgttcaagatttttatgataccaaaacttggcagagacacaaccaaacgaaaactgcatgccaatatccttgatgaacatagatatttctggccatattgttatcctgcactctgtgtttctggagtatacacaggctccatggaaaattaatacagtaacagcaactaatagtttaagttaacaccgaagacttttattttccttgttcatctacaacatttattttccttgtttttttattttccttgttcatctacaacttttactttcaggggatataatttaattgaatatgtttttcatgagtcaacgtgaaatttcctttttggataaagtttcatttaagccactttagaagtagttgaccttcacagactacacaggtagttggttgtccagattcccttctttggggcatcacgtcttccctcttccatagtaacatcatttcagctacttaatttggttagagtttatcctgccaccatctggccagaagtggtcatgtgatccagacctggccaaaatccctggccttcaattagtttagatataaccatgtagccatatcttggagactagaattcttcccagagactttattgtcaggaaaagcacaacatttttctcttgaacttcaggctcttcattcattcatttattcattcattcattacataaatattaatgagtatttttatatgctgggctctggtctggtctgttgacataaatcagtgaaccaaatagggtaaatggtcattccttatggagtttacattctaatcatggagtgataataaacagtaaataaaatgcataagtaataactgaaacattttcatggaacaagagccatgaaaatgaaaaaataggacaaggtaagcagaattggtggtcaggataggtcttattaaaaagatgacatttaaggctgggcgcagtggctcacgcctgtaatcccagcactttgggaggctgaggtgggcggatcacgaggtcgggagatcaagactatcctggctaacacggtgaaaccgcgtctctactaaaaatacaaaaaattagccgggcctggtggtgggcgcctgcagtcccagctactcaggaggctgaggcaggaaaaaggtgtgaacccgggaggcggagcttgcagtgagccgagatcgcgccactgcactccagcctgggcgacagagcgagactctgtctcaaaaaaaaaaaaaaaaaaaaaaaaaaagacatttaagcaatgacttaaaagagaaaatagccatgcagataaatgggtgtaaagtatagcatgcagaaatatttgccaccataaaattcctgaggcaagaataaaccaatgttcaaagaatggtgaaatggccaattaggttgttacaaaatgttcaatgggtggtacagcagatagaattgaggttggagaggcaatgggagaaaaacatgtggtgctctgtaggccatttacagactttggattttgccatatgtaaaatgggaagcattgcaggatattgagtagaagaggaatgtaatttgatatatttcggaaagaacaccctgacatctaagttgagaacaaactttaagatagaagagaaaattgaagctcagattagagtagcagcgttggaaatggtagaaactgagggatacagggtaagttttgaaggtagatccaaggagattttctgatgtgctgaatgagatatatgataaaaaggaaccaagaagaatttcaaaatttttgacttgagtatatgtaataatagaatagtcactaaatgatatggggaagtctatcttatgggcagacttggtggatcatcgatttggggcatgttgagtttgagatttctattagacagccaaatgaaaatgtcaagtaagcagttgaaaatgtaggcttgtagtttgtgtctggatgtaggaatttggaaattgtcagactatatttgtcctgtaaagctacaatactgaataatattataaaagggagaggaaagaacagatctttagatgtgttcctttagatccttagatctttcctttttaggggaaagatataagccttagatctttcaaaaataagaggttggggagacatggaagaccaagtgaaaaagacaaggaaagagcaaccagtaaggtaggaggcaaatgaggacagagtggtttcatggagaaaggtgtgatcaatttccagccaccttgccactgggtaaagagaacctgtatgatattgaagccaagcaatgcaaaaaaactgtgttggataaaaattgtttcacaagctggatgctgtggctcactcctgtaatcccagcactttgggaggccggggcaggcagatcacttgaggccaggagttcgagaccaaccttgcaaacatgttgagtttgagatttctattagacatccaaatgaaaatgtcaagtaggcagttgaaaatataggctttgtagtttgtgtctggacataggaatttggaaattgtcagattatatttgtcctgtaaagctacaatagtgaaaccctgtgtccactaaatatacaaaaattagccaggcatggtggcacatgtctgtagtcccagctaccagagtaggctgacgcacaaaacttgctttaacccgggaggcagaggttgtagtgagctgagatggtgccacggttctccagcttgggtaacattgtgaaactctgtctcaaaaaaaaaaaaaaaattgtttcacttttattaccacattgatgccttcaaaattacttttgactaggacaatggatttcaattcagtcaacacatatgtgacaagagtcacagttgcttaaacaaagagcaccatttagaagttttccttaaaaggtagcattgtaactggcaggtattttcattgtctcctgcactaaatctcccaattgctaggctcagcatctttttttctaggtctacacttccaaaagcatcatcgtcaatttatcattataatattgctagttcatgcccaaccaaagtcacttctgatagcaaccaaaattatggcttacttctacaaagataatatctttaaattattctgaagataatgtctaatattaaaatttactctcatatacaactataatttgttaatttacaataaaactaaactaaaagtaaataaaatctattctctctggttatattcatttgctttctaatttttaaaataatacctcatatatgcaatttgccgcaaggccatttttaatattagacttttattctctttctcttttttatttagctaattgctcagttgatctaggacccttgcttcacagaatagcacaaaccataatttctaaaaggtctagagatatcgtattttcttaatgactttcagcaggaaataaaaggaagtgcccaaataatcctttagttcatccatgatttttttcaagctctattttggagtatcagacctatcgtccctttcaaggtggtaatgattcttttcgctattatcatgacatgagtagtccaagattgacagatgctaaccacaggtggcaatttggtaaaacctttttcatattttatataaaatatgtctgcctcctttggatactgtcactttcatgcctaaggtctcagaatgaagggattaaaatagaattattcaaaaatcgtaatatcaggtaagattttaaaagctactactcttcctcctcctcaatttctagacctatgcatttagctatggaagaggcagcattctatataaattattgtcacagatcatataccacacaaaataagacaaagcagatcttcagtctagtatggttaattgagggaaagtgcaaataagttttcaataggtcaagttatcattgtataaggctgactacttatccatggtatgaaaataataggagtagttcctttcacaagcgtcagctgattgctttacttcttttctgtgaaatgagttctacaaacagaaattgcattgatggaagaacttagtggtacatgagagaataagtctatgtcataggcaaatgcaacatggccacaggaagcaaatttagaaataaagagtaagaaagaatgaacaaaacctccaagaaatttgagattatgttaagtgaccaaacctaagaataattggtattcctgaggaaaagaaatataaaagtttggaaaacatatttgggggaataatcaacgaaaacttccctggccttgctagagacctagatatccaaatacaacaagctcaaagaacatctgggaaattcatcacaaaaagatcattgccgaggcacattatcatcaggttatctgaagtcaacacaaaggaaagaatcttaagagctgtgagacaaaagcaccaggtaacctataaaagaaaacctatcaaattaacagcaaatttctcatcagaaacccttcaagctagaagggattggggctttaccttcagctcccttaaacaaaacaattatcagccaagaattttgtatccagtgaaacaaagcttcataaatgaaggaaagatacaatcttttacagaccaacaaatgctgagagaatatgccattaccaagccagcgctacaagaactgctgaaaggagctctgagccttgaaacaaaacctggaaacacatcaaaacagaacctctttaaagcataaatctcacaggatctataaaacaaaaatacaataataaaaaaaaacaaggtatacagacaacaaataacatgatgaatggaacggtacctcacatctgaatactaatgttgaatgtaaatggtctaaatgctctacttaaaatatacagcattgcatcatggataagaattcaccaaccagctatctgctgcattcaagagactcacctaactcctaaggaatcacttaaacttaaggtaaaggggtgaaaaaagacattctatgcaaatggtcaccaaaggcaagcaggaattgctattcttatatcagaggaaacaaactttaaaccaacagcagttagaaaagacaaagagtgggccgggtgcagtggctcacacctgtaatcccagcactttgggaggctgaggcaggtggataacttgaggtcaggagttcaagaccagcgtgaccaacatggtgaaaccccatgttgactaaaaatacaaaattagccagatgtgttggttcatgcctgaaatcctagctatttggttggctgtggcaggagaattgcttgaacctgggaggcagaggttgcagtgagccgaaatcgtgccattgcactccagcctgggcaacaagaaccaaactccatctcaaaaaagaaaaaaaaaaaagacaaagagggacattatataataataaaagccttgtccaacaggaaaatatcacaatcctaaatatatatgcacctaacactggagctctcaaatttataaaaacaattactactgcctaagaaatgagatggacgcagcacaataatagtggggggcttgaatactccactgacagcactagacaggtcatcaagacagaaagtcaacaaagaaacaataaacaatggatttaaactatatcctggaacaaaagggcttaacagatatttacagaatattcgacccaacaaacgcagaatatatattcatcagtgaacatggaagtttttccgagatagaccatatgataggccacaaaaaagtctcaataaatttaggaaaatttaaattatatcaggtagtctctcagacaacagtagaataaactggaaattaactccaaaaggaactttcaaaaccatgcaaatacctggaaattaaataatctgttcctaagtgattattgggtcaacaatgaaatcaacatgaaaatttaaaaatttttcaaatggaatgataatagtgacacaacctataaaaacccctgggatacaggaaaggcagggctaagaggaaagttcatagccctaaattcctacattgaaaagtccaaaagagcacatatagacaatgtaagatcacacttcaaggaactagagaaagaagaacaaaccaaactcaaaaccagcagaataaaggaaatagccaagatcagagcagaactaaatgaaattgaaacaaaagaaatacaaaagataaatgaaaaaaaaaaagctggttctttgaaaagatatatgaaattgatagaccattagcaagattaaccaagaaaagagaaaatgcaaataagctcaattagaaatgaaagaggagatattataaccgatacctcagaaatacaaaagatcattcaaggctactatgaacatctttatgcacataaactaaaaaacctagaggaaatgaataaatttctggcaagatacaaccctcctagcttaaatcaggaagaattagatatcctgaacagaccaataattgaaatggtaataaaaaaaaattgccaacaaaaaaactccaggatcagatgggttcaaagcaggattctaccagacattccaggaagaattattgacactattccacaagatagagaaagagggaattttccctaaatcattctatgaagccagcaagcatcaccctaataccaaaaccagaaaggatataaccaaaaaagaaaactacagaccaatatccctgatgaacatagatgctaaaatccttaacaaaatactataaggccatagtcaccaaaacagcatggtactggtataaaaataggcacatagaccaatggaacagaatagagaacccagaaataaacccaaatacttacatccaaatgatctttgacaaagcaaacaaaatcataaagtggggaaaggacatcctattcaacaaatggtgctggtatagttggcaagccacatataggagagtgaaactggattctcatctctcaccttatacaaaaaccaattcaagatggatcagggacttaaatctaagacctgaaactataaaaattctagaagacaacattagaaaacccttctacacattgacttaggcaaggatttcatgaccaagatcccagaagcaaatgcaataaaaacaaagataaataggtgggacttaattaactaaagagcttttgcaaggcaaaaggaacaatcagcagaataaacaggcagcctacagagtgggagaaaatcttcacatctatacctctgacaaaggaataatatccagaatctacaacgagctcaagcaaattttcaagaataaaacaatttcatcaaaaagtggactaaggacatgaatagacaattctcaaaagaaaatataaaaatggccaataaacatataaaaaaattctcaacatcactaatgattagggaaatacaaatcaaaaccagggtgtgataccacctttcttcccccaagaatggacataatcaaaacaataaaaaaaaatagatgttggcatggatgcagtgaacagaaaacacatctacactgctggtggtaatgtaaactagtacaatcactgtggaaaacagtgtggagattccttaaggaactaaaagtagactaccatttgatccagcaatcccactactgggtatctactcagaggaaaataagtcatcatacaaaaaagatatttgtacccgtatgtttatagcagcacaattcacagttgcaaaaatatggaaccaaccccaaaacccatcaatcagtgagcagataaagaaactgtgacatatataaaagatggaatacttcttagccataaaaaggaatgaattattgggattcatagcaacctggatgggattggagtctattattctaagtgaagtaactcaggaatggaaaaccaaacatcgtatattctcaagcataagtaatagctaagctatgaggatgcaaatgcataagaattacacaatggattttgcagactcaggaggaaagggtgggaagggtgtgagggataaatgactacaaattgggctcaatgtatactgtgtgagtgataggtacaccaaaaatctcacaaatcaccactaaagaacttactcatctaacaaatactacctgttcccccaaaacctaaggaaacaaatactattttccagtgagggtaaataagtgtcatagcaatgctacaaaatctgatgtaatcaacatgccatcagcagctatttttcaataaagtatggtactctatcaacaattcaaagctgtctttaataaattttgccctccaatttggctgtagacagaattaccatagtaataagagaacaagtaattagacacaatcatagtccctgttcatcttcatcactatttattgagttcactgcaaggaaatgagctagctgaggaaaaaaagtactgccaaatgtgggtcatctgatcatttcaaatgttaacaatgttccattgaaatgactagtctctgggttttctcttaaaagcataatccatattgttcttatctaaaaccctacacaaaccctccaactatacttctaagcctttgacaagttagctaactgtctgccactgtctccaaatcaaagtaaatgtgggtctcaatctaggcttcctttcaggcacagcaaactacaaaatgtcctccttgaagttctgctgagtggaaagatttacttactccattacctttcaggattattcttatgagtgctctaatgctagaggaatacatttgtgtatagtgctagcatgctttgcagaattccctagaaatatcccttaagatttcaatcctctttaagttgaatagaaagaatattctacaaatccacagacataagttgagagaagaatggcaatatgatccctatacaggcaatgaatatgtagggagaatttgttcactgaatgtatcgagagtctcaatcctaaacagaccacttccatttaatggtggacttcatctagtcatattcaaacttgtggtttggtggatcaccatggtcagcccatgtcttgggatcacttgtatctcatgactaggcatttgttttctagaggcttgtggtaagtcaaatattcatcctcagaaggaaagtgtcattctgctgcaagatgtctaactttgtgcctaaactttagggaacacaaccggaagtcctttgggattttaccacttgggaattaagctctgttcaagacttcaggcctctgaaaatgagcaatactttggggaataaatggaaggacagctcatacttcattctgaaccaacttaaaattcttcagtggttctataaagtatgttcagtgaagtacaggagaacagccaaaataaattgttaagcagtgaagcatttctacaaagaaaaataagataactccaaaataaggggtcaattaaatgttattctaccttctagtttaaaaggactaaaagccgtccttaactttggagggaattaaatttatgctgtatctttagactgataagaattttgcttgggtatatattcccataggctttatttctaacttctattaatcttttttttaaaaaatttagaattcttaccaccttctattccatacagccaagcattcatggagaagcatcatgtcctggggtgaagatgtggtccatattcttcatgactaattcgtgagagaaatctgcccctgccatatacaggtgtggtatttagtcagcttccataaaaaggtctctaaacacctctagaaagaacttacgttaaattttggataaagtgaggcaatattccagaactttcaatatgttttacccagatcaaacctgagaaataagagagagcttatagaatcaccatgtctggaaaatcttcactggtgattaaaatcttaagaattttgagggagaaggaatattattttgattaaaaatttcacagataggaggagcaccaatggcatcctcctgataatcaacatcctaactccattcattatcatttactacatagttagggaattaccagcttgatcttatttttaattactaaatatcctttctaagtatatactcctaaatttgggatatgatgaccgcataaaatatgaaccacttgtcccatctattgtgagataagctaagtctcaattctttattgcttaacagtgttagcttccagtgggccagtgtggtaaatgtctgaaaacttctaaaacattctctatagaatgatcatattcttttataattttttgactttttgaagaagacgaagtaaaacagtcaaggtatgtataaagccattatagtagcctttatcaagggatctt

SEQ ID NO: 60045 - DNA, 554 bp, Homo Sapiens
tttcctttcacacagcagcatcatttatctggtagtagcaagacagccgtatgactttttgttgttgttaaagaaaaataagttgtcaagatttgcctaccaataactttcctatgtcttggctttcatgtccagtgggctagtttccaactgtttgagactcagggtaatcccagaaacctgtgaagcatcggcacaaaggttgtagcgcagatgccaacagatgtgtaggtaacaaacttgtaaggcacttcaatctccagtctccgcctggcctccttgttcctggtgaccaccttgaaccatgagtataatacttgcagtgagagattttgtacaagctgacgaaccaagaggatcaacacaattcccactgcaaatttggtcagacccaaaactaacatgtaggtggtgagcggtgggatgttctgaataacagggagagattcagcgggcttggatacaagctggaagaaatggttgatccagaatcctatggtcactccagccccggcagccagaatggtggtggtgtccgcccgggttgggctgta

SEQ ID NO: 60046 - DNA, 2787 bp, Homo Sapiens
gtttgaagtgtgggtaaaggttggggttaagaaatcacagctttgctagctaaaagtggcataatcagttaataatgaaaaactcacagctttgctactttgagtttgaagtttgctagtttgaggccaccatccagaaatttaacaaggagatcctagaaatgagagacctatagagggctaacatggctccccaaccatctgtagcagacagctaaactttgcatgcccaggggatactcagtagagcccagcaaaaagtgaaagccagaagagacttgagatctgggtacaactttgaatgctaccttccatgcagactgttccatctgcagatgttggaagccttactggtgcaaggtggctgggcttaatctctgcccaaatccactggctgaccactaaactaagcagccactcactcattagggaaatgcaaattaaagccataacaacaaccaccagaatggctaaaattaaaaagactgacaatccaagtgttgacaaggatatgcggaaaccagaatcctctcaaattgctggtgggaatataaaacagtatggccatgatggaaaacagtttggcagtttcttaaaaagttcaatatacacttaatgtgtaactcagcaattctatttccaaggtatgctgtcaggaaaaatgacagcatgtgtccaggcaaagttggtatatgatgttcatagtgtcacccagcaagcaatcaatgggcctgcttcccaaggcacatggaggccaataccatggcgctggcttttgaggaaaaataagctttatcatgactggactggcaaggagccaggaagaagcacccaaatctgcctcctggagctggtagttgggtagagttttataagcatagggtaatagggtgtgatccaattggatcttgtgatgaagtgatgctggggggtgttttctgactggctcctgacatggggctatgccagagctcaatctggttggattctggatcctgttatgccatatccacttttttttttttttttttttttttttgagatagagtctcactcttgtcacccaggctggagtgcagtggtgcaatctcagctcactgcaacctccgcctcctgggttcaagtgattctcctgcctcagcctcccaagtagctgggattacaggcgcctaccaccatgcccagtatttgtatttttagtaaagatggggttttgccatgttggccaggctggtctcaaactcctgacctcaggtgatctgcccgcctcggcctcccagagttctgggattacaggcatgagccaccacacccggcttccacttcttagttcagtcccctctccttggttggaacatttaggttgcccctatagttgcatgcttggttcatctggacatgctcagcttacatgatgttcaacctgggggcccatggcaactgaaaaacaactcacaactttgttacagaagagatgaaccagattggtctgacgtggttaaaacagcagctttagctgtgattgaaaactggaactaatttatgtgtctgtcagcagatgaatggataagcaaattgtggtatatctatagaatggaataatactcagtaatgaaaaggaatggactattgatacatacagtgacatgtatgcattgcaaaataataacatgctgtgtgaaagaagccagacaccttttcctacaaaacagaatactgattccatttaggtgaaattctagaaaatgcaagctaatctgtagtgacagtagatcagtgcctgcagatcagaggatggcttgggagaggagggagaaagggattccaaaggaaagagcacaatgaaacgtttgggggtgatgtatatattcattatttgattatgtctaatgatttcatgggtgtatacatatgtcaaaactcattgtatatttaaatatgtgcaatttattgtatatcaagagtaactcagtaaagttataaaaactaaaactatgcccattcaaaaagcaaacagatgttcatagtaccattattcacagtagacaaaaactggaaacaatccaaatccatcaaccggtgaatagataaacaaaatttggtatgtccatatcagccatgaaaaggaataaaattctgattcatgccacgggtacatactacaatatggttgaacctcagaaacattatgccaagtgaaagggctctgtattgtatgataccatgatatgaaacttttagaacaggcaaaaccttagatcagatcagtactttgcctgggtgtagggtggcagcatggagattggttttaaacaggcacagcggaacagtttgggtgatggaaatgttcctggtgatagttgtgtataaattgtatgaaaacgtgtgcaattgtgtacttaaaatggataattttcatgacatgcaaattatacctcaagaaagccactaaacgtgggtggccactcaaaatttcaaattctctttaagatgaccattcaggtcaggcatggtggctcactcctgtaatcccagcactttgggaggccaaggcaggcagagcacgaggtcaggagatcgagaccatcttggctgacacggtgaaaccccatctctactaaaagtacaaaacgttagatgggcgtggtggcgggcacggtggtgggcgcctgtagaggcaggagagaatggcgtgaacccgggaggcagagcttgcagtgagccaagatcacgccactgcactgtagcctgggtgacagagcaagactccaaaaaaaaaaaaaaaaa

SEQ ID NO: 60047 - DNA, 3962 bp, Homo Sapiens
atatctggcagctggctatgccatcattgccgaaaacaaactcctataatccaatgctctctcatcacatatcacctcacaacaagcggaactatttgccctaaccaagaccctcactctagcaaagggaaagagggtcaacatttacaccaattccaaatatgcataccatgtcctacagtctcacactgtaatctggcaggaaaggggtttttctaactacaaaaagaaccgccataataaatggcaaactcatacacaagccgctggaggcagctaaactaccactagaggccgtcattatccattgcaagggacaccaaaaggctacagatgccataaccaagggaaacttcttagcagattcggcagcctggcaggcagcccttagaacactattgttattgcccattttccctagcatacacccaagaagaaaaaggtgccttgctggctccagggctgttcataacgaaagctgaatttacttagactacaaactcatcctacccaagacccaaaaactttctgttctcacccacatccataaccaattccatgcgggttatctcccgttgctccaatttctaaaaacctgtatacattcccttaccatggccatcagcttggaccgcctcactaaaggttgctctgcctgcagtcagacttcccctcaggggcccttagaccacctccttttccctcccttcaggcccaaaggccagttgccgggacaggattggcaaattgacttcactcatacgttcccccataaagaaagtctgatatctcctcacgatggtagataccttttcaggtggatagaagcctttcttactaccactgaaaaggcacacaccattgcctctaccttcctcacacacatcatcctttgattcagcctcccctcatctatacaactggacaattgaccagcatttatctcccaagtcactcaacaggtttctaagtctttaaacatcatatgggtttttcacattctctatcacccccaatcctcgggtaaatttgaacaggcgaatgccctcttaaaacaacagttaaccaaactttccctagagatcaaaatgaaaactgaatatcacttcttcccttggcccttatgtgcctcagggccctcccccgaaaacctctaaatctaagtccttttgaactcttgtatggacgttctttcgtcctacagaactttgctccatcccctcccttacaggacacctggccagcactgcacctcactcaacacttagtccgacagtacactgacactcacctccccaaacctgaggattcttcccaattcactttcttacccttacagccaggagactgggtctgggtagcacacccctcctcccctttccaacaaaatggaatggtccctatcaggttatattcaccatccccgctgctgcaaagttaacatcctttccctattgtatacaccattccaaatttaaaaaggcacccggcccacaccccgaagtctcctcaccccggaaatattcttcctttcccacaggaccaacctcgctgtgcctaacaagaattccagaagtcacccatccgaaaggcgctggcccatgacactctccatttccaatcttaaatcttttacttcataccttgtctcagatctctcctggtaccccttccccacgcccttagataatccatctcaattcctcacgctaattgaggagctatggctgcaaggcaccttccaggatttcacacctacacaaatctcctttttctccttttgccttctctgcttatgggatattctgagtccccacccccaatcactgacagctgggcccccttcatcagcctcacacaccacgtattaagtcagtcacaatctcccctctcctctaactgctggatttgtctttctacacacacccaatgattcacggctcttccggctgacctacttacatggacacagtccaacgtgagcttacacatttcttacttggctataccattcttggctgattcattcctgaaaccggttcataacctggaaactcagctaaacacctttccttcaaactcagctctctcagcatggtttcaggtagggctgttgccctccttcacctaatagcttctggactaacatccatacaaaccaacacagcatcatctaaaccaccaatatgggggtaccatttctactcaaacttcctttatatccccaccccccttatgtctcagccgaacctaccctaatccagcccacgccacaatggtgggacaggttccccagtcctatgtggtcttatttttacccttgcactccctgtagaccatcaattctacaccctaattacaaaatcatatccacctctgcctggcagaaggtgttatgcttttctggctcgcctaccatccacacatccctacacctcaccaccggatcctcttttctttccttccatccaattcctggcttccccgctgccaactctgctctctatgtctccagtttaaaggtgccccctggaaaaaatgtaacaattccctcacctgtgactggtacctgacagccaccacaccggggcagcaatggctaacggttgacaaagacaatttctttctctctccaaaaccaaacagccttcatcaactccctagccaagactccctatcaggcccttacaggtgccgctctggctggcagttacccaatttgggaaaacgaaaataccctatcatggctacctaccttcacctacaacttctgcctgtccacccccagtctcttctttttgtgtgatacaaactgatatctttgcctaccagccaactggtcaggaacttgcaccctggtctttcaggctccaaccatcaacatcctaccccctaaccaaactattctaatttctgtagaagcctctatctcctcttcacccataagaaataaatgggctctacatctcatcaccctgctaacaggattaggcatcactgctgcacttggcactggattagcaggcataaccacctcaatcacctcataccaaacactattcacaaccctttctaacaccgtagaagatatgcacacttccattaccagtctccaacgacaattagacttcctcgtgggagtcatccttcaaaactggagagtcctggacctcctaaccactgagaaagggggtacctgcatatacctccaggaagaatgctgtttctgtgttaatgaatctggcattgttcatatcgcagttcgtaggcttcatgacagggctgcagagctttgacatcaagtcgctgactcctggtggcaaggatcatcccttctaagatggataccctgggttgcccccttcctaggacccctgatcttccttttcctgttactaatgattgggccatgcatatttaaccttgtatcccgcttcatttcccaaaggctgaattgttttatccaggcaagcatgcaaaaacacattgataatatatttcacctttgccacgtctaataccagagccttcgaggaaaccattcggaagctccagaacccaggccctaatcacaacgcccctatccagcaggaagcagccagatgatcaacgacgccctttttcctttttatactaaagtaagaaataagaatgttagcccaaactgcactattttgcagacccctaccattttacaaactggtcagagtggaaaattccaccagggcctgagctgtgagaaacatcctgtcaggcaggtcccaggcctaacccctggctgcactaaattccttcattatcagcagccaaacacaccgcccccaccccattttcacaacaatcccagacctctcctgcccgggactgtaactggtccagcctgtaagcgggaagggggctctggcactagctggtaccccctctccgcaggtctttctcccaataaatctgtgttgccattg

SEQ ID NO: 60048 - DNA, 1944 bp, Homo Sapiens
tttgctctcttatgttactggttttgaaaacatttatatttacatgtgtctaagaatgtgtgcttatgtgtacttgcttcctagctttagaatctgcttagaatctgcaccttacctaaaatttccagtgtgtaaaatgaacatattacttatataaaccacatgggactgaacttttcatgagagcccccaaagtttccttcgtggagagattgaagctggaggaaatgaatttggcttataaaagatatgaggcatttaacagcaattggagccaaacttggtgttctttctgatttttttaaaattaatataccagaggaatcataaaatgttatggaacttatttcctcaagttctggaaatcattgggttaaacatagctaatttcccccttatgttattatagagtttatatttatattacaaagaaacgcaagcaataaatcctcattcagaatccttctctagcacattaaatatagcatgtgaactgtagagatttacctaaagtgcccataaacaagagtggccaacttgatgagaagtaagccaagtgccccttaataagtactgtaataacatagcctcctggaatggtctttcatcattttgtcaagaggaacttttatccctgtttatataaagctcctttgctaaatgaaacaagcaaaatgtatattcagcaattgttgacagagcaatgttgatagaaatgcaatgggggcccaacgacagctcctctttccaaagtggcttctgtgttttaaaaagatcttttgcttcaatcaggataatttccaagatattatgaaggaggtaatgtacttctccattcagtctatgataatgggatcctaattaacacctagtaggcctactgaaacaagcacctctataataagaggaagattctacatgaatatccaacctacttaacctttagggatttatttttacaatgtaagaaagtgataaagtcaccttcaaaaagttctaagtcagtacttaaaagtatttgatcaattgctttgtttcatgaagtaacattttacaattttaagtcacaactataaatttgttcatcccaaaccaagttatttcatgtcttaagatgtataattctagatgttttcatatgttataactattaaaaagttgaggctggacatggtggctcatgcctgtaatcccaacactttggaattacactttgggcatagatggggagatctcttgagcccaggagttggagagcagcctgggcaacacggcgaagggaggatcgcttgagcccaggaggttgaggctgcagtaagccttgattgcgccattgcactccagcctgggcaacagagcaagaacctgtctcaaaaaattttaagttgatctttctttctctacaattctattagtaaggctaaaaacaaaaccactaactttgcataaaacagcattccaatttaatctcaagctaacagttgactttgaaacatgctcttaatatttggtgcaggacatttcaaagctgagccctcttgcattgcctttttcagatgacctcaagcagtttggcctaacaaccagtattccgttccgaggttgcatcagatccctgaagctcaccaaaggcacaggcaagccactggaggttaattttgccaaggccctggaactgaggggcgttcaacctgtatcatgcccagccaactaataaaaataagtgtaaccccaggaagagtctgtcaaaacaagtatatcaagtaaaacaaacaaatatattttacctatatatgttaattaaactaatttgtgcatgtacatagaattctttctgtattcagatggtgctaattcagactccagactgaattttaattcaagttctttctcaagtctataaatattaaactgattatttcatctaaaaaaaaaaaaaaaaaa

SEQ ID NO: 60049 - DNA, 505 bp, Homo Sapiens
tttttttttttttaaggcagtcagaatacacgtttattgattaagtacaccatcttgtataggcagagttattggcaccctatagtacaacactaacatcaaatatcactgatcacagatcaccataacagttatttattaatgaaaaagtttgaaatattatgtgaattaccaaatgagacatagagataaaaaatgagcacatgctgttggaaaaaaatggcactgatagacttccttgatacagggttgtcacaaaccttcaatttgtaaaaaactcaatacctacaaagagcaataaagcgaagtacaataaagtgtgcctgtaatatgaatgtacaaaatatagtagtttttgagatcttttttggttattttattattcattttaacttattataaaatattttgaacataagaagtagagaaaatagtataccaaatcctcatttattcatcacccacatccagtccttatttttaaaattttgttaatagacatata

SEQ ID NO: 60050 - DNA, 319 bp, Homo Sapiens
tctgagctgactcaggaccctgctgtgtctgtggccttgggacagacagtcaggatcacatgccaaggagacagcctcagaagctattatgcaagctggtaccagcagaagccaggacaggcccctctacttgtcatctatggtaaaaacaaccggccctcagggatcccagaccgattctctggctccagctcaggaaacacagcttccttgaccatcactggggctcaggcggaagatgaggctgactattactgtcactcccgggacagcagtgggaagtatgtcttcggagttgggaccaaggtcaccgtcctag

SEQ ID NO: 60051 - DNA, 691 bp, Homo Sapiens
  misc_feature (454)..(455): n is a, c, g, or t
  misc_feature (647)..(647): n is a, c, g, or t
  misc_feature (676)..(676): n is a, c, g, or t
acggatagcggatctgcttcaattcttcctccagtgtgatgtacagtttccttgcagtgcccaagggctctagagctcatcccacccaaaccaaagaatgctggtcaagtgggaaggagtccctgttctcagctgtagagggtgtggggagcactccgagtgccgtatctcagaacatctaagaacagtctaggaaaacacactccatttgtggttctccagagaatcagcacttggaatcctttgccaccgcgtaccccaggctctgaatcctgactgcgagattacacctgccagttcaccatcgactgtgtcacacggctcagcacagctcccaggccaacccatcctgatttccatctacttctaaactgcatcactctactcctcacagcaacaactcaaattccctaatgactaatctgttcttaaaaaaaaaaaaaaaaaaaaaaanngagagagatggggtttcgcagtgttgcctaggctgatcttgaactcctgagctcaagcaatcctcttaccccagcctcccaaagtgttgggattacaggcgtgagccagcacacccagactaatctgctctgagtaacattttaccaagccagatttcttgaaactttttttaaaaattaaaatcccatgcncacacaagttacaggcaagcttgaatgtncctggaaacccaact

SEQ ID NO: 60052 - DNA, 2094 bp, Homo Sapiens
gatgcctgatctcatcaatctagcgggagagacaggataacctgtccgagagtatagcgccactatgactccgccggaaaaattactttaaaaatcgccaaaaattacttggagcaaagggcagtcggcggacgttcgccaaggctggccagtcggccgttttctcgacccggtgatggccgtcatctcgtgacaagaaacttaaggtcgacagaaaattcaggacccggagtcatgggtccctccggtgggtcgtggcaacagtcccccccgccaccgcccggcacccatctatctatattgtcttttgacgctgaagcgtggaggtgccccaggaaagagtttcccaagccctggctgccctcccccggcgcgctgggtcccggtgaggtctctaggtagggttttgacctgtagcagagaaccaattctggagaacagcctcacttctttgattgaatacttacataatgcattggaacatgacatgagattaaggtttaataatgatagaatgaagaccacaataaaagagacctctacttagctcagcaattcttacctttcttacctatttgatgaagatgtcttttgaaaggtgtactgcaaggaacaaaatgtttgtaaattctccttttaccaagaggtttcttttttaattgatgccaaagagttccaatattgaacatcttaagtctgttacttggattacggattgagtttggagcttactcagaggactacaggagagtatccaggaggtggataattactgtaccttcctcatggaaaaagttttatttaaagtgttatttctcattgaatactatcaaaaaggaaaaaaaaatgacctaaacttttgagatagatttggctctagtaagtatttagttatatcacttgcatatctgggagaagaaataagagactatcatcagtacattcccatctactaaaaaaatttattttacacatgtcaagggattacttataacttccattttattactaatagcttgaacccttttaatgaagacctaactcctccaccagaaatttaagtttatgttcttactttgtttacttataaaatacatctcaggtatttcggatgtcttttttttttctaagcctatatgaaatgaaaaatatattggcaaaataaatgtttaaaccttttacgttaaaattactttgaaagatgaaaagttagtgctgtttttgtctacgttatactgaaattaaatgtttataatttatattttgggtttatgtataaatcatggaatttatgcaaaaatatgagtagtacagattctcctctaattctgtaggactttgaataatgtgatatttttcttataattggacccttgtgttttgaagaaatgccaactgcttgaagaatctccttgttatttgtattatttgctatagggttagatgttgagaaattctgctgacaaaaaattttaagccagttttacactaaatgttcctcagtctgattaatttgttattggatgtattctgtatctttcttttgtaatttgtaacttttatccacttagcacgaatgattctattaaagaaaatcattaggaagtggtagaaactttaaatcgccccagagtttgcctgtttccatattttattaccttataatcttcgggagtgcttacacttatggagctaacattttcagagatacagcttcttatagtaacactaaaactttcttcctctttggactgaatacctataattataactatatggtagtttaagtttccttgtgattagtcaaaaataccattttagtatgaagcaatgaagtctattatttgttgtcccataattgagaaagcttaaatacaccttttattaagagtttgtaaattctagcttagtctacacagatttttatatcaatttgtttatatttttattaatgtcatttctggaagtgtgaaaatgttaatgttcaacaagcaacattaaaaatagatttgaaacatttatatatagagaggtacacatttatttactgtttaggtactgaagattatcacttaataaaaaatatatatccca

SEQ ID NO: 60053 - DNA, 635 bp, Homo Sapiens
tatttgtatataactttaaaaggagtagaagggctttttgcagagttattacgtttgaagtatactttatttcttgaaaaaattacagattttttgtaaataatgatgtaattcaactctcaaaatatttcctactgtttctttattccagttgtattcacatgtgaaagcatgtgatcagttattgctgcattaaaaacatgagtcttttttattaggtggccattatttatgatcttttctatgaaagagtaaggacattaaaatgtaagatgcatgatgaaaaattaagtgaagaggctctttatggttaatttatattgaataatgcattaggtaggtgttcagagtaatattttgcgttgtgagaacatttttaattttatttaaaattaaatgaaaataaattagtatattattgtactaattgtacttttgtataataaaatccagtgtatttttaaaatgttaggttatgtgtggctaatattctaatccaatatttctcaacatgttaaaatactattgtgcattctaaagaagtgttattatgccccgaacctttatcctgtttccattttacttaaagggattgatgaaaggataataccaataaggggccaggccgtctgggt

SEQ ID NO: 60054 - DNA, 420 bp, Homo Sapiens
tttttttttttttttttagaataaaagtgaacatttaatgccaccatagtttgatttttttttaaacaccagattcttttttgacaacattttacacctcatatgccacaaaaagtcagagatcgtagccagcaaacaatgtctttacactggaaaatgccacacagcttaatggattcatgtcaccagtttgtgagaactataactctttttttctggactgttctccagggagcctgctcatatttatcataatcaagccaacacctaacgtttatatagcttgcaaaggcccatgcacaaaactagcctgccaaggggctgctgggacctgcccaagtacagaagagttgaatttctgactttaacaaatgagtttattgaagcattttaacagcaaacacttgtgaactaataatg

SEQ ID NO: 60055 - DNA, 437 bp, Homo Sapiens
ttctattttgcagactttcttttttaaaagcaaaataaattgacatgacttgttcagggttaactgtttggcaggtggatgatctgtggccatccatgatgagatcacctccctgccccgctggcccccagcctctagaagtcagggcttctgaggcccagaagctcagcgccacacctgttgaaggccagtgatgtcagagttactcttccttcctccagcagcactgacagcagtttattgtacgcaatttctagaactcagatgttctagaaggaagcaaacatattctgagatcacagactatgactatgctctcagaatatgttctagaacacctaagttgcaattcttaaaatcaacacagcgtaagactgctttaggaggaagtgatcaagctcaaagcaacctaggcatgatgtgccttgtttgtttat

SEQ ID NO: 60056 - DNA, 2637 bp, Homo Sapiens
ttcgatgtgggctcagagaagacacgaattggtcttgcacagtatagtggtgaccccagaatagaatggcacttgaatgcatttagcacaaaagatgaagtgattgaagctgtccgaaacctcccatataaaggaggaaatacactaacaggtcttgctttgaactacatttttgaaaatagcttcaaaccagaagcaggatcaaggactggagtatccaaaattggcattttaatcacagatggaaaatcccaagatgacattattccaccatctagaaatcttcgtgagtctggtgtagaactgtttgccataggggtgaaaaacgcggatgtgaatgagctgcaggagatcgcctctgaaccagacagcactcatgtgtacaatgttgccgaattcgatctgatgcacacagttgtggagagtctgaccaggactctctgctctagagtggaagaacaggacagagaaattaaagcctcagcccatgccatcactgggccgcctacggagttgattacttctgaagtcactgccagaagctttatggttaactggactcatgccccaggaaatgtggaaaaatacagagttgtgtattatcctaccaggggtggaaaaccagacgaggtggtggtagatggaactgtatcttccacagtgttgaaaaacttgatgtctttaactgaatatcagatagcagtctttgcaatctatgcccacactgctagtgaaggcctacggggaactgaaactacacttgctttaccgatggcttctgaccttctactgtacgacgtgactgagaacagcatgcgagtcaaatgggatgcagtgcctggggcctcaggttacctgatcctttatgctcctctaacagagggcctggctggggatgaaaaagagatgaaaattggagagacccacacagatattgaattgagtgggttgttgcccaatacagaatacacagtcacagtttatgccatgtttggagaagaggccagtgatcctgttacgggacaagaaacaacattggctttaagtccaccaagaaacctgagaatctccaatgttggctctaacagtgctcgattaacctgggacccaacttcaagacagatcaatggttatcgaattgtatataacaatgcagatgggactgaaatcaatgaggttgaagtcgatcctattactaccttccctctgaagggcttgacacctctcacagagtatactattgctattttctccatctatgatgaaggacagtcagagcctctgattggagtttttaccaccgaggaagttccagcccagcaatacttagaaattgatgaggtgacgacagacagttttagggtgacctggcatcccctctcagctgatgaagggctacacaaattgatgtggattccagtctatggggggaagactgaggaggttgtcctgaaagaagagcaggactcacatgttattgaaggcctggagcccggtacggagtatgaagtttcactattggccgtacttgatgatggaagcgagagtgaggtggtgactgctgtcgggaccacacttgacagtttttggacagaaccagctacaaccatagtgcctaccacatctgtgacttcagttttccagacgggaatcagaaacctagttgtaggtgatgaaactacttctagcctgcgggtaaaatgggacatttctgacagcgatgtgcagcagtttagggtgacctacatgacagctcaaggggaccctgaggaagaagtcataggaacggttatggtgcctggaagccagaacaacctccttctgaagcctctgcttcctgatactgaatacaaagtcacagtgactcccatctacacggatggcgaaggcgtcagcgtctccgctcctggaaaaaccttaccatcctcggggccccagaacttgcgggtgtccgaggaatggtataaccggttgcgcattacgtgggaccccccatcttccccggtgaaaggctatagaattgtctacaaacctgtcagtgttcctggtccaacactggaaacgtttgtgggagctgacattaacaccatccttatcacaaacctcctcagcggaatggactacaatgtgaagatatttgcctcccaggcctcaggcttcagcgacgccctgacaggcatggtgaaaacattgttcttgggtgttaccaatctccaagccaaacatgttgaaatgaccagcttgtgtgcccactggcaggtacatcgccatgccacagcctatagggttgttatagaatccctccaggataggcaaaagcaagaatccactgtgggtggagggacaaccaggcattgcttctatggacttcagcctgattctgaatataaaatcagtgtttatacaaagctccaggagattgaaggacctagtgtgagcataatggaaaaaacacaatcacttcctacacgaccaccaacttttcctccaaccattccaccagcaaaagaaggtaaaagaataatagaataattatctgattctaggtttaggatttgtgttggttttgtttgcctgttcatttcaaaccaggatattaataaagtatatttattgtgctaaaaaaaaaaaaaaaaa

SEQ ID NO: 60057 - DNA, 530 bp, Homo Sapiens
  misc_feature (333)..(333): n is a, c, g, or t
  misc_feature (497)..(497): n is a, c, g, or t
  misc_feature (509)..(509): n is a, c, g, or t
  misc_feature (524)..(524): n is a, c, g, or t
tttgcagtcacaagtactttaatttttaaaaacaaatcacttattaaaaaataaacaaatggccatgctactctaaagttgatacaagtaaaataaattaagaggtagtgtctcatgagacaatgtgctgaaagtcagtgcccaactagacaatctgagctactacatacacttggcttatctgtaaagttagatttaagacactactctcaaaagtaacatttcactgtcacagctatttcactttaaaaggttaaacaacccaaagagtttaaacagttttatttccaaaaacaacattacagagcataatttctacattaaaaattcttnacagtaccaagagaagtattacagtacaattttccacaacaaaattgtagcacacaaatccacgcgactcctgggacttccttgaactggtcaatacactggcaccctggtttaaatgggctgtaccgactcctcttccttctccattccggtggggcatctgngggcacgggccnggtttatcgaggggnattcgg

SEQ ID NO: 60058 - DNA, 159 bp, Homo Sapiens
gttaaaaagaacagatacaaggacatactgccatggcgtctatgggccaaaagcatatgtagcaactcaaggacctttagcaaatacagtaatagatttttggaggatggtatgggagtataatgttgtgatcattgtaatggcctgccgagaatttga

SEQ ID NO: 60059 - DNA, 3083 bp, Homo Sapiens
ggcgtaagatggaggcggcgttggtggtggcagtggacggggcggctgggcctggaacagtcggagcagccgctagcagaaggatgacccaagacgggaagcgggctgctgagcctcgccgattcccgtgcttgtaactgccccagccggacaccccccctcccttgacctacccgtccttcagtgaatctacagacctattttctcaggagcgcagcctggccttacttcagtgataaaaggaggaaaggctggctacagcaaacatcattcaagatgtccagcaaagggagcagcacagatggcagaacagacttagctaatggaagcctgtctagcagtccagaggagatgtctggagctgaagaggggagggagacatcctcaggcattgaagtggaggcctcagacctgagtttgagcttgactggggatgatggtggccccaaccgcaccagcacagaaagtcgaggcacagacacacagagagctcaggtgaagataaggactctgacagcatggaggacactggtcattactccattaatgatgaaaatcgagtccatgaccgctcagaggaagaggaagaggaggaagaagaggaggaagaagagcagcctcggcgccgtgtacagcgcaagcgggctaaccgtgaccaggactcatcagatgatgagcgggccctagaggactgggtgtcctcagaaacatcagctctaccccgacctcgctggcaagccctccctgcccttcgggagcgggagctgggttcaagtgcccgctttgtctatgaggcctgtggggcaagagtctttgtgcagcgtttccgcctgcagcatgggcttgagggccatactggttgtgtcaataccctgcactttaaccagcgcggcacctggctggccagtggcagcgatgacctgaaggtggtggtgtgggattgggtacggcggcagccagtactggactttgagagtggccacaaaagtaatgtgttccaggccaagtttcttcctaacagtggtgattctactctggccatgtgtgcccgtgacgggcaggttcgggtagcagaactgtctgccacacagtgttgcaaaaatacaaaacgtgtggcccagcacaagggagcgtcccacaagttggcactggaaccagactctccctgtacgttcttatctgcaggtgaagatgcagttgttttcaccattgacctgagacaagaccgcccagcgtcgaaactggtggtgacaaaagagaaagagaagaaagtggggctgtatacgatctatgtgaatcctgccaatacccaccagtttgcagtgggtggacgagatcagtttgtaaggatttatgaccagaggaaaattgatgagaatgagaacaatggagtactcaagaagttctgtcctcatcacctggtgaacagtgagtccaaagcaaacatcacctgtcttgtgtacagccacgacggcacagagctcctggccagttacaatgatgaagacatttacctcttcaactcctctcacagtgatggggcccagtatgttaagagatacaagggccacagaaataatgccacagtaaaaggcgtcaatttctatggccccaagagtgagtttgtggtgagcggtagtgactgtgggcacatcttcctctgggagaaatcatcctgccagattattcagttcatggagggggacaagggaggcgtggtaaactgtcttgagccccaccctcacctgcctgtgctggcaaccagtggcctagaccatgatgtgaagatctgggcacccacagctgaagcttccactgagctgacagggttaaaagatgtgattaagaagaacaagcgggagcgggatgaagatagcttgcaccaaactgacctgtttgatagtcacatgctgtggttccttatgcatcacctgagacagagacgccatcaccggcgctggcgagaacctggggttggggccacaggcgcggactctgatgagtctcccagctcctcagacacatcggacgaggaggagggccctgaccgggtgcagtgcatgccatcttgaggcctcatacccaggtggggcaggctggggctgccaacctgatcctgcctgggcaaccctttcctgtcccaggccctacattcagcagaaacgcactttggactttttgctttagataaaagaaagacacccccagcaaccccatcccagaatcctattttcctgggaagtccttaaagcccctaaccatcccacactcttcactttcctttccactttattcattcactgttagaggcctaattttatatctataaatatattaaaaagcaagtcaaacttggatgtatcaaggtaaaattattgtcaaagtttaaatacctatatattctctgaatgcaataaagggacttaagagtgaacaagagtaatggtgtggaagtgacacctggggtcagtttacctctgtgtatggtcactagagattgggacttaccctttaggttttaggaggcttgagaatggaaggatcctcatttctgcccttcctggttccctgctttggtgtaggggttgggaaaaacaggaaattcctctcagctctgcctcagatctcctacctctccttaagtcttgtagggggttccaaggatggctcttctaaccagaggctggctacagcaaacatcattcaagatgtccagcaaagggagcagcacagatggcagaacagacttagctaatggaagcctgtttagcagtccagaggagatgtttggagctgaaaaggggagggagacatcctcaggcattgaagtggaggcctcagacctgagtttgagcttgactggggatgatggtggccccttttcccagcagctctgagaccagatgttggctgctgtacttactccttgaggtagggaatgtgtggtgatcgagtggtctgtgttcctattgctggtggggtgatagggtgggctaaaaaccatgcactttggaatttgttgtattttctcccagtaaagcttttcttctcccgaaaaaaaaaaaaaaaaaaaaaaaaaaaaa

SEQ ID NO: 60060 - DNA, 3433 bp, Homo Sapiens
atgtcttacagtgtgaccctgactgggcccgggccctggggcttccgtctgcaggggggcaaggacttcaacatgcccctcactatctcccggatcacaccaggcagcaaggcagcccagtcccagctcagccagggtgacctcgtggtggccattgacggcgtcaacacagacaccatgacccacctggaagcccagaacaagatcaagtctgccagctacaacttgagcctcaccctgcagaaatcaaagcgtcccattcccatctccacgacagcacctccagtccagacccctctgccggtgatccctcaccagaaggtggtagtcaactctccagccaacgccgcctcttcagcacctgccacccacaccagctacagtgagggccccgccgcccctgcacccaagccccgggttgtcaccactgccagcatccggccttctgtctaccagccagtgcctgcatctacctacagcccgtccccaggggccaattacagtcccactccctacacccccycccctgcccctgcctacaccccctcccctgcccctgcctacaccccctcacctgtccccacctacactccatccccagcaccagcctataccccctcacctgcccccaactataaccctgcaccctcggtggcctacagcgggggccctgcggagcctgccagccgtccaccctgggtgacagatgatagcttctcccagaagtttgccccgggcaagagcaccacctccatcagcaagcagaccctgccccggggaggcccagcctacaccccagcgggtcctcaggtgccaccacttgccagggggaccgtccagagggctgagcgattcccagccagcagccggactccactctgcggtcactgcaacaatgtcatccggggcccatttctggtagccatgggccgttcttggcaccctgaagagttcacctgtgcctactgcaagacttccctggcagatgtgtgctttgtggaagagcagaacaacgtttactgtgagcgatgttatgagcaattctttgccccgctgtgtgccaagtgcaacaccaaaattatgggggaagtaatgcatgccttgagacagacatggcacaccacctgcttcgtctgtgcggcctgcaagaagccttttgggaacagcctcttccacatggaagacggggagccctactgcgagaaagactacatcaatctgttcagcaccaagtgccatggctgcgatttccccgtggaggctggcgacaagtttatcgaagccctgggccacacttggcatgacacctgcttcatttgcgcagtctgccatgtgaatctggaggggcagccgttctactccaagaaggacagacccctgtgcaagaagcacgcacacaccatcaacttgtaggcggccaaggccgcctgtgctgacgaggcccggagctgctcctgctgctggcaacaaaggattcgggaggctgatgtttcttctgaggggaatggggagagagaggaagcgactgagcccyttggaagtataattttaggttttttcttctgtacacagatcgtgcatttgcatagttcagactaggagccaaatgaagactcaaaaccaagctagttattaatccaagactggaattgtacttcagacatttagagcagaattccaagaactcaaaagtgaaaagcaacaagcagctttcccaaagcgatacacttgctttggtcaccagaggaggacagagcttagagcagctgtggagaatctgaagcattctgcggagttcttaagcgctcccctggcaaacaaattgaagtgccaaacagcactcgctgcagggtatttttagagtcatagctgagagcttgttagctaagacccattgggctttcctcaccaaaaaaggaagtgttattccattactagcgtcatggagctacctctgcgcatcagacttcagaccttgaacaaacttaaaaccttcttgggagcccggacgtccaaagagatgtcttctgggagccactgggcaattgccagggctccaggaagggctctggctcaggttgcagacagctgagaaaagatggccctgtcagccaccctctctcagtctgaaacatccaacatccccagaaggcttagctcctttttgaattgtgatgggaaagtagagttgggtttttccagttttgctctgtggtgtgtgagagatttttttaaaggctttgggttgtctttggcctttgtttagctttaagggttcgttagcatgagtgtccagtcgtgtgcatgaatttcaccccaacttgtgactgctcacttatgacgtctcccccagtaccctccatctcaaataggcttggtggcctgtggaaaagaagagagacagagagacagtgtctgaaacaggatggcagaataggctcacatgcccaaactctgggtggggaagaggaaacttactttctgccaccctcagtaagaacacacgaggaggcaggacctcccaccttcaggtctgcatcatccttttcaaatgttcctttaaatgcagcacactgagtttgtacaattgtgttaactgctggaagggacagatgcactgatatatatgcatttgctgttttggccaatattttgaaaatgtatgagctgagttgatctagctattatttaagtatttattgaagtagaggggccttcaaactactttatactagtgatagtttgagttaggtaagcatcttaaagctgtttggtgataaagaaggcagcttagattctgtggttggaaacagtgtagtcgcttccctttttaggaagccctgttaatatgctcattgaaaacatggcattgaagcaggcacttgcgtggatgtttctcacttgagcacgatatttaggctctcttccaactcactctattctgtcctcactcctgttttggatttttctctttgcatgtttgaaatgttttatgggaatgtattagaactcttttcttctaaggactgagacttccaggggattgccatcttacctgtctcttctccatgagggagaaggaagcagctagctatgtccctagctgcaggaagcccctattttttccaagcacgaagccaccagtctcccccagggagcatcaggaagggacatggatgtgctcctgccacagggcccttcctacctttggaatctgtgagaaggtgaatacaaagcagcaggcagagtaaaatctgctgggactgcctggagatttgtcaggagctgcagacaagtaccttggagcattctgttatttttggaaagttcaaatatgcagggacaaggaggttgctgactgtactgacaggctctaagtcattttctccaaaaactatctattcaattatcaggggctggtcttgaggaagga

SEQ ID NO: 60061 - DNA, 389 bp, Homo Sapiens
tttttttttttttttttaatgtttacaacagctttgaagccaaagtaagtcaaaactggctactatttagtattttactcaacgacaataaaacaagagttctagtctactatagcaactagtataaataaggtcgccagctagtaaagattaaatcttaccagaattagaggcaagattttggaaaaatatttcaatgacagtaacatatttttaaaaacaagataagctctgaaaataaccaactatccttttgtgaccttttttttttttttggtacagaaactaccacagcaagaagcggtaatgtaaaaggatatacaaatcaatcaatcattgattggccaatgatatgcaaagtagcaaaaacaatgcctctatttatcctc

SEQ ID NO: 60062 - DNA, 466 bp, Homo Sapiens
  misc_feature (447)..(447): n is a, c, g, or t
tttttttttttttcttgccaccattttattttgttacttgcagtcaaaagaatcctcaccaatgcactctctaaattctcaattagaaacccagctgaaaaagcaagacttacgctgaagacagcagcagcaagcccaactcttcactggcaccaaaacatttgatcagtcaacaaatatttattgattgcctgctgtgtgtgaggctctgggttaagtgctgagttaatgatgtggtctctgcttttgtaaagcccttagtttagagagagagtctcaggccacacaagaaattacatatttatgtatcaggaacggcaaattcaaggattctgggacttaacccaagactaagggaggggtaagggaacggtcgtctaagatggtaactgctactcttagacttgagaaatgaatgacatatgggaaaaagaagtgttataagcncagcaaactcccagggggg

SEQ ID NO: 60063 - DNA, 133457 bp, Homo Sapiens
gatctatttcccaaggagggtgagcttaataaatcagataactggagttgagaagggatagtggtgagtctgtttgtaaactttgggtttctgaatgttaattttaagcttcccttttaaaaggccagggtttgtagagcttatcctgtcagcaatatcctgtgtcaattgtcaggtcatgtttagcatgtggagatgtattaatctgccatagctagcattgtaagaggctgggataaagagagggctcaagcagatgaagagggattaactgtgtggattgagcaaactcctcaatcactgaaccagtgattttacaaaggattagctgctgcttttacaaatattgattactgatttgctactcagaatggagatgacataacttgtgcggttgctgtgtagtgcgctatgtgaagtgtacatcattcatattaatggatttgtcatagctattatagaaactgacagattgattatagcagcagttgctagagctgttatggttaaggttgtgtcagtatatctattaaaacttcaggattttagaagtttatagtatagccataaaattcatttccccaggtggaatttggaatactagttattacctggcacagttatttttatgcatatttttacatcagtttgaagacatttaagttgacatagagcaaaaatacattattgtgttatttttgtaatatcaacaaatttagattcatttcatttcggaaaatttgtcataaatgccagctttctaaacaagaacatgtctagttcatgtggacgtccaaaaatccgtttgtatttttcccagatcaggaattgttttgaagcctttggctatgtttctgtaagcacatggagatttttggaaaaggtagaaatatctgggtaattaaaagttaatggctattttattttcacttaggtaactttttattactctaaaaatttagtagcaagaattagaattatctatatcagagaaaatatgttcctttaatttttttaagaaatcatctgtcttgcaaatgttttctttatgtcacaacaggaaagcttttcagtgagttgagttgtatcttaaagggtaagctgaaagctttctaggcaatgatagtggtgaggagtgggtaagtggagaaaggtgagggaatagcacatttcaagcagagtgaaaacttgtgtgggtacatgagacttggactatttgaagaatagccaggtaggtgaacattctcaaagtagtaccttcatatatattgggaatattgttttcaaattgtatcattgtactataaaactatacttgtattgattaaattaaattttatagatgaatgggtggcatttttctggctatgattttaataatataaatcgacttaaattacttaaaagcctattttttgttttacagttttaaaaattgtattatataaaattttaaatgtatagtacatgcttataacgaagttgttccctctctgcaaaaggaaaaaaaaaattccctacactccctagaagtaagaactgctaacagttctatgtgcccttccagacttttttcctgagttttaagaatacatatatgtgctagaaaaaacatggaaccagatatttcttaaattttaaaaaatagtgtatcatgctggatgcagtggcttacgcccgtaatcccagcactttgggaggccgaggtgggtggatcatgaggtcaggagatcgagaccatcctggctaacacggtgaaaccctgtctctattaaaaatacaaaaaattagccaggcgtggtggcacgtgcctgtagtcccagctacttgggaagctgaagcaggagaatcacttgaacctgggaggcagaggttgcagtgagccaagattgcaccactgcactccagcctgggtgacagagcaagactccatctcaaaaaatggccatactggcatttttaaaaatagattcaatgccatccccatcaagctaccaatgactttcttcacagaattggaaaaaactactttaaagttcatatggaaccaaaaaagagcccgcattgccaagtcaatcctaagccaaaagaacaaagctggaggcatcacgctacctgacttcaaactatactacaaggctacagtaaccaaaacagcatggtactggtaccaaaaacagagatatagaccaatggaacagaacagagcgctcagaaataataccacacatctgcaaccgtctgatctttgacaaacctgacaaaaacaagaaatggggaaaggattccctatttaataaatggtgctgggaaaactggccagccatatgtagaaagctgaaactggatcccttccttacaccttgtacaaaaattaattcaagatggagtaaagacttaaatgttagacctaaaaccataaaaaccctagaagaaaacctaggcaataccattcaggacataggcatgggcaaggacttcatgtctaaaacaccaaaagcaatggcaacaaaagacaaaattgacaaatgggatctaattaaactcaagagcttctgcacagcaaaagaaactaccatcagagtgaacaggcaacctacagaatgggagaaaatttttgcaatctgctcatccgacaaagggctaatatccagaatttacaaagaactcaaattcacaagaaaaaaacaaccccatcaaaaagtgggtgaagggtatgaacagacacttctcaaaagaagacatttatgcagccagcacacacgtgaaaaaatgctcatcatcactggccatcagagaaatgcaaatcgaaaccacaatgagataccatctcacaccagttagaatggtgatcattaaaaagtcaggaaactacaggtgctggagaggatatggagaaataggaacacttttacactgttggtgggactgtaaactagttcaaccattgtggaagacagtgtggtgattcctcaaggatctagaactagaaataccatttgactcagccatcccattactgggtatatacccaaaggattataaatcatgctgctataaagacacatgcacgtgtatgtttattgcggcactactcacaatagcaaagacttggaaccaatgcaaatgtccatcgatgatagactggattaagaaaatgtggcacatatatataccatggaatactatgcagccataaaaaaggatgagttcatgtcctttgtagggacatggatgaagctggaaaccatcattctcagcaaactatcacaaggacaaaaaaccaaacaccacatgttctcactcataggtgagaattgaacaatgagaacacttggacacaggaaggggaacatcacacaccgggacctgttgtggggcgggaggaggtgggagggatagcattaggagatatacctaatgtaaatgatgagttaatgggtgcagcacaccagcatggcagatgtttacatatgtaacaaacctgcacgttgtgcacctgtacccgaacttaaagtataataaaaaaaattaacaaaaagtattaaaaaagtatatcactatatattagtataccacttgtgtttttcaaccaagtatcgtggacatctttctacattagtatatatctttccatattaatacacacagatctatagcattatttagaatggcttcataatgttcctcttgctgggcattttccatctttctgttgtcacaaatggtatatcagtgaatattctggcttatacaccatcatgtaacagcattttaatttgtagggtagattcttaggagttgaattatcagggtattgtcaaattttcatccacaaagctgtattaagctatactccccaaaacggggtgagtggagatgcgagtatctcttcttgccctcctccctgtttgatattcttaatctttgcagtttttgccagtcctataagttaaaaagtagtttttagtgaggtttattcatttgtttgttcattcagcaaatttaacaaacacttcctgtgtcccaggcactaatctaggccctagggatacagcagtgaagagaagacagttatggtctctgggctgttggaacttatattctaatggaggtggggagagctcaggaaacactacaaatcaataaacactcatctcttttcatgtttattaacctttgtacttattccataaattactgggttcatatcctttacctgtttttctattgacctgttcacttttttcttattaatttgtagttcattatctattgtgacatccatgcaaatgttttctcctataaatacaccttgaataagtcatcatttgacaagttaatgactgtaccagttcttatccatgtatggaattataacagtatacctgacttctttggttggtgagaaagaattggactaagtcttaaatttccatatttcagcatcctctgaggaattcttaaaaattatttttgtatttgtaaaagtacattagaaccatgagtcttgtgtgagacttgaagctatccaggtgaaggggacttaattgaattaatttaattgataacttgttatcaatattaaggtagataaaacatatttgtaaattttgtttttcagtgagaatgtacatcatggtctattcagacatgatttaattacagctgaattcttagagaaacatgtaataggatatcttattataagatcttaccatatctaaattgactaggaataacttgtgttatgccatttattcatatggaattttagcgggatgtgtatcttttggattttaagtctttttcatattttcaagaggtcattgtatatttcacatatttatgagcaaactacagattcagagttcagaccattttattgccctagcctcctctgaggtaacttccagtgccttacagggcaaatgagggagcactgaactgctcttgatgtgatgtttaagtgtggctgaacagcactggttgtttacatgaagttacatcagttgttgtgtgttgttagcaatcgttttgttctgctcaatattccatcagtttctttttcaaagtttaattttgacgtttctaatttgaactaaatcattaaaatttcttggtgaaattgttctggtaatgacaactcttagttgggagaaaaagagaccatgtacgattgggctatgtcagctctggcagatcctgcagtgagatagcccacacagtgaacatattaatgaattgccttttgatgtcttgcttatagtaaatatcagtttctatatttgtcagttgggtttttttttttttttcacatcttgaatactttttgtgtgtgtgtgtgtgtgtgtgacggagtctcactgtgttgcccagactggagttctgtggtgtgatcttggcttgctgcaacgtctgcctcctgtattcaagcaattctcccacctcagcctccagagtggctgggattgcaggtgtacgccaccacgccctgctaatttttgtattttcagtggagaaggggtttcaccatcttggctgggttggtctcaaactcttgacctcaagtgatccactcgcctcagcctcccaaagtgctggaatgacagacatgagccaccgtgcccggcttacttttttaaaaatatgctaaaatcacatagctaaataggcactttttatattatacgttctgtcccaattttcttcctttttattatgtttcttcatgttggtggttataaagtttagaactgaatgggagtgttagtaattgtgaaagtagatattaaggtgggatataaatataaggatgacctctttgttcttcatgtcttacggctatcttgcttctcattcttctgtctcctcattggtttcttgaatctctttattagtggggaattgcacctaatcatgagcttctcaaaggcaaggactgtagctgtacctcttgctccatcacagtgcctggcacatagtggatgctcggtaactgcctgatgaatgaaccaacacatgcaggcaactggctgctcagtactgctttttattatgacagcctctctttctctctcaagactactgtgaaaggtgtattaaatgtttacaaaattgttttaatgaccccaaaattaggtagttataaataaaaatcattagttgcactatcatttatattttggggattttccttctgttttcagtgtgtactgattgcagaactgtgttttatctgtatattgatttttttattttgcagtgaacgttagcttagaccatattttacaaatcctgtacacaaaacaaggtttttaaatataccattctgagccatatagatgattttgtttaaaattatacttctacatttgaaagaagtacccttggtgatttccatgtgcactcaaatttcagaacactgccttatgatccccttgctcaaattccagtgaaaaagacactcttgtgacacactattttagcctgatactgtaaataccacatgaatgtctatgtctgtctccctggccagtctcacaaatggctgtttacagttattcccctttgaaactaggtatcagaaaaaggattaagcatgtggtatgcttttatttccatagtaagaagaaaaactgctacacattaactgttctaatattgaaattgtagtatgaattctctagtaatttactcagttatatggataacaatgctttataatcctttcagttacccaggtgtacatatgattaccagttcatactgaagagtagactcaggcattttatcattctcagtaacatgttgttctgtggatatttggtggatacaaagtaggtatatgcttaaaatttcacaggctggaattgtcctggcactgagttagagctttataggccagttgctgatttgtttttgtgttaagatgatcttcatccaggtttatgtccctgcaaagtcattaaactttgtaaattgataaataagtgtattaattttacccccagcctggctgcttgttaaaggatatggctcttgacttaagcagcaacataaaaagagttgtgttaccttcttgcagagaatggagtttttcttgagatttaatatttaccagaagtctgatcaaggcaaacaggattttggaatgattgtctgaaaattgtgcagggtgtctgttcctatagatactctatgatcttatccttgagtttaacaaagcttttgggagttagctgtatacttgggcctcctcgttttgtattctgtagaattgcttttactgaatttcactttggcattaagcttttggctcaatatgaatgatgttatacaaaacagccctatgaaacttttattttatatactgtaaaaatgttattgaggacattgagaaccatgggagaaatttctttcccatttcagtaccaggagccagaaatagttgtgttttcttccctgaacaatgatatgtatttatcttatgggcaatggctcatataatttattgtatttcttgcttcatgttggttgttataaagcttataagtgaatttttggcccactcctcacaagtgtaaatgactttgtagttccaagttgtcttctgttccaccctgacttctaattttgccttgattttaaaaaatattgaaatagtgacacagaaaagttgcgagaataacacaaagagttcccatatacctttcaccccaattctcctaacattaacatttttctatacaggtatttgctttgtcactctgcctcctccctttccttacccttcctttcttctccatcttccatcctccccctccctcccaccctgtgtgtatacacactgatagctcctgtttgcttttaatttgcctctccaaatgtatctgtacaaatgcctgggaaatgctttttggggggagaaggaggcagtatattactaaattaacaataataatagataagaatgtatgaatttcatatctatattgaaaaaagagttatggaaaaacctcttgttttaggtggaaggaaaacaaatggtgtgtgtgtctgtaagagagaggggagaaagattgcatacacatgtgtttttaggaagatgcttataatactttaaaccagagtaggtactttgaatgacagaagagggaaaatgccaagacttcttgatttaaataaaaaattagatagtttccttcttaaatagaaacaggtatactatttacctatgaagactaaagcattaagaatgtttgggaacgtatttgcgttagtaatcaagctcaatttagtaatcaaataatcagagtaggactgtgaaatagagtgagagccttaattcagcaatttaccttctgttaataagttagtcataaaataatttcatgtctgatagttttcaaactacacatttgtcacttatttttcttgtttatttattcatattaaccacccctcaataataaggttgttttgggagatgggaatagaatgacaactgtttatgtacctgttatttttcttaagacaaaaacaaaaacgtgttttattatactgtacaatgtagaagacattataactctgcatattcctatttcagatacttaagatataatcttatgttattaatgactctaaactttttgtatacagaataggaaaaataaattaataaaaatgagtttaaagaatatcacaaattataaaaatgttacttataatctgaaaataattttaaaaatttatacctcaaaatccacaacataaagctgttgcaaaagtaagtaaatcaatgaaagaattgtcctatggcctatgtaaagataaagcatagttgagtggaaagaagctaaagaattcaatctaaattatattcatttcttatttctatgcagtttgctagaggaatctgcatacaaaaggaacctccttttccttccataaacatcattttccccattactaatttgttccatgtttgtgtatatgtgtttttaaaccaaaatggaagtatttcaaatacattcttaagaagcaaaattgacccaaaatcttacagatgaaacaacaccccacaatttaaatgtatggtatattggccgtgtgcagtggctcacacctataatcctagcactttgggaggccaaggtgggtggatcagctgaggtcaggagtttgagaccagcctggccaacatggtgaaaccccatctctactacagatacaaaaattagttgggcatggtagcgcatgcctgtaatcccagctacttgggagactgagacagggaaatcgttgaacctggtggttggaggttgcagcgagccaagatcacgccactgcactccatcctgggtgaaagagcaagactccatctcaaaaaaaaaaaaaaaagtatggtatattaggtatatctattaggtatattaggtatatggtatatatggtatattaaaatatatcatgttacacttagggaactaaccttaaataatggtaattgctttaatgccatagaaaagtaattcagtgatgttgtctgacacggtttctatagatggcattcatttattccatcagcagtggaacatagcatttcagaaaatgggcttctgggcaagtagacttaaggtccttgctccacttattgtgtgttatcttgatttctgattggtaatatagagttagtaatacttaacctcttagggttatgtgatgatgacatgagatgatgactggtgtcatcatctttacctaactcatggtaaaggctcaataaatgttaactgttgcagtgctgttatttgtaatcatgccactgatagtgcttaaaaaacatatttaagcttatagtatggagataatagaaacagttgtgtttgatacagagatagcataggtaaggaagaaagaagtaggacctattattattattattattattattattattattattattgttattatttgagacagggtctcactctgtcacccaggctggagtgcagtggcactatcatatgcagccttgaactcctggactcaaactatcctcctgccttctgagtagctaggactacaggtgtgagttaccatgcctgggtaattaatacattttttatagagatggggtgttgctgtgttacctaggctgtctcgaacacctggcctcaagtgatccttctgcctcagcctcccaaagtgctagaattacaggtgtgaatcactacccccagccgaggacctattattgttattgtttaaattttatacataattgtttgacttttaagatgccttcaacaaattttcagtgaagttgagtttatgtttcctagttttctattttgggtaatatttagaaaagagcctggcgcataatatagactagtaaaatattgtttaatatatgagttaagaacgttccttttcatttatgctaatctttattatgtataatcttgtcaaatatgtgtttatgcatcagatttgtttttggccaaatatctgtaaccagaaagaaagtcgtatggttaaaaggtgtttaacattcatgtttttattctagtggtttatattttcagcctcctttttttgtatgtgtatggaacaatggacttgtggcaaatttgagttgccttttaaaaatactagtagtaataagagacaacatttcttaaagagttatcttaagtgctatcctactacatccccaccatagctctccatagtatgccctcctattatctacattgaaagatttgaaaactaaagcttaatgaaatcaagtgacttgctaagtcacagagctggtagctatcctgcaatctgaatgtaaatccagggttttgaacgtgattctaaaatgcagtatcagtttgggggcacttttgttgtggaaagagatgcattaaattaaaacccagttcataattgtatatatttaattttataatatttagagtctgaacattttgatatatttagaattatatttttaacttaaggagaatgtattccattttaagcttgcatctcattttctcaaagtatgtattatagactttttaaaaaggctattatttttcagaatttaatgttttacttgctacagagcagatgactaagatataggcagataaagagttgctgaggagttactttatgtggcaggcaaaatttgatttaaattttttatgtggaatctaaagatccctttactaaaatagaaaaacacagagggtgccctatattataaatatataaactagtagtcttgtctctaaagtaaaaccttacttttaaatgattgattcagtatattgatatgctatcttccccggaaataattgagagattcttataaggttttccacaaattaataactctagaatttttagataaaaaccatattttaaaattctataaggaacaagtttaatatattttaacaatgtgataactagtggtttattgttagaccaacgaatcagaaatcttaaagagatttttttcacatctacttttatgagaaagggacagcagttctatattaaagatttatctaaagaagcagtcttcagatatgtaataagatagttcagtttctggtcgtatacttaaatgtatgttaaagtaaaagaagcagttttaaatgagtggagaaggataattggactccgtgtcatataattcacatatactattcatctgtgactttttgagcattattttaatggatgttggtgaacacaattgatttcagatttcattattctggaatcttgccattagaatttttcatagtttggtagatttctatggaaattagtagcagcaagaaagaaaggaaggaagaaaaaaagggaaaggagaggagaagagaggagagggaggagaaaggggagcggaggggagggaagagggggaaaaggaaggtgagaagaagagaagggaggagcaggagaggagaggaggaaggaagagatgtaaaatagaagcttttgattggactctgaacaaatgcttaatcttttggattatattcatgagcatatcttacatgcatgtagctatgatattaatagttactgtcttcttttgttctaaatagacctattgaaggcatagtgaaaatttccaccctaactcctttagagttaataaaggcaaatttgaattatcctcatggttattccgtttttgcttggtagccttcaaaatggccactttacagaggagggaggagattagcagatgttaaacccttgagttgtaacctctgctttttccccagtgtagtcacataggctgctatatcagtttttaaagccttttccccaaagcataaccctcctgagaattctatggttctactaattgaaagttgaccatctttatgtcaaagcatggtgtgagcttttttgtttttgtttttcttaaaagaaatatcataataggcttagagatcgccagtactagtatattcattggtgaatctcttctgaagaaagtaatagtgctacgatgagaaaacaagctttttgaaaagactatgctaaagtaacacaattagtcctcttttagagttacggcagtgattattgtttgaggtgcctgttgaatatataatatcttccttttgctactaaaaatactgataaacagatttgaaattccaaatttcccacatggagggaagaattattcaaatatgaaaaatatttaatttatgtatttatttctctcatacatattccaggccaaggttctagctgaatattaaaccttttaaatgacataaaatagttctatgctagatgtaaaagaagttactagttgttctacaaaaaatatgttgtgagcaatttccacatttgatataattgaaacttcaatctaatcttggaccttggccatttgctactgaaagtacaagaaaaatagtagtgtggatatatttcatgaagtcctggaattaggagggctttggagatgattgaacctatttttttcaggttttaaaagaagaaattgagtccagagaggctcagtgacatgtttaaggtaaaaaaaaaaaaaaaaaaaggtatggaactgagatcacattacagacttctttaacctgtgccatggatttcgaagtcagtatcaatgtacagctaagcttctggatatgtgccacaccactaaaatattttatttaatatttatatccaagttaagtgtaggtttctctcctttgttggtgcatagtcttattttgttttggttctttgtttactttgcagatatgctagtgaatttttatacttaaaacctattagaataagaaacaaagtgtctgcatccctgcatctttgtatctattacataatttctagaaacagggaaaatagcttctaagtttatgtgtgcaattataaagtaaagtgtaattaaactgcacttgtggaatgatgagttctgagtcagtcacagctctgggaacagaggctttttaatggactatttcctaaagctaagtactaaatgtacccttcaaccaaaaatgtcactaagatagtggacctcaactggaaggatagtggaagcaaaacagaaagcatttctccacctttatacaaaattacagtgcattgggattatatcggtattatgacatactggcacctgaaaatgtatgttcattctgtttatcacttcttaagaaaaatgaactagaactggagaagctaatctagataataaaataaccactagtggataggtgagagtatcaccttcatgaaatgagataatatttttggagaatcaaagcctaatatatgtttcaaatataaagcaatcattaagtgggtaaatactttttttaaaaaatgggtctattatccaggcatggtggctcatgcctataataccagcactttgggaggccaaggcaggcagatcacttgatcccagtaatttgagatcagcctgggcaacatggcgaaaccttgcctctacagaacatacaaaaattagccaggcatggtgttgtgtacctataatcccagctactcaggaggctgaggtgggaggatcgcttgagcccagaaggcagaggctgcagtaacaaaatcatgccactgcactccagcctgggctgcatttttggtagtttactacatgagtttagaagagataaaacgaagctctatctccccccaggaggtggccaatttatggaactcagtatcccaactattaggtgaaaatgaataattttaaaaggtttagataaacttgtagatgctttatttatttgaattgtcaggaaaaaagatatggttgtatggttgagaagtttattctttactttttggagttcagggaaaactcacatcatgtggtgacacagaatatttgactaaatggaccaacatcttgactcagagtgaaaattcttaggaataacaacagtcttttaaaaagtatctttcctttcttttccaatataagggaaaaggaaactttagtcgggtaggtggtaggaaaaattaccctatgtgaaagcttggtgttcatgttgaaaactatataaatgccaactagaaaagggaaaattgaagggggcaaaaggtgaagctcagaaacctagtcgtaattttgcataaagtctagattaaacaaccaaaaaagtgtgaacatattagtgtaatgaagccaataatatgatgaattattgatgataaaatagtaaaaataaggctttggattccttagaagtctagcatttaaattgatcaccaaagttgcatatcaaaaaataaaaatgataataaaaacatgtctattttgaaaatgtctctgagtcattgcactttggtaatgatgtcttatattgtcttagaaaaattaatgcatttaaagaggtatcagactgggatatagtgtgtgtgtgtgtttgtgtgtgtgtgtgtatgtgtaacatgtatcagggaggagtctattaggagacacatcaatgttagggaagaccctggaatatagtgtattgaggcacccaatactggacaaaattgtgaatcaacatttgttcatttagatttgagaaatctaaataaaaaagaaaggaccattagatctcccattctcctcaactctagctctttctctctctcccccaactctaactctctctcacccccattcccttgcctactcaagggacttgcgtgctgttctaggccttgtcttctgagtgaagcttctgtgatctagacacatttttctacttttctttgtcctaaatacagtaatgcaattgtctaccctgttaatgccaagactgggtttagacctgaccaacctaacacctgaaatgtcactaagtgatacttcctaccacagacttcatatttttctctgaaattgaagtaactactatttttcattttgaaataattatttttaattgttaacactttttaaaagataaaacttatttcttaagtatattacaggcatttaaacattccagtgtttttcatcctagattcaagaaaaaaaaagataaagtaatagtttaataaaatcaccaggagtgggtaataccttagttttaaggtaatttgttatcaatttgtatactttgtatctcttctctgcttttgaaattctagtatccatacttgaagcttgctgtactatgtctacaatatacaccatttgtttttaaagcaaaagctttaaggcacattctagaattcttgagttatcttttagaatcagttaccttatgaataaaatatcaacctaactatagggaaatttggatttcactattgcctttttccctgaattgctgggaatataggcacttgatacttgtttatttgaattcattgtgaccttgttaccattttgaatgcttcagattctcaaattgcatgctggaagaagacccattccttgcttagttgtccttgtagggtgtcgattttaatgtctaatattttgagctgctttagaaaagtaggtttatcatataagaaatacgtactcattttataaaaagaaaactagtctttctcagtatataccttactttttcgggcactgaaagtttgtggccacttaagcaagcccatataataaattcctgtagcatagtctagtccctaacatatgggttaatttttgttctccccttaggatatacttttttcattaaccactttcatttaagtaaagggaaatcttttaactgctttagaagtagctacaatgcttaacttgtatagttgctgaatcatgctttttcctgtatttcatttctgattaactttctctgagcaacatagtcttacgtttacattagcatccattcacttgaactagtagttacagttatagtaacatataacaatatttaactgtaataggtaatgaaagctaacgtttactgaatgcctactatgtgcaaaggactaagacccagtgcaaaacttttttttaggacaaggtttgaattttaatagtgaagctgagaatgtgattgtgaattcaccagaatgttgtataattgactgttccatagtgagataacgtaattgcggtgtatggcaaacatgtggcagctctttgttgttgcctggcagataggcttacattagccttaatttccttttcttcatgtatcattatgcatgtatttttatagtcttgtttctttgtaccaatctaaatcttcctaaatgtcaatagcgttaatcgttgtaggtatagtgatatgaggtctaaatgatatgagaattcatatttttttaaaaggaaattactacttttttatatattataacagattttccatccctgccatcagaaagtattgtccatatgctcatgatgatatacaaaccaaatggttcttctgaaaatttaaaaatctaaagtgtttacagggattgctattagtgtacttttgtgttttaaagaattcatatggctattaagcaaatcctggatattggacaaacagcaataaaggtttagaaaaatgaaatttcagttaaaaaaaatgtactcccccactccccagggaagaaatcaaagattttatattagaaacatgaatttagaattcagaacaagtattgcttatgacatcaaattttattgtgatgtatcaggtggaaatttagtcaacacttttcttaaagcaaaagactcaggctatgtgtatattgaacgctagtaaattctaatttcccttctccttttccttttcccccacttcctctcccctctcccttcttcccatctctctctgtctcctttttgaccagtaacattttagagttgaaagctatgctaaaggtacccatttcttttcagaataatttaacttttcttaagattttgtgagcatccattccttatgtaaagagcatttattatgcccaatggaagtgagagggttgtgggactaccccttaatgagaccagatcattccacaattatccactttagattagtggttcaccaggacttgtttacagagataagatttctgtttgtaatttttgttttatgtacaaaatcctataataaataatttatacctttatatgtaccaagtttattttgaaaaaaactggatacatttattgaacagctattaaaatatgtacactgactttccctaaaatttcatatacatttcaaaatcagggctctattttaaatatgttttaatgatactgtgtggtgtttactgggtgaagttgatccaccaaggagctgaaattagtgctctaattttaagctttatttcttaagaaaaaatatccatgactttatcactactgtgatccccatggtattaaaaaaaaaaactggtaaaattaggtgatgagtttgtaaataataaacttcctatcaaacccattcttttttttaatttttaatttttgtgggtacacaataggcaaatttatgggcatattgtatgttttgatacaggcatacaatgcatgataatcacatcaggataaatgaggtatccatcacctcaaccatttattctttctctgttacaaagaatccaattatatttgtttagttatttcattttattaatttatttatttatttatttatttatttatttatttatttagagacagggtctcactctattacccaggctggagcgcagtggcacaatcatggctcactgcagccttgacctcttgggggatcctcccacctcagacccccttccccccacctctaccctcctcctccactggctgggactgcaggcgcgtataccactacacccagttatttttaaatttttcgtagagatgggggtctcactgtgttacccaagctggtgtcaaactcctgggctcaagcgaccctccttccttagcctcccaaagtgctgggattgtaggcatgagccattgcacccggccacttagttatttttaaatgtacaataaattattgttgactatagtcactctgttgtgctatcaaatactagatcttattcattctaattacatgtttgtactcaaacacattttctatcctaagttgtactgaaactatttccactggatgtattccatacaaactttcttttgattggttgttttcacttgctagagttctagtaaaatgctgaggataactattatatttcttttcttttctgttttcgtttttttctcttttttttcccaggctggattgcaatggcgtgatcttggctcactgcaacctctgcctcctgggttcgagtgattctcctgcgtcagctcccaagtagctgggattacaggcacccgccaccatgcctggctaatttcttttgtagttttagtagagaccaggtttcactgtgttggccaggctggtctcgaactcctgtcctcaagtgatccacccgcctcggcctccaaaagtgctgggattacaagcgtgagccactgcgcccggcagataactattatatttctaatgaagtttataaaaatattgaacacttgtaaaattgagtaacctataatccatgaccgtgaatatacaatttctaatcaacttaacttttgcttgatttaaaaactttttttagggatccagtatttgtttataatagttttatcagatctgtctagttttagactcttaaatgccctataaaaacctaaagcatactcactcagtggaatgtccataacatttctctgaatacaaacacagagaatatttgctgtgggctcagagaaacaagtttcagcatttgattcggaaaagcattttatgttttacttggtaggaatagggattatgcaggaaagagtcaatatgtattgaaatttttaaagagttaattcaatataaatataacgaagctatgatttatttgaaattcttaacctctctttcagggatttattgcatttatttataatagtttctcagtcctgtattttgggaggctataataacatataggagtacagaacttttttttttttttttttttttttacttttgagacttttaggaggaatagaggggattaatctagggaatggatctgaaacaaagctaatagacttagatttaaacaatttcagtaattaaaagcacactgaatctaatgagatctggcacttgtttattctgaaatggattacccactgcttttttttttctctccccaacttctcataggagcccagtttcctccaattgcagcacaagaccttccttttgttctaaaggctggctaccttgaaaaacgcagaaaaggtaaactgaaggttctaatgaaaaatgtaaaaataatttcatccttagatagaacatgtttgtagtatacatgtggaggcagtattcgttttaggtgattaaagagtttaaagattgtaagaaaatctggatgacattatccaaaccacaaaatatagctcttagctttaaataatttttaataagaaaacattaggttaggtttttagttgtcaaccttggttatttgtaaatgattcaggagctgtttcctgcctctcaaaggaaagctgcaggccatgactgtattctcaaaggtgggatttctcaccagtatctcaatgggctgagcagcaggttctcctatgcccaaactggcatgcaccatggttcagatcaagcctggagttttgtctgccattgtctattattcatttcagtgttcctctccattggctatgataattgggagttgaccatatggtctcactctttcaacaccaatatttaatggaaatgaaatatggaggtggttttataatatgagaaatgaaaagcagacagtcttttcattaccattctgcttatctctcttgtagtccctttaggcctttctatttatatttcattttgcttttcttagctttcttagctgaattttaaaactgaaagagataacagaaataatctaggttagctcctccccttctttttataacagatgagaaaatgagacccagatggatcaattatctcaagactgtatagtcagatacctttttgactgtccctgtcagaaaactttgttagccatgctgttgatcccataagtatggcagccccatagctactttactttattccctttagctgtgttggtttgttgttgtttggttttttgtctcttggaaaagaagatacaaattagtcacacaatgttagagctcagaggaatcttagaaatcatattaattaactttttcttttacagtaaggaaatggccttacattttcccctctttattgcagatcacagctttctgggatttgaatggcagaaacggtggtgtgctctcagtaaaacggtattctattattatggaagtgataaaggtaatgttggtgttcaattatatcaactactattgcaaaagaatttttggccatcccttccccctcttttgagtacagagtaaactgaagacaaactaataataactgagaattataacaattataatctgactaatttatgattcatttcattatttgacaaatgctccaaataccagaataccctcagagctaaaacaattgtgttgtattgaattagaaaagagagtaaaataactttaatctgtgtggcctttcaccttagggaatatttattatccagcctactgttgtagaatttctggaaaagttaagaacatagggttgtgagagtttcaatggcagaaaatagattatttttcttaaatattttaaaataaaattagataaaattaaatacgaacagcacctttctgagctccctttacagatttaaggaataacagcaaacgtgtacatagaatttactatatactgggcaccgttctaagcactttgtctaagtacgttagctatgttaacttgtttagctcacaacaactctgtaagtactattattagcaccattaatttgacttttaggaaaactgagaacagagaggttaagtgacttgttcaaggtcacagagttggaaaatggcagatctaggaatttgtttttcctttgtttttagaaacagggtcttgtctcggtgcctaggctggagagctgtgactgttcacaggtgtagtcatcacaccctgcagcctcaaactcctgggctcaagtgatcttcctgtctcagtctcccaggtagctgggattacaggtgcacaccgctgtacccagctcaaatttgggattttaacctagagaatatggttagagtccatgttctcaaccactattgtcactacattaatttagaaataataggatacattttataacttcattgttaattaataaatctctcagttgtagttcacataattttaagattgttatttgaacaaataaagccaccaaataatgaaatttaaagattgtaagctttctgagttttgttttattctggggaaaacaggctaggagttgaatattataaagtaaaggttgtatcaaaatagataatgttcatttccagaaaggacactttaagaagaaaaaggcaaaagtatcactgaatgtaagctttcctatggaattgttatcagtgttgtttggaaatttatgttttatttgacattatttatagtttttagagttttttcccccattctaaaaacatacaggtaagattgtcatatttcagataagtctgaaatacttacataatgctggaagttgttcttaccttttggctaatgagattaacaaattaattaatttagtagctagtttgcattccatcactaatttacagtatgttcagatgtagtaatggcatcagtgaagtgtaaactgtaaacagctataaacaagcatctttcttctgctaagggtcagtagtgaagtaggtcagaaaatttagagtccaagttcagttacgattatcacagatcatagaaatatagttttgtatgatattgtgaatttagatcgagatactaccttccacaaaatatcctctttttcaccagaccaggggagggaggtttcagatccttgtgactttgattcaattaggcttctcatttctaatttctttaagaatcaatgaatactaatgtcagtgtttcctccatttctagtcctgactggcatataacaatggttaggtcaaagattagcaagagtttccccaaaacccaaagcgtgttaatatttacttcaaacactaatatattcaatgaaaacattttagttagagttatttagatattagttacattcctttttttttttttctttttagagatgcgggggcctcactctgtcacccaagctggagtgcagtggtgccatcatagcttactgcaatcttgaattcctgagttcatttttattcttatttgatgagacctaatggtagtaacattgtttgtaatttgcattttaactactttgtgatccatttagccctttctgtcatttctgttactggaagggggtcttgatccagaccccaggagagggttcttggatctcatgcaagaaagaatttgaggccaatccgtagagggaagtgaaagcaagtttattaagaaagtaaagaaacaaaagaatcactactccataggcaaagcagagcataggctgctcagctgcttacacttattgttacttcttgattatatgctaaacaggcagtggattattcatgagttttcctgaactggggttggcaattctcagaactgagggtttctccccctttttaagccatatagggtaacttcctgatgttgccatggcatttgtaaactatcatggcactggtaggagtgtcttttagcatgctaatgcgttataattagcatataatgagcagtgaggaaaaccaaaggtcattttcatcaccatcttgattttggtgggttttggccagttgctttcctgcatccttttatcagcaaggtctttgtgatctgtaccttgtgccaacctcctatctcatcatgtgactaagaatgcctaacctcctgggaatgcagcccccataggtcaaagccttattttactcagcccctattcaagacggagttgctctggtttaaaagcctctgacacttccactttaaaaaaattaccattttagcattcctttttcatgttgatgtctgaagatgtggcttgtgtttccttaaatttttcccttttactttgcagcctcctgtttccagtgaaattttagatttgtttcttgtggttcttttttctattggcggtttcattcgaaatttttagccagttcctctcttttaagggactccaaaaaaagatctgtctttagacagtttttaattacttgtttggcatgatcccgatttccttcctttatatctttttcttaccaggaaaatatgtcaaataatttttttcttttgtgaaattagatatgattttttatagccttgtttactgtatgtgtgaaccatttacctaatgggaagaactcatatctagctatatgagaactataatcctccaactaagtaggatttagataaatggattatagaggcacagaaggagttgacaccacttactaggttaaactgtgctttgttactgtttgacagatacatagttcacattttctaccatattgcgtgtgccaaaaaacatattgacctatcaagataggagtggcttagaaagagtagttccaacctgttgggtaaataatgcacttaccattgtaccaataaatattgtctgtatttattatttatagccatttgggacccttaagtaacaaatacatatagtatgtattttaacaccttatgaaatcttattcatcctttcatatccttccttttcctttgattgtcgtgagtcttattcatcaaaattcttaggtcctagatgttcagatgtccttcaagtcattcattcattcattcacttactcattctttttctaaatttgataaatattttttcaggcacttgttagctagtaggcactgaggatccaaagatccttagaggtgctcacagtttgggttttgtggatatcagtgagagagggaaggatgctgtggggttggaggagggagctgggcaggtaaactgaccatttcaatgcagtacagtaagtaatttaaataaggtatctttggatcacaaaggagggaaactaattgcctagggaagttagggaagatgtcctggtggagagaacacttcattgggcctgaaagaatgagtaggagtttgttggttgaatgctatggtgtgaatgtatgtgtacctccaaaattcatatgttggaaattaactcccaaggatattgtattaagagctggggcttttgggaggtgattaaggcatgagggctttaccctcaagaatgggatatgtctctataaaaaaggctagagagagctgtggaacccctctcttgcctttccgccatgtgacggtacagcattcaactcttctgggggatgcagcaacaaggtggcatcttgaagcagagagcagccctcactaggcactgaccctgctggtgccttgatcttggacttcccagctcccagaactgtgagaaataaatttctattgtttataaatttcccagttttgggtattatagcagcataaacagactaagacagggaagaagggtaaaatgggctttccaggtaagggaatagcagagattctgagttgtgaaagactgtggatgggatcaaaaatggaatgaaggctggagcttagaatgagtgaggggagggagcacgtaaggctaaataagtggattagaccaggttggtaagaaccttctgagaataagggccttgctaaagattttattttgaatatgacctttaagcagaggattgtatgaccagatttggtttttaggaagtaattgtaataggatgatggagaatggattgggatggatagagtctgggtcaacaggaccatttagcaggacttcgaagtagtctaaacaagagaggtcaacacagggctgttgagaggcagagcgaggatttaatgcagatctctctgcctccaaagttatgctttttctacaacttgatgattattaccaacccctccaaggtgcccataagtggtggaccatttaggaacctgttctaaactattgtgtgttttttcccttttttctgtttatcttctatatgatcttgaatcaacattatgatatgaacctagtctctccccatttttaaggaggggattgtcagttcttagtacctcctctcagggcttttgctgaaacctgattaaagaatacactagcaccgtctagtaaatgggagctacaagtagccctgatctacaaagtcattcaaaggttatttcttacatcatatggttttaattttttcattgtaatatcttttcaatatataataaaagtccgtagaaaattgggcttaatatggagaatttaagataacaaaatttcagaacttggcagagaaataaaatttttcattgaaatttacctccctgctctccccttctccacaacttcaccgttgataggaaaaaaagaggacatatatgttctctttgaagtttgaaaattataaaatatattttgatgttgaaaaagcatcatatttctcttttaatattgttttgaatatgttaaagtgacagtacttatatttgtataattaaaagttctgttgttttgtaacaacaacttaatagaaagccataaaagcttaccttttttcttctgattcatttgacagaaacaaattctgtcattttataattgtaattatataattttataattatatcaagatgatatatattaaatgtgtaagtgaattctgatatttaaaaaatttaaattgcaattctgtttccatctggtatgtgaaggatatctttattccttaagaaataggaaccattaattctacttttatcagaaattattacaattttatagacttttgggtctttgatatgaaagtattaactttaaaacttatcacaataaacttttttttttttttgagacggggtctcgctctgttgcccaggccagagtgcagtggcatgatctcagcacactgcaacctccgcctcccgggttcaagcgattcttctgcctcagcctcctgagtagctgggattacaaacattaaattaaagctatgcctttattttctgcctttatggctaagagactctctaacagtatatagaagttaaaatgtacatctgatgtttagtaggatttcatcaacatgcagaaatagtcaggtacaaaccaagttttactaagggtctgatgaccacgaatgttgttggtttgatatctagtctcacttctacacaaaaccccagagatatatttcaagtggctgatttagcattggcatctgcaagctgtataaaccaaaggagaatgttcatatatctttaactgaggagctggaacatcttgctagtcagtttgataaaatttagtggcaaggtctagtattgatgggcatatttttcttttccctactaatgagtactaatacttgtggaaataacgtaagttattcactgaagggaaaaggccttcttaaatataagtagtagatattgctgaacacatttcatatttttgtttgctagccatttgtgccaagttagtgttcttggtataagcatcggaaaccaactttgtttatgcagaaagggaaattattaggaaaatatcagctctcagaattgctaagaatgctacacacaggctcagcaagcaagcaagaactaaggtaggtaagggggctggatcttgagcataatccatgaaaaatcttattgggacacactgctggcttgggccttgccaagccaggacatgtgatgttgccactgtgcactgccatcaatcagtgagtgccattgccaccagaatggattctgaaccctctcttgatccttttgttacttactggagatttaggttccagtctggagcatccactttgattaagttggaacagggaaaatccatctctctccagcttctgtgatggaaaactaagccctatccctgacaatcttggaattaaaataggaaagatgcatggatgctggggagccccaaataataaatgtccataacttgtagggatgctaaaggatttggaattatttggttgcaatatttatgctgtatttaaaatggtatgagagtggttggtgttttaagcatatttttctgagagccaatgaagaagagaaaaaacaagtatatttgccagaaaaatagaaggtctgtttagattttggtaggtggcattggagtgtagggggtaacgtcggggcagttggtgaaggtaagggcaaaataaaaaatggtgcccagttttctggtttgggagcttgaattaatggaggtgccatttattgagatgggggatacaacaagaaatatcacagttgttggcatcacaagtgttgggagtggggataagatgatctccattgtgggcactttctattcaatgagcctataggacatttgagaaatgaaacatatttagtgagcagatgaagatttggataaacagttttgaaaatgaactaaaagtagagaatcatgagtcacaagtatattgataggaatttaattcttggaattagatgagattgcccagggagagtgtaatgtaagaagagagcaagacttagaacaacgcatcatagctttttaagagataggcagaggtagaggaacccataaagaaagctgagaaagtttgacctaagttgtaggacgaaatgcaaaataacatttatcttctctaccgtgattttgtatatttcacattgtattgaggacagtggttgtagtgtgtatcaaaatcacctggggtgcttgctaaaaatttggtttcctagactcacccacagagattcctatatagcaagtgcagagtggtagccaattctgtgttaacaggcgtccaagttgattctaacataggtgattcttaaaatatactttgagaaacacctttttagaaaacagtgtgaaatggctgaaaaagcaaggctttagaaccagactttcctagggtcctggcttttactgtttactatttgtgtgaccgtgagcaaattggttaaagtttgttttcccatcagtgctgggaatataatatgtctcctctattgcttagaattattaccaggtgtatatgagatatgttctattaagttcttgacatgtagaagctcagtaaatgtgagttgtctttttgacagcttaaaaaacccccagaacacagctgtaaacctaaaagccagtgaaaaagtagaaggaaattgctcttattagccttatgcattttgttttgtaggaaatcagagccaactgctttttaccttgaacctgctgaattaggattgtgtaaaattaagttactgatataatagatttcattatctagtttttcctggcagccttcagttctgtagacattacattcaaacagcatgatagaggttaggttaaagtgtgaaacagaagctgagagaaatgtaatagaggaacaaacacctcaaaaattctgaaggcatcaatgtgttataaaaactaatactcaaaatgatactatgttaagaaaaaaatgttatgtttaaaagatttgtttgagaagttaggcaagtatatattttagaaagctttccatcacaatgattaacatttttaaaagttttggcacttaaaggaataagcttttgctatttgtgaagttcacctagataaaatattagtctttcacagtgctgggtaaatggactttatagctttatttcctatttgattggcattttactatttttgataattttgttaacaggtatccttgaaactatcccaaaaagcaattgtggaactaatctatatgtaaattcttatgacttaccacataatggtgaagtttctctctccagaagagaaactaatgtgaaaggaggagaacagtgttgtcttatagccatgtctgcccatttcacgtcttgaacttcctgtcctgtattggctaattggagatatggctacttcatggttatggttctgcaaaagctattagaaagagttgtgagtttcctctgttcaacctttctgggcccatatccctacccgacttggatgtttatataattgtttatcctcaaatacaaacaatcagttggataggtctagatattagtttctttttattatttttacttggttaaacaacagcacattttgttctgcaaagttaggtctttctttgatggaatgaagttttcttttgctatattatgtctttggttattggcatttatttattactcttcttccagaaaacccatttttcttatgttgtatttttgtcagccctccatatttatcatactcccttttgtcccttccccatccccttattcttattttctatctgctgagtgagcttttcaaggtatatctgatctgattttccacaatgttagttctactttttatcacttctaatacatcatttgttttgctgctgcattttccacttccttatacagcatatttgttccttattttgccagtttcattttaatttctacttgtctcagcctttcctctttttattttatattacattgtttcatctttcatctctttcagaatctgtttacttttataaaatatgcaaagcagttggctaaagtttaccttcatttctcctacttcgcttgtgctttctacttctcaagtgctatgttatgtttctgttttacataatatttttatggcatctgtatttgctgttcctcttttcttatcctcgaacaagtacatgtctatgaaatctgagatgcttacctataaattggatttgtggcttctctctggttcatctcagtagaggctgatactgtcctcctcttggactgtatcagaagttctgatacatagccccatagcatatttctagggggtttggctaaaatgaatctgctagtctgagttggggttgcctaattttgctgcctaattgtcttatttctagattattagataatctggcccagaaagatctgttcccctcagctcttccaaactaaatctttatagtgctgattttatatctccaggtgtagactcccactcctcatgcatttccacctgcattcaagttacattgatgagaattttagaccgaaattggaggtagaaggcataggttttaggtcagatggacctggtgagtggagcgattgaacccttgcgcagcaagggagcagctttcctctaaatctggtccctgaaatttctctttcttctggagagtttaaggaactctctcaaaattgtccaatatggctttgatattttgcctcacattacttccacttttcgtagtgaacattaagttccttttgcaatttagtagatcattgggaaggtggcgcgaaagatctgataaggtgttctagcttttatctcggcaaacctataatgctgcgtgctggttttaagtgcttggtatcaatttgtcaaatgagtgagtgaatgatttagtctttttttgagaatttacaagaaccaaccatgcttaaccatttatcattttaatacttttttcccaatagtttcctagttaggtgtcttacgaaatatatcctgggagtaccataaaatattctgtgaaaaatgattccgcggacaaataatttttggaaatgctgcatactaaatttttcttatagaagtttaattactatgtaaatgtactaagggctccaagaaggcctgaactaacaaaactgcttaactcttgtttaattcggcaaaacgtttcccaaattgatttgatcacagaaacctattaatatctttgggaaatgcttctctaatctttaaagtactgtatcgtttttgtgaaaaacatagagtttattgtagaattttttcatgaaataaactttgattgtttctttagacattcagagagatgtaaattatgactaaatgtgattagagtttcccaggaactgagattttttttctcatttgatattttgaacaagatataatctctatgacctaacatatgttagttactttaggcatttaacttgtgtatttaagaaaaggagatgtatcttttattggtacactgaactgagaaagcacaccccacaacacgaaagcatttctgtatttgccccgagctcagtaaaagagtttgtccctactcatggttttaatattgtttgttaatctaggaaataaacctatagctgtatagtttttctatcaaaatggtgtaactgggtgaagtaggaaggttgactaattttattttcagtttcagaatattaagtcctttgttatattcgcactttacttgtctttaaaataatatctgaccaaagctgtaatcatcttttgcctctttatcatgtgagattcaaatgtgctttactagtttaactgttcactgactggataagaaactttccctctatttttggtaactaatgcttctgtacttgctttaccactcttctttatccacatagtttttttttccttcacatctttttcgtcatgagtagtttagtttagttttggtttgctttgtaaggttagagataaatttgtaccaagttaggagaccttttttaaagaaaacttttgttttagaagcttctttttggtggtggtgctggggagggataggtgaaaggagataacagtagataaagcccgacaagttttcagctggacagatcttcccactggcctactaaatctgaaagagccaaaggtttgtggtgggtttgtctagcaagttctatgttctagttcctgaattttccctaccctagagtgtcatgtttccatacttccttccaaataagaccatgatctgcagacctccttgtaagtccaatcatccctaatacttccatgtttcagaattaaaaatgatttctaaaaacattacctaagcattatattactaaagcaatatgaccaaaaaatgttatttccaagaattgatgaagaaattttacataaaagataattgagcattaatacttagtaaatgaaattctaactggttttatcttcaacagacaaacaacagaaaggtgaatttgcaatagatggctacagtgtcagaatgaataacactctaagaaaggatggaaagaaagattgctgttttgaaatctctgctcctgataaacgtatatatcaggttgtagtttttatgttgccttgaaattaagttgataaaatgttttgatttcatttatagagacattaacatttgattaatactttccttgacatgttaacaataataaaaatactgatgtttaaatatattatgcattgaacattcatataagaggaaatttttaaaaatttcagattaattcacacactatcttcttgaaaaagataaagagaatatataatttatcaattacttcacatgttgcacacatgttgcatagaacataggtgatcacatgttgcatagcactaggtgatcttccaaaagaattacatagcagaaagagtaaaattattaaaacaaaaatatcagagtgataatacatattgtattgcttaggagtgtgggagaaaatgaaggtaaaagtacacatcagctctgcaattcaatagctatcagctaggcatcaatatggaatgtatgtttaataagttttaaatatctgagattgcagttgaaagccagttaattaagttgtcaggtagtgtgttggaatctgacaagaacatttttaagaaaactgtgtgcagcagtctaaagaaattcatgggtgtcttctaattgtcaagggcaaattttgttcatcagttctgtctttgacattgatgaaagagaagcagctttttttcctgcacagctgccagctgctgatcagcgtttgaaattcatcatcctctgcttcaattgcataaatttgtcaaaattaactgtacattataagaagcatccttgcaagaaaagttccactagacatgaaaagaattactaatagtcttaaagaaatggtaagaatacaacatacctttcattcctactatggtgattttcgttcttactgtttgttttatattagtttacagcagcttctcccaaagatgctgaagaatgggtacagcagctgaaatttgtattgcaaggtaagataaatcaatcgaacaagttatcacagtctttaaatactaaataacagagtagtttgggttttcatatacaaaagcttattgacttctgtgagaatgaccaacttgaatgtgactgttattaatacagaccactcacttcagattttaaacagcatcttttctataagtaccaattggcttactttaaaattcacatatttacaaaacaatttttaaacatgtttttagttaaggacataacatataacaatattgttgttgctttgtagggctgcatttatttataaagtatagttttaaaaatatcttctgcattcttttaaaatttacttcatgaaatgtgttttatagatatggaatctgatattattcctgaggattatgatgagagaggagaattatatgatgatgttgatcatcctctaccaataagcaatccactaacaagcagtcaaccaatagatgatgaaatttatgaagaacttccaggtatttactttctggtgattcatttaaagattttagggctgtgtgtgtgtgtgtgagtgtgtgtgtgtgtttgtgtgtgtgatttgtcctcgacagcttgagtagaaaatggtgacctattgagaacaaggacaaagaatatcttcaaaactctattttacaaaaagggttctgcttgagatatttcaagtgagtagatgtaacttacgaaaagtgaatgaaacattaaaatgaagcagatacaatactaatctcttgggacttgtggctcattagcattgtttatgctacataattttttaattaaaaaattgacttgccttacagttttttccaccaactcacacatcgttttttatttatacatcttggaacttccattaaccagaagttctatgcacaccccagatgttaccaacttctgcctcgtatttctccttgcttgtagtatattgcactgtctcagaggaatgttgttgaactataaacaaaggccttttgaggcttcaagtcttcctgttgatattttagcatcaatatggaataaaaaagttttcttattccaaatgctcagacctagtttagtgtttacatgcctgtctgttatgtaacataaaattaattatctattagctacttgacttgcggccatgaggatcaatctaaaataaaaagacatctgaaatttaggaaacatatgaaaacatttaggaaattgtattactaatactctaggctgaaatgagcttttttggctattaaaaaatcagtagttagagaagaaaaaggtatcataagcaatataagcaagatttaactagtacatctcatgtagagaggccattttgctctgaatataacaatttaatgatgtaatgttaaacctttaaaattgatttcaaaaatacttaaaatgttccaaattaatgtacaaatgtcattttcaagacaatacagcataataccaagagtatggactttagaagaaaaaaatttaaattctggctgtaccattgactagcttagtgactttataagttaatttcttcatttataaaatggaaataatgtcattgggaggggtaggtgaagtgatttatggaaggctttcagcatagtgcttgatcccacaattaattgtaacatcaccatcatttttgttttattattgtatctggtgaattcttgcaagtgcttatgtggtggtacagtaatggttttctaaccaagtaaaaagtaataattttaacaatattataaatttaaggtataaaaactatgtatgcatctacatattgtattttactaccccagaagattagtataaaagtataattttatggggaatagtgatctgtgtatttcagttgtttagtggagctacatgtttattaaccccttcctttctggtttaccctaaggaaatggcatctgctgtagcatcagttatcctcaagtagggaagaatattccctggctgcttgtttttggtcacaccatatcattaatacaattattttagtatttaaaaatgtttaaaagaacttgtgagaatgtatactcataaaatggaagagtggaatacatttaaacacgatattactgccattacatccttttaaaaccctgcaatgaatgtgttacattacaattgttgaaataactgttaagttctgtattttttcaacttggctgttctctccccacccctaaagaaaaaaaaaattgatcaggaataaagaccagatattcatagttattttcataacaaagacctaaggaaggtctgagtagcttgaaattttaaaaatatgaaacatcttttattttttcttactggagatattattcttcattcttccttgcccccctcctcacccaccctcacacataattgttggaagtaactggttactttttaagtagtgttacttcttgctgtggtactgggagaaatttaagctgccctggaatttcttttcccctgcttgggatccccagttgctctgcaaagtgatcgagcttgatggagcctgcacctgtgccccgggaaggaagccgttgtaggcagctgtggaatgtctagttcccttcttccccaatgtaactgagagctgcttcaacatctgcacggttcagcaagtttgtcaagtttgtgccaacggctacagaggggatttttctagtaaaggccctaaaggtgtctcagagttagaggttttgtttgattaaatgtctgaaactaggaaggtaacttttttaattaaaacaattgtctctctttcaggacaagaattaagcttattgctttcacttctgtgaaatttgaatataattttgatagaggagttagaacaatggaagagcagtaagcacatttacatactgttgatatttttccagttctgtgcaaagaactatgtatctctgatatctgactggctaaattcccagaattaaataatactacaatttcaacacaattttctgtcaattatgcattgttgaaaactaatcctcttagttgaaagatgaggtatacaaatgtatttgaagagaaatctaagcatttattatgctactttaaatcacaaagctctttttctgagaaacgaaagctcttactctaataagtgtattttttaaaaactatgaaataaacctgcagtgttttgagtttcaagagtaagaagaaaacgtggttttaaaaattgcaatgggctgggcgcagtggctcacgcctgtaatcctagcactttgggaggccgagttaggtggatcacttgaggtcaggagttcgaagcgagcctggccaacatggtgaaaccccgtctctactaaaaataaaaaaataaaaataaataaaaaattagccgggcatggtggcaggtgcctgtaatccaagctattcaggaggctgaggcaggagaatcacttgaatccgggaggcggaggctgcagtgagccaagattgaggcactacactccagcctgggcaacagagtgagactgtgtctcaaaaaaaaaaaaaaaaaaaaaaaattgcattgcataatatcccttgaaaaatgtttataattctacaggaatctaaattgtttcattgtaattgtttttcagttagaatattctaacttcattacagtaccttctgtttaatttcttgttcatttatttttaactaacttcgtaaaggaataggaataaatttgtaagacttctttgtgtttaagggatttatacatatgtacaaaagagttgcgagaatgccatttctggggagtattaaaggtatttggcttttcttcaaatatcctaatccttttacatcttttatgtcttattgcttattagcataggccagtcaggtttgtttacattgtaataatactatagcatatttgtgtttgtgcagctaatatattgatcaaaatgtgttaaactgtttaacatggtaatgagttcatttggctcagcacaggtttgtaaatttattgctcactttttcattagaaatacagaggagtgtctttgtctcattttgaatctcaaaaggggaaaataatactcgtgaaattgctgcagaaaccaaccctgtttgctcttctcttctattcactatgtcacttgattttttttctttaatggcaggaaattgtacagaaacaacaacaacaaaaagatttttctagatctaaactgaatagaatcagcctagtaatgagaatggtaaccatccattaacttattaaatctgtagctttcagagggattgcacttgaaatgtcttctggcaagtggactggaggagagagggcaacataaaacaggaagacaaatttctattccattaacctattttttttaagtgtgaattcatttttttttaaattacaatgacagattgaactattctgagtcagaaaaggatatttttatcctttggccattcaattacattttaaatgtattcagtccaactatctgcatctaaaatagaacataaagtaaaatgcagctataatttttttccatgagactattatatatacataaaaaagaacagtgtttgggtactttaatttgaagtagtttacagcaaatggacacaaatgctaatttagtcaataagtggttataggcccccaaaatacattttggctttattttcctcctgaataattatcactcatattactaagttaatatcagggttacaggggaccctgcagtctgtggtattaacattgttttaagtgatagtagatcctgacttcaccaaacaatttttctcctttcttctttggaatgcaatggaaagatgtcaattaattttcatagaaccacatatattcagtattttaatattgttagtctaggcagcctgctaacattattttttcttaaactaggtactgaatggtgaagttatcaatgtggtgatattgtgggaatagtttttcccaagtagataactagattagggttgaatttttggatggtgatatggtttggctgtgtccccacccaaatttcatcttgaattgtagtacccataaaatccccatgtgtcctgggagggaccaggtggagataattgaatgatgggggcagtgtcccctatccagttctcgtgatagtgagtgagttctcatgagatctgatggttttataaggggctcacccctttgctgggcactcattcttctcgatgctgccatgtgaagaaggacatgtttgcttccccttccgccatgattgtaagtttcctcaggcctccctaaccatgctaaactgtgagtcaattaaacctctttcctttataaatttgccagtcttgggtatgtctttattagcagagtcagaacagactaatacagatggtttcagctctaaaatctgcttagagggttatccgaagttataaaaaaaaatgaaatcattcataaaatagggtcactacacacatataatatttattatttttatctttgctgaatataaatgtgtctttgctgaatatttgttcatagtattctttatgttgtttcataatatagtatgaagctttggaatacagttctgcctgtcttgtagcttttctctatgttgccattggcattgcaaattcctttcattacaagggatggcttaacacatactaaaccgaaaatatctgtgtgcacacaaaacatatatttccactggtggtgagataaaatgactcatttttgcaaattggagctacatcagtggttcccagccagggaagatattgaccccagagtatgtttggcaatgcctggagacacttttggttatcataactgggatgtgtgtgtgtgtgtgtgtgtgtgtgtgtgtgtgtgtgtgtgttacagatatgtggtgggtaagggccaaggatgctgttaaacgacctacaatgcacagggcaacccccacaacaaagaattgtctggcccaaacgtcaatagtgctgaggttgaaaaaccctggccacagggatgtaatagacaacttttggtttatcacctttttattcttatcacttgaattaataaagattcataacctaagctccatatgagttaattcatttttatggacacaggttttcttacatacatgaaactaggattacatagaatgtttctaggttttaagagatcagctggacttgcctatcacgtttccttcaaggagtagtattgaaattctatccatcttgtagaaatgagcaagccaggaagataaaaaatgaaggaagcattttctctattttcatgagctactatcttggaaggaagaggtttctaaaaataccttgtagatgtgtgaatacttgatttatcctattctgatagggttgttcttttgaggctgaaggaaaagaccggtgggtgtgggattggactgtctgtaaagggagtcaggcatcctgggggaatgcaaggctgagcaattccagggctgtctggaatttgacgagtggctttaggagaagtggaaacccttttatgtgacttctctatctttttggacctggactttgaagaggctagtaggattgagatgatctctgcccctggagttagacgggaagtcttggaggcagccctccaaggggatccgtgaagaggagctcactttaatgtacttcacaacaagccatactgtgtgattattttatattatttgttcacttccctttcattattgctaaatcttagatttcttttttttctttttaaagatagggtcttgctctgttgcccaggctggagtgcagtggtgcattcatggctcactgcagcttcaaactcctcaagtgtttctcctgccttagcctcttaagtagctgggactacaggcatgcgctgccatgcctaattttttagtttttaattttgtagaaatggagtcttactatgctgaccaggctggttttgaactcccagcttcaagtgatccttctgcctcatcctcccaaagtgctgggattacaggcatgagccatttcactagctactaagtcttaatttttaaatccttatttacaaacaatacatgcttgctggaataagcttaaatattcctgatgtgcataaaataaaaaagtggggctgggtgcagtggcgcatgcctgtaatcccagcactttgggaggccgaggtgggcagatcacaaggtcaagagattgacatcatcctggccaacgtggtgaaaccccgtctctactaaaaatacaaaaattagctgggcgtggtggcacgtgcctgtagtcccggctactcggggtgctgaggcaggagaattgcttgaatctgggaggtggaggtgagatcgagatctcaccactgcactccagcctggtgacagagcgagacttcatcttaaaaataaaataaaataaaataaaataaattaaaataaaataaaaaagtggaagtcactccctaccctacgtaaactttgttaacagtttgatgtgaatctttttgttccttttttgcctatttttaaatatacatatacatataaaagttttaaaacaaaaaagagatcctttttatttactttcttctggccttttgtaaaattttcttcctttcattttcttcctatttcatttttaccttcctcctttctcatgcttttattttctcattcctctcccctattttcatttccatcctttctcttcttccttgctttcatttctttcatttcataagtattcttgagtacctgttatgtgccaggcactgtgcctaagtgttgggaatcccccagcatccttacacaggcctcaaaggagtgccctttttggcctaagcctagacttactaccatacctccatgtttatttatgtcttatgtatgtatgtatgtatgtatgtatatatatataatatcctcatcgcatgagttttctgtttttgcttttctgatatagaaattctgtctccaatgggcagagtcttccagcagatagtgtcaaaagtagctttgtgtctttatatcttgacacttttaaaaaaatattttttaattttttaaaaatttaattatttttatttttttattttttttgagacagggtcttgctctgtcacccattctggagtgcagcggcatgatctcaactccctgcaacctctacccccgaggttcaagtgattttcctgcctcagcctcccaagtacctggattacaggcatgcgccaccacgcccagctaattttttgtatttttttttttagtagagacagggttttgccatgttggccaggctggtcttgaacttttgacctcaggtgattcgcccaccttggcctctcaaagtgctgggattataggtatgagccacagcatctggccctttttttttttttttttttttttttttttttttgagatggggtcttgctctgtcacccaggctagaatgcaatgatgtgatcttggctcactgcaacctccacctcctgggttcaagctgtcctctcacctcagcctcctaagtagctggaactacaggtgcatgccaccacgcctggctaatttttaatttttttgtagagacggtgttttgccatgtcgtcaagatggtctccaacttctgagttcaagcgatctgcccacttcagcctcccaaactgttgggattacagacatgagccactgtgccaggccaatgcctgcttagaagccatcctccacttcccctgtttctctccatctgtctcttgtctggctctacgccttgctgcagacacccagagtaccttcctctgtatctgtgactagtagattgttgtggttgtgagaaggggctctggaaggaaacacacatcactttgaatcccagctctgcccgttatatgtgcttcagccagaaaaggagtgaacacaggaaagatggagaatacacaggaaagatggagcatggaaatgggcaaaatgtgtcagtaactttattgattattttaaaataagctttgttttaatctaaaaaagaggcaaaactaaatttaggcaataatttaaaagttagctggggcaagatggagatggggggtagtgaaagcatgccagatgttgtcctgttcagaaggacggaggagaggaatactaattttaatttttgttaggaaatgtatgttaaaattttagagttaagtactaaggaaatagaatgcaatcttgcgttgctcaaagaagcagagggtaaataaaaggtgaccacgtaaaacaatgtaaacacaaaagaaggcaacaaacaagaaatcaaagagaaaatatggtaaaattaagccataatataaaagtaagaatgataaatataacttagtctattaaaataaatgtttgcattagacatttttaaaagtctagcactattcttcttggagatacacctgaaacaaaaccacatagaaagtttcaaagtaaggaaatggaaataaatacaccatgcatttctatccaaagaaagctactatagctatgttaacatcagataatatggaatttaaggcataaagcaataataggactacagatgacactacataacaaaaatgaaagaagataaagctcaaattcatctaactatataaccctaatatctataacacgaaaacatataagactaatttgacaagttcttaatcatagtgggaaattttaagatacccctttcaaaaactgatagaccaaggaggcaaaaaataagtaaggatataaagatttaaccacaaaattaataatctatcaaaaagatataaagtaacattgcatagtagagaatatttgttcattcagtacacatagaataatcatagaaattgactacatatgtgttcacagttaaactctcaacaaattacactgaatctgtgttatacagactatggtctttaactacaattaaatttaattaagagccaactctgaaaaggtagttgaaaatacccaaacccatgtgtttggaagctgaaaaaataatagttcatgagttaaaagaggaaattacaatggaaatgacaaaatatgtagttttccatatgaaatacactgaaattagtacaaataacaacttgtagcattgtagcattgttgttaactctttttttgggggagggaacagagttttgttcttgtcacccaggctggagtgcaatggcatgatctcggctcactgcactctccacctcctgggttcaagtgattttcctgccttagccttccgaatagctgggattataggtgtgcaccaccatgcctggccaatattttagtatttttagtagagacggggtttcaccatgttagccaggctggtcttgaactcctgacgtcaggtgatccacccgcctcggctttccaaagtgctgcgattacaggcttgagccactgtgcttggccatgttattaattctttggggagaattaatccccaaagaactggagatgacagaactataaaggctataaaatcaacattatttacaatgattcaaggataaaataaggaaaagaaactttaacaagagaaaaagatcctgtaaaaaaaagatcagatttttttaaagaaccaaatagaatcactagaaattattgatggtttggatcacttagccattgaattcaaaacttttagagtcacatacatatgtttacattgctgagggaaccaatagaatacatattaaaattctgaaccagaagataagcaaatgtcaaccactttaatcaaattaaaatgctaatatttgtaaagaaaaaagaaaaattatgttaatggggctaggcttttatgttttttctgtgaatcctggatgaaaaatcctaacactgtaccagaaggtcagatattcacacgataggatttgtatctgaacataatcaagtgttttatcctttgccaccaagaaatctcaacaagtaaagacatagcttctaacagtcttcatatcagacttttaaactggagtcttcattcttcagatatgatttgtctcccatatagaatataaacagatcacagcctgcttttgtttttaattcatccattctttcagaagatagaatatgataaagtttgtagtagcttcacgaaaatgtatttgcttctttaatcccagaaaaaaaaatacacacatatgtacacatagccacacgaacacatacatctatagagacagactgcagcaagagagtatcaagcttcactatttttgcagataggtcagctgggaatatcaacttcctaagagtactcagctgcttactttaaagcagtgattaataagaatgaacaagttcaacaaaatgtcagtgataaatataagcactcttcatatctggcctcggcaagtgctacagctgagtaatgtaaaactttcaacaaaatgggaaaaaatccaatttaacttaatcaagcttaagtgaaattttaccttaattttgtttcaaataaaacattcgtttatagatgttttcctctttattagaacttcattagaatttttacgaagaaataacaactgcttatagccacttatccattagcccctttgttccttattaaagaagttaagatggggcagtttttttaatatatataataaggacattcagttgcaaggtctgagttttttggactagatcccaaatctgcctcctgcatgggcctcttttcacatcctggttcaaggaactacaacctaatcgtgcttctcttaagcacacaaattcttggaagagctccctttgttcctgttgtctcttcacctgcttactctttatcctcaggcagtttggttttctatcctcattccttaactaaaccagcttcttcagagtcaccagtactctcctaatcatcagtcttggtcctcaaattcatctctagaaatttgattttacttaccaccgcttttgtcttgaaactgtctccacctttgcccttctccagtttgttttcttgtttacatattatatttacaaataagcatcttaggtcgggcgcgatggctcatgcctgtaatcccagcactttgggaggccgaggcaggtggatcacgaggtcaggagatagagaccatcctggctaacacagtgaaaccccgtctctactaaaaatacaaaaaatgagctgggcgtggtggcgggcacctgtagtcccagctactcgggaggctgaggcaggagaatggtgtgaacccaggaggcggagcttgcagtgagccgagatcgcgccactgcactccagcctgggcgacagagcgagactccatctaaaaacaaaaaaaaaaacaaaaaagaacaaataagcatcttagcactgtattacatttccacatttcctgttgctttttactgattgtttcaaattattttccagtctatcctttcctaatactgaagctttttgtttttatcttgtcttaccttctcctcatgtcatcttattattattcacttaattaactcatccagcaaatatttattgaaagcccattgcatgtcagattctgttctaggtgctgggagtttaggcatgaaaaaggcagacctagtccctattaagatagttacagattgtagtaggtgacacaagataagaggataatgtgagagggagtaaatgatgtgtattctatggttaaagaagagatgacatttaaactgaagccttttggataaatgcaaaaagccaaacgaagcactttccaggcacagtgaacaccaaattcaaaggctctgagcatggacaatcctggggtgttcaagaaccagaaaggagggccatatgtagccaggcagagaggttaaaatgagattggagagaagggcaacagccaggttaagcagggccttcctagaacagaatcacagccccatgtgcataaatgacacttgaaaaatgtgtcctgaattactttagtgaggctgacatgtataattatataagattgcccacacaaatcagatgctgtttatgagatgaacaatttggattggaagagacctttttctctttactccttctccctggacaactttataccttccacatcactacacagaggtgcatatggtcagagcaaagtaaaacatcttcactgggtagctagctcatcaaaagaatgtagaagatatgatgataattatactaataatggttaacacttagcatatgccaggtactttcctaagtattatttaataagcataagtggttgatggtataggtattattactatctctgttttatagacaaggaaactaaggcacagaaagattcagtaacttgtttagaggcacaagctaggagatagcagagttgggatttgaacctaggcattctgactctggaggttaagcttttagccaataactgtactgtctctcaacaaaaatatgttaagaattgccttgtccttagttatcagataagcatttactgcacacatataaaaaagacaccagaagagagaacgtaccaaccaaatctcatcttcataaatgttctctcctctgagctctggctttatttcagataatttttggccatcatatcaaacttgtatttaagatcaaattacagattgaatattcctaatttgaaatctgaaatgttccaaaatctgaaactttttgacactcaaaggaaatgctcattggagtatttcagatttcagattttcagattagggatgctcaaccagtataatgcaagtgttccaaaattcaaaaaaatctgaaatttgaaacgcttctagtcccaagcatttcagatgaggaatattcaacctatactgctctacctcctttcttttctatttctactaacggtatcaattgttactcaagtttaaaaaaagaaccctcaaacccatcattgacttctttcttggtctccccacctctcctaatttggtcagttgccagttactcctgattctgccactaaaacatcatccatccctggctctctgctcactcaggctttaataatttctcacctggatcattacaaaagctcctaagtggtctccccacttcctgtgtgtgtatctctttctctaaccagcctgatatagcctattctacgtggtgccaacagattgatttcctaaaatataacatggtcaaattaatcccttgctcattaacctttatgagttcccaacccctagtaaaccaagttcaaactaactggccaggccctgagccatggtcccacacaaatccacctttccaatcccatttctgctgctcagacttatgctccagacagactgaactcttcactaacccttagcccttccctggactgccttcatcaactgtgtagctctagatgccttaaacaaaatcaatatattgagttaattaattcagtgacaaaaatccagccaaatagcacacagatcaaactttagttgatgtggcttttcatttttttgtccacaaagtcgctgatgaactctaccatattttctaacatatctcactatctgcaaggtatagggtgggtactcagatgatcaataaatagcccctgttctcaaatataccataatttaataagaggaacagatatatgaaatctaactatagaaaaaaaacaattaaaagacatatgctctcaccaattccaaagcctggtatgtattactatatatcttggccattatttcctctatccacacctttgtggaacctttatagtcactgcttcagaaacaatgaaaatacccttgttgattctatatatttattacaccattatatagcattggtataaatatagtattttcgttaaacctgctcaggtggaaccttcgtggtcattccactagaaacaaaatacccttgaaattctctatatttattgggcataatacagtatttttataagtatagggtgagttaataaacacagtatagtatcatggtataatagtaaatatagtattataatatcattatcctccagcattctggaaattaacacatattcagaacatctcatctgatgctgagacaacgtatataaaagaattcaaaacctcctttataaaccggttaataatttttcatttagtggggaaaatgttttcaagaaaaaaagacttcagaagtttcttaagtcctatctttctgctgctccaaagtgttgaatggctcaccacagaccataggataaaatgcgtatttgttaccttggcattcaaaggtcttccacagtcttgctgaaatctcacagtctagcctaatcactgctataatgcaacacttctccaattttaacaagctgacttgctctttattttccccacgcatatcccatacatttccaacctcacatttgtgttcttacacttctgtctttatagaatgctgtcccgtttgttcagtttctaaccatatcctccctgctctctaggcccagatcaaatcccatctccccaaaagagccatcccagcatgaagtgacctctgcttctctgagcttctctaaacttttctaacaccattcatttgaatattaattacaacttcgtgacattttaaatgttgatatgtgctattctgtaaatcttaacacttttcatgtgattatttggcaaacaagcaaatggatggttccttatagctttattatatttgcaaactcctctagtgcaaggatcaaaccttatatttcctggcacccccagagtacttgaccaagtgccttcctcataagaattcaataaataatacctgaatagtgcaaagtctttagttaaaggggtctattaggtaaattaagagaaactttctctttatgatgattattttcctgacatgaattactgcagaatcctaaaagaatgattaccaaacagtatactatcagtggtatattgaagcatggctgatcccccataacttcattaaaatctaacattactattccaatgggcagagtctcaaataaacttaggaaatgtaatacattgagtgatgaaaagctcttatatcatcaatcctttgggccattaaagataaatcatctactatgagcaacagaaccaacttgagttaccagttccctatggcaggctagtcatctcgagcaagacatttcccaggaaatgacattctcctttgcttccactcattcattaacacaggtaaagtagatctaaagagcacaggatcatagttaggatttttaaaacctgccttctctaaggacttaatgtgactagtaagcaaatggtacattttatatttaaaagtaaactcagatatggaaatctgcacaagcaacttaaaggatggtgaaacaaggtttaagaatcaatgattagataagtccttggggaaaatgtttaaacattatctttcaggcaattactttgattcagtgggcagagaggaatcattggagggcctcaaaaagaggaaggctgaggttaagattcaggctgctcactcctagtactagctctgacatactttaagccctttgtttcccttttccactccacaccctttgcttctattaagctagttccttttctcagaccactgcttatgagtcctgctcccaatttcacattgcctattacactctctcatataccagatagcctcatttcacttctgttagcagcctgtgttttctttcagaaactaccttacttctcagttcttcctggaaacctagcctgataaggtgaaggtcatctgtacccataataaaatatcccatctccctatgttttatacttataagtataaaagacagtaacccaacacatgtagatatacatgtctagacactttgtgaatttgagcctaggtttttattttatactttctaagagctcagcattaatttaaaagtattctgcagagatcatctaatattctaataaatcaactgaaaaagaatactaaagaaaatgaaacatgaaatgagaaaagcaaaaagaaaacacccaatttttatgtaagcaattcaattattcatgcaacaaatatttattaggcagctattacatgtcaggcactgtgctagacactggagatacagtgttgaccaatatgactcagaatttattaattagaaataaatataacaaatgataagaaatggttatgaaaagaggccgaagagagactgatgaagaacaaagatccaagccaagtctatggcagtaaatgagatacctaaaagggcttgtctgttcagtgctactcatacccagtaagaaatatgtggttctgaacaccacctatagaacatactgaagatgaaagtaaaaggattaaggttggggagtttactaaatggagatccttttgaaaaatgtttaggtggggtaactattggtatatacggaagagaccagattatagcacattcaatgttatagggaaacgggagttcatattcatgaagagatttaagaaagagttaataagaaaaagactttgaaaaacaccccccaaatcccttcaacatttaaacccattttttttgcccctacaataataaaaaaagactttccaaaggaagtggtggaagaaaccccattgctcaagacattaaaaaccagatggtccaaagccccagcaaacattcacgtgggatcaatccttcacccagtgaaagcaaagagatgggaccagtgtaataatgtgttttgaatctctagcttagaaatgctatgaaaataacaattcacattgccttggacttttccttaatgtcttagctcttctctgtgctccttcagctttcagggttgacttctgttagagctggccacacaggaatttgcctgtttacttggaagtctcttctgctaggtccatgtattgtgagcttatcaggttttctccttacctctatgagagtgctgtatgccctgggttctggaagtgtttttcttaagtgcttctcctaaggatggttttatgtttgcttctgctagaaccccaggagttttgaaatttttatgttaaatttcttggcttgggaataccatgcttgaggatggtataaacttggatctcacattggacaggcttgggggtttgatttctcacaggaagccccatgacctccagccctggaaaaacagaaagcttccttgtttcttccctgggctgttgggggtctcatttgtatctctgtgcttctcacaggcccaaagccttgtctcctgtgtccatgaagatgttaaaactccagcctcaaccccaccatgcaaatgatcagtatgttgctttgagcaagtggggaaggacaggtctgtttcagcttggttgaccatattgctagaggttgaattcctaagccataagttatgaattaacactgcagtgaagacttaattataagtgcttgatttagaaactttatttcaagtcaaacaaaattttgtgtatgtgctataggcaaggttctgtgctaggtgtctaatatcctgtctcctatgtactaaggggctttataattataatattaattacttctttttttttttctgaaatggtatctcactctgtcacccaggctggagtgcagtggtgtgatcttggctcactgcagcgtcgacttcctgggctcaagcagtcctcccacctaagcctaccgaatagctgggactacaggtgtgcaccaccatgcccagctaatttttgtatttttagtagagacaagatttcactatgttgcccaggctggtctcaaactcctgggctcaagcaatccacctgccttggcctctcaaagtgctaagattacaggtgtgacccactgtgcctggctttaattacttcttgacaagaagaaatttttgttaaatttatgaaggaagagattttaaatggccgctgaatttatgaagcaaattatcccaattagctgcttaatgctatttaggataaaaattacatttgtatatacaaagaattactcaaaaattaaatcaaatagagatccatccagacccaaatgtacactttggttttataagctaagactaatacatatttgcatttgaagtcatgttaaattaggttaatgtggttactttagaatatatctttaaaatggggctggcatttcaatcagctgaagtcctaatttaaataacctattttattctgtgtgctgatcaatcattttctcccctagaaagtcaaaccagtttttgcacttttcatttgtagaacttacatgacataaacattatgtgacagaagttgcttgttattaagagagagaatatcatctcaaagaaacttgtcatctggaaacaggaaaaatcacatgaagtaattttatttgtatcatggctttttcactgttcgctacatttgtgacagctgattttatattaaatattaacaatattctgtttatacttgaatctgctgcagtaggatatagattttactcagaatattcctggttggaaagaagactgttcagttaaatgagacacgtgagggctagttataaaaaaaacatagatattatataactaagaaaataaagctaccactttgatgtcaaaatttggtgccaaaagtttgaagttttactttacccttgactcttataaaattttgttttgggaggtcaaaattaggaaaatattggcaatttcattttattcaaactaataaaaacacttgttagctatgggtacatgtgttagagagtcatggatattaatataaatagtatgattataatgaatgagttatggagacagttaatctatttgttagaaagagttattgttggactttggtaaccaaatagggttatatttctcacttttaataacacttatacaataaaaaacattgatatattttgagtttctagcagcagaatgtcttatttgttaattttaaaataattttggcaacatctactttaaaaaaagcctaactgaattgtgttgaatcttttgtgaagtgtgtatgtatgtccctatgatttgttttgttttgattttaacttttcaatatatgaaaatacccatgagacaggctcctgctaaatttttggccactttgtcatcagagctatgagtgtacgttgtcagttgtttaaacattgttgaatccactgtgggttggcaagaagcatctgggagccagacttttcctgtggacacatgccaagtagtgtattgtatttcctcactaaattgaactatactgagataatttttctagttgagtttttttaatccagaaattattttccaaagctaagtaaagggtcatatgataaagttgtttataataaaaccgcctgaattctttaatcactgcttgataactacttttatttagctagaataggtgtaaataagtcatgcagttaaactacattcagatagttaacattatgctcttaagtagactgttcaggaaagtgcatatgtcattttgtgtattctctttaaatcaatgatttactctaagcaaggacaataaacattgaatgatcccttaattaagtactatggttgggcttgccattaaatttacatgtttgattgcattatttaattagatggaaataaaatcccaaattgcattttaatatacataattatggcataacatttattttaactaaaagtgctaggaaaagtttataaaatctcatatttaactttaaaaaaaatcagttgttatttggggatgagaaaacaagaaagtttcgtcatactggaaaataggctagaggctagttttggagctctggcactgcctagaccctaggcccctaaggtggcagggatttgtcctcccagagtggataaatttacttcatctgctactctgggacactgtgggtgagaccttaaaaaagtaagatctggtttgcctgccatgtacattaaaaatattctggctcttttacataagagcagacattttgttgatgttggctttatttctggaatccaagtaagagaaactttgtaaatgagagttcaacctatccctttagggggccaaaactgagcaagtgtgttggtttttgagctcaaatttttattcttacgtactttgaaggacagcaaatgctattttgcaagaatgagcatcaagacctccatcagatgagttttacatgcctaacctccccttcttccccctgcaggttctaccttgcttcttttggcagcccctttctacagaaatatactagttctagcacatcttttctcttcagccattataacctattttatcataaattagtctgtatgtcaagaagatatctcttacattagaattgaaaacttcttaaaaacaattctgaaagtctgtgcacagccactcataggtacgtggaaattcatattttgagagtgccattctttcgtattacgaaaagtgctttaatttgctgtatttttcatgtcttactgcagtcatatctggtaagaaactatagctatcttattcaggattaatcaatcttcttaggctcctggctaggattgaagctgctctcagccctgcttgcttcagggcttagcctaactctgttttttcatcacatttagtctctgggagggaggtgatgggagatgatttttccatttgcaagctgcctttcaactggaagaaaaatggaaggggcaaatgccaagtttttcactttctgtggccattacaaacatgacttgtctcctgttttttcagcagtgtacactatttttcaaaggagcatttttttaaacgattgtcagttagccaaattattttatcattgaagagtgttaaaaataagaatatatgtcaatatgacatcatgatattaactttctcataagttgcatgttgtgacaataggttaaaatgctgtttaattaattaacaaacaggagcaagtaatatatgcaaggttttacacccaaagggaagaaaaactgtagtgcttcagaacctgggctctggaggcagactgcctgggtgtaaatcctgacactaattattattatagctgtgttatgctgaacaagttacttaagtgtttctatgccttcgtttcattatctgtaaaatgttaatgatgggttttgaatgagatttatgtatatagtacctagtggtgtttagtacacagtaaacagattattataatcactgttacaaatctgctatgcagatttgtgttgaccactttaccttatttcatcctcataataattatctaaagcagattttatagttctgttgtccagatgaaaaaactgaggttcagagagtttaattaacttgtctaagtttgtatagctagtgaaagagggtaatataaacttctggactacaaattatattgcatttatatagttatgttgtatctttcaaatgcatatatgggattaactcctgttttgctaattccattatataattaattttactttggtattatttagtgacatatatctgtattttgaagcttaaaatgtacttaccttcaaataatgatagaacactgaaaccttagagaccttatgcaaaagaaagccttaggacaaccatgtccaatcctttgaatgcagggagttttttgcttatttgtggtggtggatatcatgaaaattatgcatggaatttttttttttaaagctcatcaggtattgttagtgttagtttatcttatgtgtggcccaagacaattcttcttcttctggggtggcccagagaagccaaaaggttggacacctgtgccttcgaagatacggctctgagccatggttctcaaaagtactgtcctgggaccagcagcatgggctggaaacttgttagaaatgcaccttctccagctcagccaaaatatactgaatcagaaactctgtgcatggggcacagcaatctgggttttaaaaagcccaccaggtgattctgatgctgctgaagtttgataaccactgctcaagataaataccacatcgtggtggtatgccgagatgttgatgtgtctcataatctctattcgcaaattagaagttacctcatattgcagaggggaaatgtggtgatagtagaaaaatacaagtgaggctattatttgataattgccctataaatattaaatattcaacactatgtgcttgatccctttcattccttggattgaggccttctaagcaggtagaagctattactgtagggcacagcaaactaagcacaagggagtaagactgagtgtgactctctccccaccctcagtttcttactgactgggacacacagaaccagggatcaggatggttagtttttctagtatgcagcaactaggaatcttcaaacaagaagaactgacaaactgtcactaagaatatagagaaggggagagagagcaataaacaatcattatcatcatatctttttctttcttgagatacggttcaaacatggctgggcgcagtggctcatgcctgtaaccccaagcactttgggaagccgaggcaggtggattgcttgagcccaggagttcaagaccagcctgggcaacatggcaaaaccctgtctctacaaaaaatacaaaaatcagccggatgtagtagtgtgcgcctgcagtctcagctacttgggaggatcacatgagcctgggaggtagaggtttcagtgtgctgagatcatgccactgcactccaacttgggtgacagtgtgagaccctgcctcaaaaaaacaaaaaacaaaaaatatagttcaaacatggaagtggcatattttaaaatgagtgagacagaaggatgtaggaaataaataaggaaactgatacggtgtccacttttaattgtggaaaaaattggacaaaagcagatatcatcttagaatccatgatagccaccgaagaaaaggctgcccattacccacacacatttgctaagactgtaggaaggcagatttcagaaaattcagggaaagaataagcaaaaatattgtggtattttgtggtattaatgacaaacaagtatttttaaatgccatttgaattttaattgtaaatgatcttaatgagggaaaaaaagagaagttaaaataatatccttgtgctagaatctattcaatgatgcaagttttatttatttatttgtttatttatttatttatttatttatttatttttgagacgaagtcttgttctgtcgcccaggccagagtgcagtggggcaatctcagctcactgcaacctccacctcccgggttcaagcagtcctcctgcctcagcctcctgggtttacaggtgcccaccaccacacctggctaatttttgtatttttagtagagatggggtttcaccatattggtcaggctggtttcaaactcctgactgcaggtgatctacctgccttggcctcccaaagtgctgggattacaggtgtgagccactgcgcccagcctgaatgcgaattttaaagggggtatccatcaacaattgaaatagctgaataaccaaagaaaatatgaaaatagcttacatttataaattatgataagcacaaccaaaaatgtatgacagttgtgtgtttttgttttcaaaacttattagagacagtggttcagagaaaacagctcagtttctatttgctccttttctgttaagaatcttcctccaagtaataagattggtaagagggaacagaagcccaggattgacaaagattcaaataaaatacctagctagccaaaacaaactccttctttgttccaggcttgtttaggtaatataaataagtcactggggagtccacacctggagtaaaagtggacagtagaggaatgtttgcagtaccttatgagtggaataatagaggcctggaccaagtctgtgagaacacaaaggggagagaggccagctgcttcccagagtggggattgagctttgctttaaagataagtaggacttgggtttgtcttctggcccaggtaaaactgtcatacattacaagagaaattgtaaatgaagtcattgagctgctgtcactcattttgagggaaacatgaaggatgagaaagactttagaggtctggagtctagcaattgtattataaacttcaaaaacagtagaaagtgtctcaagttgggttccctgaaacagactctaagacagttttatgtagaaggtttatggatgagtgatcttaggacatacgccggatgaaagtgaagaaggccagactaggctaggcggactcttcaggattgtgccaaattgaggcataggggcttgtctttgtattcctgcattagctattcattggctccaagccattctctgggaggccctataaccttgagtgaagcaattccctgcagttgagggcaatttctagtgagagacgcagttatgaaccaactgcagcttgagtcccagcagttggggatggctgtgttggttctgaaaagcgtatctggtatcccttttcagatgaattctgaaaattctagatagttaatgggctataaagaggactccagaaactgctaacatagagtatcaaagagagtcttttatgttaactagaagatgaaacactaattactggaacccagtatgagttccaggaattggtggacatataactggacttcagtaagacatgtggtcaggattctcatgaaatctttatagatatagagaccaccagataactgactctacagctgtgtccaaagagtgctaattaattgattttatgaataccttagggctttattttcaatattatcatatccaacctattcatcattgttttggatacaggcttgctctcaatagaacaaaatcatgggtcaaatccaacaagatgaaatatgatagaatattccacttgctccaaaaatctagttgcacaagtacaagaaaggaaagacttggcttcacagaaaatgggaaaaacacatacggactttggtcaatagctcaatatgagtcaacagtttaatgtgattcaatcctgagattgtgtgctttgggaacataaaataattatcaaatagtgttctaggttagcaggatatcattttttttcatgtggtggatgaacaatgtttagatatttaactaaaactaccctagaaagtacagggtagccattcttaaacttattgatctcaggatccctttacaatcttaaaaattatcaaggacccttaaaagcttttgtttatgttttgaatttttttctagaaagtaaagtatttcatctcaatgtagatttttttggtttgttttaaattttattagattaaaaaatactatctaatgataaataggttggtaaatagttaaatctcaatatttaccctattggaaattaaaacagatctttaaagaatgttgatttattaatgaatttaaaagtcatgatgataaacctgttacatctgtacataacctatttttaggaaaaataactatatttccccctaaaattagaagaatatggcattgtttacatttttacagctttcttgaatgtctgtcttggtagaagacaatagagtttcatatctgcttctacattcagtttattgtgatatattgtttaagtacagttaacttataaagaaaatccacctcatacagatatgtaggaaggaaaagggaggtactttacttgcaggtaattgtaggtattcttttttgatattgtacccagacgcgacaagtagtagttaaaagctggtacaatgtggaatctgaaaccataccaatgaacttttcatactcttttacattaaaattcataggcctgtcttgcactttgttgaatggatcttttacccatgcttgattttgtaacatgctttggtcagttggaaaatactagttcattacattatgcagaacctacaaatattgacacaactatgacacaacctaagaaaaacccacattttgtttatatcaccatccatctcattggaaaagtctttaaatagtggggagctgtcaagctaacagtggcagatacaagtttctaaaatcctaatttttgcttgaaagctcaaattttatcattggcaataaataccgtcagttgtttcccttgaaatgacaagcttatttcatttacttttgagaaaatgtctgccagattcccaagtctaaataaccagtttgtcagtcattcaagtaaaaatggtgttccatgaataaaaaaatggctaattcagctcaacactcagattcttacgcatctggtggtgtagcagaaatgctttatacattcttctgattttgtcacatagaatattaaagttacgtactcaaggttgatattaggtgaaaataattattactgcttcatcaaggacattctttagtgcaactgacttctttcatttttttacttttatgccagtgcagggcagtctaagttgatttatgctaaggtgtcagcagttttacccatcattgctctgcaacatcagtgcaaatgttaacatagtgaaaaagacacataatgtcttagtattattatgaaaatagctttgaccccacagaccctccaccctgcaaacagatcttggaaagcactgctggtataagggatgtggagccagtaagtctaatggtgatggttctttctatgaaactgtgctttttctttcttgggctcttgaaaatgaggttaagatgcactgcatatgatgagaaagggtatatttgcataggcaagcagaggaaacagagcaaaagcctataacaaatgagctctgcatccatatatcagctgtttttccagaggttatagtaggcagttgtagaccctgataagacagccacattacaatcaaataatcataacatcagcctatttgtcactagatagtattttttaatctaataaaatttaaagcaagccaaaaaaatctaaattgagttgatgtattttactttctaaaaaaggattcaaaacagtttacaatgaaatgcatatatacttttgggataagaaatgtatggggacaatgaatacatatgcatttggggtattttatttaaaataagaattaagaaaaaccagtagctgaataaaggtagcctagaagaaggtgttaatagtggttatgcttggatcatggatgatttatttatttattttgcttatctctattttctgactttcagcaatgagtagatactgcttttgtaacaagaataataagaaaaaggttactttaaatgaaaaaaaaaatgagctgtaattgtatcagaaatccagagccagatagaggttactgtaagtgaaaaataaatgaattcagactttcctggactaaaagaattttagaattacacaatttgttataaactttaataaaaagccaagaatttgggttgtaaaggagaatttttatcatacagtgaataattcaatgggacaagaaggagctccatttcataacttcctaatacctagtactctttaggagtaggatcattttctaattcacagtcgcttctgaccaaccgaatctgacctatgaaaactttgtttttaacctatatacattcccttttgccataattgcctaattgcctgtaggtgatcgagtgtatacaagactgctcctgaaacaaaggagtgcttctcgagcagcagataacttttcagaaatgtctgcggtgcacagaaggcagtttcagggagaagggtacagtgtgcaagctgtgtgccctcggtccagtcattcagcacccacagtttacctcatcttctgtgaaatgaggaaactgaacaagattctatctaaggtttctttcccttctaagattttttttcctgactctatcaaatgagatctttgcttgagttcaagttttttcctcaacatcccaatcatgatattaacaaatatgtctatgtgaaaaattattttcacattttctgatttgtgtgtgtatgggtatttttttgtttttgtttttgttagagacagcgtcttgctctgtcacccaggccaggatgcagtggcatgatctttgctcactataaactcaaactgttaagcgatcctcctgccttggcctcccaaagcagatttgtgtttaaattattaattttaatgtcatagtacagaaatttactacaatccaatggtatttccttttgcttttgaagggtagtgataaccttttcatattaaaccttagaataatagaatgtcaaaggtgaaaattagattttgtggttgaacaactattgcttattttcttgcctttatatcacattaacctttctggttgcttaattaataaattgttgcaaaactcccagttcctaaggtaataaacttgatacagcatactaatttttcattttttcccctgagaaatctggttatctcattgtcttccccaaatccttcttcaaagtgctatgggatagacttactcttcctactttgaaatacagagatgacactaagaattagaagcagtgtccagtttatgtgagtaacagagctgtaacaataggccccactttgccaaatttccataagagtaaacatgactctaactatgctatttcagtcatctttatccttccattcattctgaagtttgtataatgctaaaaggcacatgcttatatctttttaaaaatatgtattttattgctgtaaaataatagtctattgaatagacagaacagtcctttagaagtataataaaatatagtaatataaaaatccttcatattaccagtagttctagatttataggcccctggggagctcactttcccttgctgtcataattgtgaatcttttgcccataccccttagattcgactctaacttttccaacccttcttccagcctttgtgacttgccacaggtcatgggagagaagagcgggtggggttccatttgtatgtatcctcccagtacttctatcttttacattttaccactaggactagccggtggtgtcctctgttcccccatgtcacctcttccatctcccactcgggcatcttgtgtgcaatgcccaaatagtgtgtaactttaggaacagaggagtgtgttaaaagctagaggtgaggaaggggaactgggagaggagaaagaagaccatatattttgggcagccctggttgcaattgtttctaaatcagcactaaaaagtttgcttaagatgttcttcagatacgatgctatgatagtgtagaacctactattctatgtgaaaatgttttcaaagtccacaaacagacagtattttaagtaaaattttagaaagcaatccacctgtaaattgaagattttaatgaaaataaaggaggagacactgtggcttagagttaaggcatatgcctaaagttaaaatcccagcttatgtactaactggatgtatgaaccttgacaagttattcaagctccataaattcatttttcatattcataaaatggtgatgataaaagtacttataattacctcatagaattgttggaggatttagttacataatggatataaatgcatataatgtgaacatttaagcaataaatattcacatttcctgagaaaaatatataatattaaataatgcctggacaggtggagatctaaatccaaactttatttcagagcttaacttttgattctgtgttttatgttttaaagtacattataatttagtaaagctgttttctgagggtatttagtgagaaaggtgatcattatgtaagtgaaagattttttatatcatcttcctcttctccctggaagagatgataaaatcagtcctcggccttgatgtgaacatcgcataccttgagttggtgttaacaaattttcttcaaccttttttcaagcagtgtcagctaaatggtgccatttgcttatcactcttctttttggttatttatcctaaagataagaacattagtaagccgtaaatgcccattttgtaaaaactgcatagctagacagatttgcaatccctattagggtaataatccatctgttatggaactggatcaattttgtaaattaaatagattaaaaagggggaaaaagggccatgacttttcccacagtaagccttttctcaaatgctaaaaagatttgggaagactcaaactatttgccattcttcctctctttgcttaactcagagagaaggccaaatatctattaaaaagaggggtgggtgcagttgtttttttttttaattcttcagggtctgattgctcctggaagtttcatatttttgacagagtttattgttaaaaccttttgatgactaccagaacatttctgctgttctcactgatcagtttagtaaatgtgtgactatgtttgaattttcttctgcacttagctcactttactgttactttcatcctgtctgttcaaaaaaaaaaaaaaaaatctcctgatgattcttctaacaatgtgtgattggaataataacttcacatgttgaagagttttgtgctgcagctgagaggcatgtaaatacaagctgcttatttgcaagaagcttccaggtttgcaatatgattgctatggaaaccacataatgaaaaccttataaccatctgtgtggtttgatggattttactgcatagctgagctgtttttgtttactgttattaaaatgttgaatggaatatattaactcacaaacattgactacttgaggtattaattagtattgtacaatgacattgtgcctcaacaccaaaataatacatatttaataataaacctaaataaaaaaatatgtgaatgtatatatttctaatatattgtgaaggtgattattgcctagaattttggtcacttgttcttacatatttttaagagctttattctattaataaatgaatatgttaagatttatttgtatgatttttttaatccatttgtttattctgtatttatcgaacatctcctttgtgccaagttctattcaaggttcagtctgaggtttttttccctgcctaagattcaaaaacatacaccatatttgattttgttatcttttatatggaagctatttgtattgttagccaagataaaatgagttgtttaaatattgttaagaaaaattgatatattaaatgcataaagctttggtttaaaaatatcgctaccaggtttaaaatggaaaaaggaagtgtccttaatgagcatctcatcctctaaaatctgcttattaaatggcatcttacatggatttcaatttggatattttatagtaaacattaattcttaagtaaatacttttaatatcattattctgataatttaagagtgcatatttctaagaacaaagctctctgacaccaatatacaatccagagcacatgttactggcacttaagttttaataaaataaaaaattcatagtaacaaatacttctaaattcattgttaactttgtcaaagagcagagttttttcattaagtcttgtaatgaatttttatatgttcatgctgatttgggtggtgaaatctaaatcccacagtctctttttttttttttttttttttgagatggagcttcactcttgtcgcccagactggagtgcagtggcgcgatctcagctcattgcaacctccgcctcccaggttcaagcgattctccttcctcagtctcctgagtagctgagattacaagcgcctgccaccatgccatgctaatttttgtatttttagtagagacgtggttttgccatgttggccaggcttgtctcgaactcctgatctcaggtgatccacccgcctgggcctctcaaagtgctgggattacaggcgtgaccgaccatgcccagcccccacagtctcttcttaaaagccactaataatacttattgtattgatgcggttatagcttttgactgaggacgagtgcctttatccattttttaatttatttcttactattgaatttgtgactaaattaaaaggggagtgggtgctatggaaagaaagtgtgaaaagtaaggaaagctttctccttcaccttttaccaaattatctgtcaataaaatgagtaggttggaataatgactgtaaacgttccttctacctttaaaaatttatatggaaacaccctattaacccatttattaaagctagcctttaaggtttggcataagtgagataactattgttaaaaagaaaagagacaggatactttttaaaagagtggtatacttttattaggtcttctatatatttgactgaaccatattaaattgtcagtgttatgtttaacaatatgaataaaatgccagatattttcaggtgtcccttatattggagttgtcattattttgtttgaattgagttacagaaattcagaacagttctatttgtcgtgtaagtacagctaccctctcaagcttggttgaaatgctgattttgattcatccccatttaacattttcaggagactcctaaatttccacctgtagtcctgactgctctaccatactttgcagttgcccagacatgttctctgggttgcctcaccaatacattaaattcctcctgttgaaaacacaactctttgtgttccccagtaagatagattattttggctatcctccttttagtaataatatgtccatttctcagttaactaagctcaaaaccttagccatcctttgttgctcttttcccccccctcattcctccacattcaggcacaaagcttatccattctagttcctttacctcttataaccatctcctttccatttcctttgccccttcagttcaggacttccttcccctttatccacagtagtctctctcccgccccttttttaggctgtctgagacaatgggatcagatgtccattcctgaagcatagcttcagtcctgccctttctctgctcaaaaaaccttcgaaggctcttattgcccaccaaataaaagcctgcagtccataacaagatgttcatggcccctcaacagctggtccaaactatgagcgtaactcctacccagctcttcccctatgtgtaccagattctttagtcaaaatgaatatgaacatgcctttttcttttaaagatcatacctatccctccggaaatatccttcttatcctctctccttatttaaactctctccatcccttggagcctccgtggtactccctagttggggggtttctctgctgcacttcttcagtgctttgtgcatcacttgtcaggtttaggccccttcagcctgttttcctttagagcttgtcttctgtcccatctgtgctgtcagcttcctgtgagcagaggcttcctgttacttttacctccttggtagatctcttctgtctcacagttagttaatatccaatgaagattgattgactgattgattgaatagttacaatgactacatttatatattttgcatatttttctttaaagttttaggagttttcttgaaattatgattctctttgaatccagtttttctttggcatgccatttgtttatatgtcctgccttaagtatttctaggtttgtatgcaaatccttaggtgaggaaaaatcatgtaataaatatttttcttggtgtaaatgaattagtttattaagtctatttaaagctcttctcatttaattttatcttatttctttgcataatttggggaaggaatggtataggtgagtgtggaacaaatgtaaatggagcactgattatatgtaggataaagaacattgactttataatcacaaacttaagttcgaatgacacactttggaagttacttcacctttttgagtctctaaagataaacttgtctgtagaatgaggattaaaaattatttgtctatgagattttaacatccagcattgtatatgacacataataggtccttggtataattttgggggaattacctcaaaggatgaagatcattatagtatcttcctgtgaagattgagaaaacgtatgaaattatgtgatactcaaaaaaatgatttataggttaactgcatttttaatcacacatttctccttgctatatgatgttttagggaccatgattttatatatgatactcctgccacacagtacaatgtggtgtatcagtataacgctgggtgttactttactggatttaagggttttcctgaaattaagattgttccagatgagtttctaaaagtatttaaaacaaaacatgcagtgcattagtacatatcttaaattttgccaagccagttggaaaggttgctatttggaagtagctagtattttattggaaagttggaaagtttgctatgtggaaagttggaaaggttgctatttggcagtagctagtattttatttattcagtgttagattgtcgaaaaaggactgtgaatcttgagttattttattctttgaaaaataatgtttatgtgttataaacttttagttttgcttttaaaattgagtgagtactgtagtgttatccctgagaaaacccttcaatgtgccattgataatgtttatttacagaagaagaagaggacagtgctccagtgaaagtggaagaacaaaggaagatgagtcaggatagtgtccatcacacctcaggtaatgacttgtgtagcttcttggcaaaccttattttgcttttgttcactttcattttatccatgttcttactgttctaaagatgtttacacagctccccaaagttggcatttttggcttggatatcttatggctgataagctgcttagtcccatttaggatgcatgaaaaccacttgagaaggatttataaagtaagccaatttatacaaggtattccttcctgaattactttgtaatgactcaattagctttcatttctgcacaaaggagatttagttgcataaattagcttatcatcattgaggaagtgtcactgctaaaggacagtttatagatacaacatgcagttgctgtcaaacctataagaatgtaatatagacatctgtgtatactttgtgcttgagcagaacagacttctgccattcagagactaacaggggacaacaagttgcccaggggactggcaatgtagacatctctgaaaaggtcaacttgacacaggctctgacagtcgacccacagctctgtcttctttgataaaaatcagataaacttaagactgctaattgatctgcagcctgtttaaatgttggccatgcatatcttcattgcatatgattaacacagaaagcaaatgaattgggtaagaaatgccagagtccagtgacagcagcttaaaaattggaaaaggacactagtggcctaaaaggctaggaaggatgttccccttatccatttccacttggcacatatccccaagtactaattatgaatgagactggaaaaataattgcacacactctgtacaaaatcacatgatacggacaacttttcttgcttgttgttatttccaaatagcaggagataaaccatatctgtagtgcaagcatgaggttagttttgataaaccagcaattattttacacggaaagaagagaaagactgccttcttatcaggactttacacctcttcatagccacatgtcagctggggcaaggtctgccatatcatctctgtgtcttgcaaaaagctagagttagggtcaccttcccctctctgatatgtccatacatcactctttcaagctgtcaaggccgggtggacaagaagtgtgtgttcaggaagtagctttccagagtccttcctactgtgacatgtggaaaggaaacagaggcctgattctagacctggacaggaaagcagaagtaggttgctacaaaaggttttggttagtgttttttcagaaaggaagcgagaacaaaatctttacatgttagcactctagtcctataaaatgaagctataaaacactgaggcttagtgaaaccttgaggactatgttcaatagtagtttaagtatatatgttttcggtttatgtatcatgaaacttctgccaaaaatatgtagttttctttttaagaaaatttcagtgcaggtatagaaagtggatacatacagatggttcttccacagatacaaatattttggcttaaagcaattgtatttttcaaaagcccttttaaagtaaacatctcccaaatttttgcctttgagggtaggaaaaaaaatcagttttcctcaaaggaatgcatcaaatagatctagcctttcatgcaatggctataaaacactacaataattcttatctttagtgacatgaaattcttttcaagcaacagttttaatgcttttgcatagaagtgacctttgctcttccctaggctgtcaaagatgtaacactagaagtttgtttgccatgcagggcagtgagttgacaagggtattactatcttgctgagcatcacatgacatgaacttctaaccttactcaagaatgttatatatatttcacattgactgattttactaaaccccccaccacagacttttctaatgtaaagtatgtaagcaaaaacaaaattaatcttgtgtttcttacaagttccttcatgttcaaacttatatatcttgcagatatgtggatgagtatatatataaaataaagattccatttgattttttttgaacattatagaatatatttacctttctaaaatagtttttaaaccttttaacaccaaaggagagattctccactatcttattctcatatgtttcacccgtggtcatcatgtttttcatctttgcaaagtatctcctctgtctacatgtttcataacaattctgttagctttgcccaatgatctcttcttgtatgtttttaaaagcaggagtaaaaacattgttttaatctttcacaggctggctaattaatttttttctttcttacctttttttaatcattcatgcttctcaggacaagaaacataatgtagtttttttttgtaatttttaaaatatagatcatgatgtggatagaataggaaaattaatccatgtagtaaagccaactaaacatacttaatttgtgctttaaaatgtatgtttatgatatttgcctcatcccatctttaaaaatacatatctcaactggattatttttcagtgtttaggggtgaacagtgttaacttttgcaaacctgcgcttttgaggctgtcggtgcttaattttttgtgtatgtttagctacactttaaattttaaaaagtaagctagaggagattgctgccctttaaggaacaagactcttcctgatttttgtgtccagatttcatatcaagaattcaaacattacttccctgagactaaggctaataaacatatactgccagggttttttttccccctacttacgattttttctgctttatagctagtattgcatgctgaaatagatagactagtaaatcatacatgtatgtagctgtgtgacataaacaaattattctttaacagagctctcatacgggacacaaaaatgaggttggtctttgggtaacatcatcatcaagattatagaaagcacagttgaaaatgcatctttttcccatattgccaaatcactagctctgttgcctctttacagcagtgagatttaatgaaatgctcatgatgcacatctagggagagatgcatcttgcacacggtgggggtctctcttcccctcatgtgctcctgtaactcccattagtgttaatgggagtttcagcaagcgtatcgaggggaagagagaccccaaagtgataaggattatgtgttagaaatcaccatatacttttcttttccttctttctctcccctcccctttgagaatctattgaataaaaactattgtaagagaatctgaaaaaaaggaagagcagcctggacagctggggaacgcaatgggacaacatagctaagccaaaacctctactctagtttttagtccaagttttgtttcttccacttttttggagcaagcctaaggctgagcagcatggggaacgcagactaaagaaaccagccatttagatccttttacctcctggccagttactgtgggggagggcctcgcatgttactgtgggggaaggccttgcatgtgaaatgatgtcatcctctctttgctctaattccctgacttttaaactgacactgacagactgcaaggggcacaacatttgacccatttaccaattgatttaatctgactagaatgtttcaacttctaaatctctatttgtctaaataagtggtttttaaaggaaatcagtcactttattattaagtgatttttttcttttaaaattgacaatgtttgaagtgatctggccagctgcagtgccctctagtgtccatttttataatttacttaatatatgctttggggaaaaaaatgtaatgaagagtggccacaagcattgttagttcttggttggattcccaaccttgtgtacatccctgcaggtacgtgatgagtgctcagatgctagtgtggagaagtcaataaggtatctgtctctcccactgcctcctcctttctcttcctccttctctctccactcccattgtcccttgtttttttaattcttagaaaacaagagacaaaatttaatagagggattttactaggttgtatattttctagtccatctttattttcttataagcaaaaagtagcattctatttgctaaatattcagactccatattattcagattctcttttttttggctttaaaatatttcttatattaaagagaattttaaaattttctagtaaacctaacactttgtataaatcacaaaaaatgtgtaataagatgaacaccctaatgacatgctaatctgactagttgtgttggaatcaccaaaaagcctgctgtttgagagccatgtaacaatactgagatgacaaccctggtccagcctgtgtctccacagttatcccctcagaattcaaagatgacattccagtgatggaagttgttagcacgtatatattctgcctggctagtgaacacacggacatcttattgatattacttgcattctttttgtgttaactcatcaaaactcaattatcatgaaattgaaaacaggaaacagttcttagtgtaacaaaagcgtctagtgtgtttagctgtgttccgtgtttcaggagatctgcactgtataagtgacaaagcatttattacccatttattgtggtcttacagagtggaaagtgctaaataatcaatcagttaatggtctgtatggcagtttgagcacatcacatccattgtgcttatgctgttagaaggatgagctgatactccagtgtatgttgcatgtttatttagagcctaatgtcctaaaccggggctgacaaaaatcggttgaaaaatgcagcttcaacactggcaatttcaaagttgctaaaaattttcaaagataactttggctttgggtacaaatgtccctaaagaaa[450 bp omitted]ctcaggacataatttttttagactattttagtgatctagggcatcatttaatttctactggttaattttgaaatgaggggttattacatgaaggccctaattcatgctttctctttcttcttcctaggggataagagcactgattatgctaatttttaccagggattgtgggattgtactggagctttttctgatgagttgtcatttaagcgtggtgatgtgatttacattcttagcaaggtaagaagataccccaaaatgacgtttgtaaagagggaatacaaagctcgatttttaatgcatttggatttacagagctagggaagaatgccaattggaattcttctaggtccttgttaacaattgggagttcacaataattaattattttgtcaagtgaaatgtaatcaaattttaaacacaatcagataacaggattcaacttaacagtgtgtttacctatcacttcagcccttggctgacatccacctactgccttctccagaaacaatatacttatgtgaaagttaacattgtaaggtattagattatttattatgcttttctttcctcttcctttttattcttctgtgtgcttattctgattttgtctgccattcactactggaaacactatgtttatagaacaagtttttcatctttatgtaaatatgttgggtgttccggcaatttaaaagcaatgcttttctattcagacaggcttaggtaattttttaagttgtttagcatactatatttgtaaacaaaatggcaaagtataattctataaacccatcttcatatatatatatgtatatgtgtgtgtgtatatacataaattcttgtgtctgcttcttaaaatactggattattcagaatctttttgtccttagatctaaaagtcaagtttcttattgtgattatacttttggtaatgtatgtgagctcccttaattttcatattttaatttcccctatcgtaatatggggatttaaaaatttccctctgtctacttacaagactactttagaaacaaatgatgtaggaaaacagttgaaatataagtagaaaaatgttaaatcataagtctaggaggttgatgtggtttctttcttgattagagaaatattttggacttttcagagagatagtatgacttgttagaggcagaagacaatttggaaagaaggccacatactgaattttaacagtagatggctggtgcataaaatcataacacagagaatcatcgaacattagagtgatgagtctcaatgatgataatctaattcttggttttatagataaaggaacttgggtcaagaaaatgccagagtcatgatttgagctgtgtcttgactcccagaccagtgcttttccctttgttttctttcctgtgctccttctttccttccttccttccttccttccttccttccatccatccatcataaagcacctgcagtgtgccaggacccactctgacaactgtgataaaataaataaagccaactgtgataattgctagttagggtgcccaaagctaaggctggtcacttatttctctcagtcttctgctcattagcatgggtttttgttactgttgttcccagaaagatgttttaagttcttggacgctatagatagtcacatcacaactcttgattaagcctgttattaagcattaaattgtcctgagttaagataacagctttttggttaactacttaataaagaaatcaaactgattagtttcagctcctgtcaagaaactttcttggaatcattcctaaatttatatagctcacagtctttttaaaaccaatttagctgcaattgtgtataaaactaaaacgttgattagatttcacttgcaagttcagattataggagtgagtggcatatagctattatactccttttgtaaatatgaaatttataaagcccatgtggatctatttgtaaaaccctctttatgaatcaggttgtctttgttgctgaaagcctgggtagagcaccggcttccagaactggctgtgaaacaagccaccataggcatctcttgtttctactgttgcctcaggaaataattttcagttaacatgaaattaaaagtataatcataggtgtgtatcatacttttaggattccgaaggaggcagttcctgttttgtggagactaattttatttgtgaagcctgattagagaacaaaggttaaaggtgttccagcccatgggaagcacatacttccatctaacatttttaaatgctattatttgggagagagctgatcgaaagtacttcctctgccagtgttttgcaaggcttgaagtttcaccatcatgatcatatttattaagggccttctagagatgtgtaatttacctggggttcattttggagtttgaaaaaagagccaagaaagaagaccctgttcgccagcatgttattacctttggctgaataaggttcagtgttcatcgttactcagctgtggacctagtggaatcaacctggtaaatcttggtgaggataaaaaggagaagacatttagctttccttgatgagatttggacatattctgggctattgatgggtgtcttggctgcgagtagacaggttgctttgggttgagtatatgtttgtctttgaagacttacttccttaccttccttcagacaaattcagctaggaatctcttgagactttctagtagtctttattgacttggccttccagttttattgaaactttggcaaactcagactgtaagttaataccataaattcatttaatatgtgaataactgcaattttgaatgcttgatattattacaaattaagtacaattagtatagaaaccactagcatttttaggtgcctcgcagtgtgtttaattgagtttctcagagttatattaagattttgtggtgatgggatgaaattttacctttctgtttttttttacgccatctagtggctcagaatgagtggtgcaggtaattgcagctgttgtacacaatcaaaatggtgtcataaattcaactttaaatccagctatgggttattactttcctattccatgtcaataaaatattagcattaatcatgaaaaactttgttcatcattctgaattaaatatagaaattgtatatataaggaagaatacattttaaggattctaaaatagtatttgtagagatacaggaaatgtgtactttgtaaagaaattaatgccatgacttgtctgttaataataaataagaccatttaaaagattttaaagatatgcagctttcttttagtaatggactcatttataatttgaaataccaaattatcactgtttgatttaccttctaaaagtgtgtcagttctgaaaatattctttaaaaaggcaacataaaatagtttaagaaaagatgcatactttcaatataaataaacatttaggcaaaacaagaaataaaatcccatgcattataatgaagagtgttttaattttgttttttgtttgtttgtttgttttgagatggagtctcactctgttgcccaggctggagtgcaatggcacgatctcggctcaccgcaaccgctgcctcccaggtttaagcgattctcctgcctcagcctcccaagtagctgagagtgtgccaccacacccagctaatttttgcatttttagtagagatggggtttcactgttctctggtcaggctggtctcgaactcctgacctcaggtgatctgcccgcctcggcctcccaaagtgctgggattagaggcatgagccactgcacccggcaagtgttttaattttgtaaatgtaatggcagaaaaacatttaactagcttggggattaggttgttttcatttaaaaatcactacagaaatatagttttatttaaaaattcaatatattattttctgttttgcaagaaagccttgatggaatgttagctgtgctcagtcaacctgggggtgatttatttattttaggcctcttttgaaagttatacaaatctaagcctttatttttttttttcttctggtgcaaatcaaatgttgcaataaagaaagaagagtaggcagatactgtgcccttcctccttccctttttaacattttccaattagcagctatcatgtgacccctggctgagatagcccctccttcaaagtgtccagcatttccttaggtttcacctttgaacctcactaataataaatctaaacaccgcctgccttaaaaggcaagccagtactttttgctttatacttctattcacatagggttgctgctgtttttttatgtgttaaaattaaaagcttcagtagttcagtggagatttggaaatctcttttttctcttaaaaaatggatcaaatttataatgactgatgaaagcagaatttgtgattttaatgacagttgtattgttagtgaattaacaattggtttcagattcatttgatgggggaaaatcatatttgagatagaaaacctgtatttccttaagaaattgggttgtttaaaataatgctaaatatttttgttagttttcatttcatttttattaccactaaataaaacaggaacataatattatagctaacagtattttcctagaaccatgtttttgaaattttatcattttaatagcaggatccagattatatagcaataggtatattctgaggtcccaaatgcctttttggttatgttattctatcttgctcttctggatttctatcctctattagtttatctttcaatctgtactcatcattaatttgcaaaccacattgctatacttacttttaaagcaataaactatttttagagatttaataacagacaagctatacttcagaaaagaggcacagtactttgatattaaaagaaaaatgagagttaagaattctggaatattttatctagtctagggcatatgcgactagctttgcagcctttgagaaactttttattaagtcaaacacaggaaatgtaggttaagactgtggtcaccaatataaaataaaagggtactttttggtgtatattggttggagtttcaagcagtacctccctttatatctgtttggttgactttttccagtgattggtgaattgtgactgtcattgaccatttgcttctcattgtaagaatgtaaaggttaagttactatggctttttttggcttcaaacctatgttaataaatgaaatgaaagtcttgttgagctttattggcagagggaaataagttactttttagctgtcttagtttttcatttgtaaccgtatgacccagtatgccacaaatagcgtggccaactgctgcagagtaactaggatatctgaatgtgggacatgcattgttgacactaagctagctccaaaatgttatattttatagccttttgataagaagaagtgtttgtatttgtgcttgcatttgtttgctccgatgacatttagtttgtatgctgtcagtatggatgtatggtctagagtacactggaagcattaaccaggccaacctcctatttagtacccatctcctcctaggagtgaaaagcagtttatggacacaacaccatgtcagaaaatgttctagttctactcataggactcctcttgttatctgtttgtgaacaatatgcttaagtacttccctactttctcttacataaattggaggaaacattccagaaaaatgttggcagatgaaagcaaaaggtgcttataggaggcaggctggcagctgcagcccttgcaatggcctgacaggtagaggaaaagccagaaggcagtgtcagagaggcaaggtgagcagaggtggcagtggagggggctgctttggaaaggagcccacctgtaaggcctatgtgatttacttcagcatgaataactaagagtttggcagcagcaaaacaaaaccttaaagaaaagcactacgttgatattttttttaattctcagttgaacaattcatgatttcagccttgaaaatgaggaactccctcagtgtgtatagcatactttcactcttttgagatgtcttcttcctcatccctttagaacatggagctagatattccagggaaatcattaggcatagagactagagatagactactgattaagaaaagttttagagtcgatatttagtaaattatagataagtgacagatgttcattgagtattcagctatcaaggaacaaccagcatgccaggtattgtggctcactcctgtaatcccagcactttgggaggccgaggcaggaggatcacttgaagtcaggagttcgagaccaacctggccaacatggtgaaaccccgtctctactaaaaatagaaaaattacctgggcgtggtggtgcgcacctgtagtcccagctacttgggaagctgaggcaggagaatcacttgaacccgggaagtagaggttgcagtgagctgagattgtaccactgcactccagcctggtgacagagcatgactccatctcaaaaaaaaaaaaaaaaagaacaaccagttaaaattgtaataaaatgttatattcctcaaatacttgttctctttgggagaagataagattctctttggaagagcagggtggagacctgctcataataatcagattgccttatagtgcgtcccaaagtactctgtttttttgttgttgccataatactttgctataccaattagtgggcagggagtgggggagggaatgaaaaagtgtttattgagcatttacaatgtcctgttctaggtacttaatatgctttcacacatataattaatataataaccctgtgaagtagatgatgttataattttacagattaggaaactgatgtgcagtaaggttattatggaaattatctgaggatacgcagctattaagtgccttctccaggtatcaatacaggtctgaccctaaagccttttctctttctactttgctacggttaagtgggacttgattaggactttaacttttcttctatatcagaggttaattgtaattatcacatcccagttctaaacaacagcgaaccatgttattgacagtatcttttacataattaaatcttgtatagatggtcaaaattatttcattttctaatcaacaaatatttggtgaacactcatgcaaagtactattttgagcaggatccagaaaagccacaaactgttattcaaggagactgcaattaagtcgaagagaagaccaatgcataaaatagataatagcaataaaacacaatgtagggtatcagtgttgtagtcctggagaatcccagaagaaagggaagtcagtaaatactggagtaagtaagtaatgaaagattcataggaaatggaacttgaactggaactttatgtataaatggagtttattcatttaacaaatatgaatgcttattttctgtgtctattacatataaaacctagaagaacggctgtgctatggaaaggggtggatggctatattgatgaaaggggagcatagagccaatagacatcagtcattcaggatcacttctttttttttttttttttttttattgagacagagtcttgctctgtcacccaggctggggtgcagtgatgcaatttcagctcactgcaacctctgcctcccgggttcaagcatttctcctgcctcagcctcccaagtagctgggattacaggctcctgccaccatgcccggctaattttttgtatttttagtagacatagggtttcaccatgttggccaggctggtcttgaactcctgacttcaggtgatcctcccgcctcggcctcccaaagtgctgggattacaggcatgagccatcacttctctttccttaccttggagaatggtaggcagccagagaaaccctgtgagaaaccaaatcaacctgatgtttccaagctagtttttctacagcagcttacaccacttttcccttatcttcgcctgtaccttgtgtgttaaccacactctcaactacttactcttcactgaacacagcacattcttttatctctgcaggccttcacgcctgccatgtattgctcctttcattattccttctggagtctcagcccagctgtcactttctatgtaaagtctctcagatcctgctgtaggattagttgcttctctttttacaaactttttccctctcttacctaacattcaatataatgattacctgtttctctggctttctgtctaaactttgaacttcttgaggtagacactgtgtcttaaatatttttgtatcccaatatgttaacagtatggcagatagatgtttactatgcttttaccaaaatacagttaacaacaggaaataatcctgacttcttaaaagaacttagaatgataggatcatagagtgagggggaccttagtgctagcccttcactttataggtaaagaaatcgaggctcaacataataagggaaaaagaaataaaagcccaaaggaaaaatggaccactcctacagagacctccaaagacaatggtgtttctgaggttgtacttccaccttggccctgaacttcttggcagccaaaccaaaaaagggagagatgggagctagtaatttcttttaatcataaaggaaggatcttggcttttcccagcactggctacttaaatattcttacatgaatttctagactctgccctgaatatctggcctcaacaactttacataaataagtgcataagtggcaggtattggcctcaacaaaaacttttcatagtaaatataataaaagattttataaagggaattctgtgagggtccaaatgtataataattagacttattgatatatattaagtacctaagtgcactattgtagagtctcaatgaagaatataaatataaacaaaaaagataaggagctgaaaaaaccaggagattttccattctacctgtcatactattttttgcctttgcaaaattctgtcttaacttctttcagtgcttacaagtaagttaaactgaattcattttttccaagaactggaattagttggtccctgttccaatgtggacaaataccttctttctgcacatgggatttaagctttttagacaaggcacatcccatgtagtacatttgaaaacatggtggcaacagcctgccacaggtgggaacagcatgctccttcagatcgcccactcagctacatgtgaatgcttcagaacaaatgcttgtttcgtcactactacaattctttaactatgcctaatatacacaaaagaaaatacattactattggaaattacatttcttaagaaaatatttaggatagtcaactggtgcatcatccaaaatgaagacttagtctatttaatcatctagtacctacttatggaacatcttttatatctcctgcagtgggaggcatacagattaagtgtaagtccttcctctgatcttaatgagtttgtactttattttagttgaaggaataaaactaatgtacgtaaaatctactgaggaataaatgcttagcttgaaatgagagatataaatatggattagctaattcagagaaaaaatcatgacagctgagtcaggtcttagtcattggacaggatttggctgagggagaggagatgtctctgggaaggaagcactacatacagaggtagaatgagtgtagtgcggcaggttgtattgtgccagctagaacagtgacaggaaaaggttgccagcagggtgggaacaagctaaagtctacagttaatgcagtggagagttagtgtaagtttttgagcagcagggtaaactgatgaaaagagttcccgggaagaacagagaggcaccattgataatgcagtaatccagggcaaggtgatgaaggcctgaattagtggtgccagtgagaataaagtggaatgggtgaacctgagaacagttaatagagtcatgtaggtaaaataccatacactgaataccaaagtcactctctactgagcatgacatgatcttctttgcctaacattatctgcgaatcaccagtctgaatgtcaggttttactctatggtattgtaactgtcaactttgtagaaattggaattaactatagcatgactcagggatataaactaaaatttcttatgagaattcttactgtcagcttccttgtttttgtctctcttgctttaaaaatggagtatacaatgcaaggaggaaaaacagtaattctttgaattagaggaactcaaagtcacacctgcaaagtaaattgcaaagtaatgagattgatctccgtacaccactagagaacttagtgtcttcaatcaggttcctgaatggtggtgctcaaacatcatggaggtccttagagattgtgtcagtttcctcatttaacaggttaggaatctaagattcaagtagttaatgtatagatagtaatagtaaaacgccgaggttgtacagttcctgttgtgcatttataaagataaccttttgaaacaatgaatgtatgagaaatgagaggattcttacaaagtttctaatcggagttaataaaaaagagactaaagaggtagccttgatgaaagtatttatacactttaaataggtatctagttttcatagtattacagtgtttatgaataaagatatcacaatgaagaatacttggaaaacaacagtcaagtccattggttcttaaacttgctgtattttatgttttgtgaataaaattactttcattttcacaaaaggctggtgtgttttgaagcacagatatatgtttggaaaaggacacaaattttttttaacattgcaaacacctgttgctttcaaacacatcggtaactaatttctgaaagggttagtacattattaaatcttttaatgtttcaggtttctgttaagtcagcattcttttaccatatcattcgcagaaagcggattaacatactcgataaatgacagtcatggtgctgaaaaagatttaagtaaatgttggggccttatttaagtgtaaaataatattccagcagagaaagaagatttagttaatgagtaaatattactattatgttggataaagtctctgtttcactttatcataactagtcctttttcctgccttcttacccagtcactcttactgctcaataaatattaattggggactaaaatttcaactacaaaataaaacaaataaaatgactataatggtatgaaaattgaaaacatgggagttagatcacaagcattcactaccgccttactattattttctcggattactgggcaagtttggcttttttttgcttctttgattgccacactacattttgccttgaagccatccattttgcagatattgaatttcttttgagtactatttttatacaataagcatcactacacctctggatcttgatagcattactgcaggaggagaaagcagctttgtgttagtaattacctaacattgtcagaagctgactgcaggcctctttctagtgataacagaataaccgcataatgtagctttatagcacatgattaatagaaaataattacacgtcctacaaagggatgcaatatttcttataaattgactagaatggtttcctgtagattaaaggactcttcattattttatcagtcctcctgaagtacagtcacttgcctatgttagcatttcagctgatgttaagagctgaataggtgaaggataccagatggcagacctccttgtacctgaaaccttgtgttccataaagattacatgatgcttcctaacatttcaaagatttagacaacagcctggtatggattgtctattttttgtttgctaagaagataaagtttgagagttttcctttttgttttttaaatgatccacttgtgactttatagaacaatactataattagtttgtggactgcaaaacaacattgtatcagttgcattattttccactgtaagtaatatatcattcataatcacatttgtttgggggtggaaaagaggaaaggcatagacaggcagattttctttttcagaaggaaaccttgtacaatattgaatgttcaggccaaagtttagaatactgtactccaagaagcattttcattccaatttataggctgcaaatggtttaattgggattcatgttgctcaggaggctcatacagagaatagtaatgataaaagtaaaaagctcctgtatttgcagtcttgtcaacactctaatggctgcagtgtaaatccataaatttgcctcctgtatttttacctcactatatttgatcataatgcattaatttcaaacaggaatataatttgcaattctttacaaatataaggtaatattctggtttttagttttaccttttctgatttaaatctgatattttagagtatttttatcaagtgtatgtttcctatgtttttcaattattttaaattaagtgaagcatttaagattattttagtctaaaccttttttctccctagagtataacttttaagggatttgtttatagttgattaagctcctccctgctgtttaccactatgctttctagttaataaatcttcctgttctaccatagcacagaattctctcaactgtgaagtctgcccttgttgatgtgatttcttgggaactaatttcttaaatttgggtgtgagtaactttttgaaaatgataacatgcctttagttgatagcatagactatgaccaaagtagaatattataaagtaataactttctgtcttgtaatttgaatctaagcattgacccccagattgagggccattctctggaagcaagtttatgccaataatatgtcttctcactgaatgttttctatgtctgtcactggggagcagggggctagttccttttctcattccaaataatcagtttcaaaaatcttatattggcattgaataagagctttaacactcagacctaccctgttaattatccactttgaaatcttacagtagtctgtggaacgttaagtacgtgtgtttttttaagcattaggctttaattgtattcattgccttaaaaatagaaaagggtagttttattaggtacctattaagatataatcgttgctaatcatgactttcagtaagttagtattttcttctgataaatatgtcctacatagattatagccatcattgggttctgggcatcagagtatcctcgttccttatacagcttcgtccactaagttcacactatcaatgaactttaaaagtttaaaacttaaaatcttgagtttactgcctcacaagccagagctgtgccctcaatagaataacaatagcaggagtggtcttttctcccctctccccctccactttgttcttccaataaacctaatcctgatactgcccactgtttgaaaaagtgcctatggattttatcctataatctctctattgatagactacatatcaatacatacacgctaatgtaatgctacatttgtattaaagaattgcataattttcctttctgatggtcaatagcatactaatcaatacaaatattaagtctgtactagtattaacattccctccccacatataactcaatatacatatgcacatttatctatgactcagatgctggaaaatcataacctattaaattacttttgggattgattttgaaaatttatcttatatgaaaaattaaatttgagcactacaatgcttgtgaagagtattgcttttggaagatattattcttgaaacttgaaattcattttactttgtttgtatctcactacacataaataaatttgagataaaaatacattagtcaatctggcagacatatgagaccggttatggagtattcacaatgcctaaagcagtggtgtatctgtcaaaggaggaaaaagtgggagaaaaggaggtataggtttgtttatctcaagttgcaaagtaaatgcaaaagtgactcatcgaccactctgttttagaggtagattaatattttgcctttataccttgagatacttttatttcctattgatcttccactataagggtgactctaacagcacctttaaattccttctacctattctttatctaaggtagtttatggtcaataataaaggaataataaatgccttagggaaactattttaaaggaacctatttgtgaattattttttaagcagttttttggtattattagtgtttccgtattctctaatttatctgttaaagtgtgtatattagattttcttaagaaggggcacacatctatcaacattctaaatcattttaggtcatataagtttaagaaataagtagtttattgtaaaaaaaattattttatccttgctagatgataagcttcttgaaggcaaatataatagcttaaggatcctggctttaaccttctatagcctcttacacatgaaaggtatccccaggctctgtggagagagagagtgtccccgagagaaggcttcctgaggtagtttcattttctaggttttcatcatgagtgattgtttctgtgttctgtgcccaataataaacaggctttgtgttataccttaatttaaatcgttgcctaacagcattttaaagtgtccagaaacaaaaagatgaaaatgtttacatttgcagctcaagctcttttaactttataaatagaaataacatttctaagaagttgcatacaaacgacattgtacttacaccagtctaaaggttaatattgcatattgttttcaattaggaatacaatagatatggctggtgggtaggagaaatgaagggagccattggcttggtgcctaaagcctacataatggagatgtatgatatttgagagtcctgggtaagtacattttaatccaatattctgtaatagctcatatgttctcttggtctcttcgttatgagtctttgcctttttaaaagtctttagagttttctgataacacaaagattgtgccccgaaatcttttttgttttgtttgatctggtttaatttttaaaataagaatttttaaaataaaaactttatggaatttactttggaaatgaatagattatttagagaaagttcttttgatagtaaccagctgttttcccaaacttcctccttttcagtaaaataccactttttatggcctttctgaagagttgaattgacaaaatgttgagtaaaaatacatttttccttggctaaaagtgtaatttttttaagcaggaaaaatcaagtttcagctgaatcaaaaattaaaatgcagctttccctttctcctgcagaaaaggaaaattcttctgcttgtctgcaaatgctttggatttagaagcgtcatgaaagcacgagtgacagctcctaacctctccttgttttattaaacattacttatctttgactgttattttatgcagtcgctcattaaaatattcctctgatgtgaaattaaatgaaggatattaatgtaaattagatgcaaccagttaagttatacctgttgctattttgcaaagaaataattatagtttttatttacccatttgatttgtgtgaagaattcatcactattttatacgtaacatatagtctactatagcatagtatgctactattgctacttctggtgtgatttgtaatgtttcttaatcattggacatcaattatttttagagagtaatgtataatttcatagcattttaaatttagtgtatcatgcgagttttttttggtagatgctgaagaatgtggttgctaaacaaagaatgctaaagaatgttcaaactttatagataactttattgttattatttattttcacacatttaattcctattaagtacagccgcaagaaagaaaaaatgatgaagttgcaaatggcagtgtgctgtcacctgcaacagaagtgcgtaccagaagtatgactcatgcaaagcattttaccgtacaaatatcctggtgcgatgatgggcctggcaacattttctactgtacttttgtttaaatttaatgaaacaaaaaattcctaagaaataccaccctaccactaacaaaatggtataaagaatctcccagccaggccaacatggtgaaaccctgtctctactaaaaattagccaagtgtggtaatgttcacctgcagtcccagctacttgggaggccaaggcacgagaattgcttgaacaaggtaggcagaggttgcagtgagccaagatcgcgccactgcactccagcctgggcgacagagtgagactccatctcagaaaaaaaaaaaaaaaaaaacagaatctcagtgtattctcaaagtaaaaaggcataaccaagcactctcttatcttgccttattgctatactatttacatcccactgcagaacagcagatttgaggcttttctatatacttctcagagcactgaaaagaaaggaagggtttgcagaggagagtgtagaaatcccagtggtagcatgtaccaacaggtgagtagaaaggtagtgttagcctgacatttgagttatactctgtgctgcctgagcaagatttgtagaatcatataattaccttttcatgtatatttgaaatcagaggtgtttaaaatacctatgagataccaatgtagccttaacatatgtcaaaatgcattgctggttagataattatttggactacacataaactcctaatattgaatcattacctatcaggtattatctttatggaacttttcaatatctttgctttataaagattctaaacatgtatctgagctggtaatattttaaaatctccattatttgtgtaaaactgtttataagcagtgtttgagagggtctgctttaccattaccccctcaatatcatgatcatccaatctcaaatgtgaaaaaaaaaaagaaatttgattttagggattgtgagtaaacaagtttatatagagagacattgtgaagttaaagttttcagaagttacatttgtgcagttcttaccttttcctcatatagtgccattgaaatagactgaaattatcttggcaaaagttagacaaccaaagacgactttagtggactggttttcaaaacttgagcagctgaaaagcaaaagccgttgtttcccatgacaatgtagcctttgtggatttgggtttgtgctttgggttgaaaagaagtttttagtcctaggccagtagatggcagcagcttttcattgcagacaaaacctcttgaaacccttcccccatggcacaaactcgcccatgatggaaagcatctagatttctgcctccttttacagttaatccaggagagggagtcctttgccaactgatgaccaacagttccaagccagatagtctcgtgaacagtgacaatacagaaataaggtgttatttctgttcagatctccaccggcctttgttcttttaaaacttgaatataggtgggagacataagaaaggaaagaaaagacttaaaactggagtgacaggacaaataatcattactttcaattcatgactgctttatattcatttgatgaaatcatttgtatacaaaccagggagagttttctttacacccttgacaatatatcacatactcttcaagatcataataatatcattaatataaatttaaacaacatggcttgttagaaaatatgctaattgctatggtctcattatgtttgcttagcttttatttgtttttctgtgaacagttagagagctaatttttttcaaaggtgattgtaagtcatattttatatagcattttgcttgattatttgctctgtactgaatttgtactctattgccattagatcttacaataatgttccactctgcaaatttttaaggttcaaataaagtttaattgtttgcaaactgttatgatgctaataattcaacagcctgctgtgttactaatgaaattactttgttatgattaatttggaaaatagtgtgttgattgtagtaattaagcacaacaaggtgaagtaaatgattctaatgccatctggccgccaaactgaatgaagaaatgaaatagggctgtcatctgaatttattcaaagaagtaaggataatacaaatgactttcattgctttaggatttacacttaacacagctcactccgttctatttttgccactttgctgcatatgacactttctttcatagaaaaagaatgtcatttagtccagcaattgttttgaatactttattttattggaagctgattatttttactgtgtgctaatttaattacagataattacataaagtattataggaccatgggaaaaagaaatcacttttcaaccatgtgtaggtgaaatccatatatatggggtttcgtttttgtttcatgttttgttttgtttcactttttgctatcattacacaaccactttgaatatagccttgcacaaagagtagggcatccattcaactgtttcttaaatgtgtacaaaggctcactcttagttcttatgatttctactttttatataatttcatgtaatttctgcactctactacttgctacttattcatagactggtactatccagggtcataatttaaaatagaactgagttagatattatgaattcagatttgcagttcagccattagaagaaaattaaccctaatatacatgttgtttaagagcttgaacttcatcagtgagactgagtgaagcattgtgagaatttttaaagttctaaatttcagataaatcagtcatttgtatttcatttgttggagttatagacacacaccatatagagatcacttttgcttctcttgagttcagtaggttcatgactattgaaagcaatccacatggtaaagaaagaggtggtgaagagtggagatcaaaacatgatcaagccatggaaaacacagcttcactcaaaggttgaaagaatactttgtgtgtgtgtgtgtgtgtgtacactgtatatatatataaaataaaaacatttgatgaatatgatcttatttatagtaatatacttagtattcaaaaatacagagaaacaataagtactacattgttaaaatattattatacaagtttaatatatactcaaatgcacaacagtttatactctggattgggaacaagagatttctagacatctcagctttagccagtttattatacgcctactgctttatagttgagttcttccagaatatctgttagaacctctgatagcatactattttatgatgagataaatactttaaaaatcatatgatcacagtagcatggaatgacatttcattaatgctatgtttgaggggctttttcttgtttctgctagtagaatctgttctaccattacttatacacaaacatattatttattgccagcatggtacacattatatggtgtggatccagtaaatatttgttaattaactgatttggcaccccacaatatctcaagacatgagatttaagaagaaaagagcttgactagtaaacctggtagagaaaatgcctttatacagttagtatatcccataatactatcaacaagtagattggattttattgttataacagaattgagtgagattgtgaataataagaaagttgagttgtggtacattgtccttagatgtttccttcctttcttcccttgtgttcagtgttgtgacctcaaataagaggcacaggtgcctcctcgggcagcttggggcaagtgatctactttcactttccagtgaaacatctcaaatcactgctgccctgcattccacttgcgtaatatcagagaagcctttcctgcatctgatcttgaaagcattctagctgtcgccttgggcagatcaaaaatttgtgcaagtaagtgggaagtttcacagttgctgccaaatctaatcataatttagcttttgtcctttttgttaacttttactccctgtttatttaaagttgtatgattatgttaacttgagtgctttgagtccccaaaatgaaaggaactgtaaatgcagaaagtcgccttagtcataccactgctcagtttaggtcttcagtgttgagagaggggctggaagttgagcaagccaaaacacttgactatgtgcaaaggcgtgaatatagaaactgctcccaaagcccatctcttaagtacctttcttaatgctggaactttggaaggtgtttccctaggtttctctcctcttttttttttttttttttcttttcagttttcttttttgttatccattactcggagaggcaatatagcacagcccttgtctgttttctgtttattggcctcaactttctaatataaaaatatcactcctgctagagtaaaagcaggtgccattttgtagcttgaactgcaatttacttcttgtttgaggaaagtgtcacacaggtactctcaaaggagaaaattaatgacactagtgtatgctggttaaagacagctgctttcgtggaggagaaaattccaacaaataagcagattctcatctactaccctcccctcccagctcccatgggagtctatttagaaaaccttgtgttctttatcacatcaaatgtgatgataacagtttaagtcagactagtaatagtaatagctaacatttactgagtgtttactatttgtcatgctgtgcacttttcattcaattcttataacaaccctatgaagtaagttctgttattcattaccattttcccgattaggaaacaggctgaataatttgtccccaaagccttagggtagtgagttacctaaccaagcctcacaccagcctccttgccctgaattgaacactgttctgctgcgcagtactgtgatgaattaaaaccaaatgcttatttggattctttgcatataataggcacacaacaaatgcttgttgaccactgatgaggtcaccatttctagaaaataatctgaagcatgtgaaaagaatcatccaataattgacaattggatagctgaatttggctcactagtcaggaaagcataccatggttatcatatcagatccaaagcagctgatccgcaatggagacgaaacttttatgcaggaacacttgacgttccagtccagatgaaaataggaagtcaatcaaagcagcagagtccagagaggacaccaagccaaactgacccttttctaaggaccttttcccatccttcccacctcctccaatgtgaagcccagtaaagggaccagccaggggagccttgaagaggactgcaaatccagctgcttctgtctcaaatagttgttttttaggagatgggttttaattgattggtttaaacacataaaggattgttaacaaactgtaccatcagtaaacttcattgtaaaacatgtataattttgtaactgagtgatggcaatgtctgacctgacttttgcttgttgagatatgaatttgtttaagaagaatttttattggaatatctgatacataagtacgtacaaggtcttattccgtggacacccaagcagtgccttgtactggacctcataaagacttctgttgtgttttttgaacaagtcctttttaaataattttgtacttcagtgattggaggctgagggttggggagagtgaaaagattaagagataagtaaggactaacattcactattatggctctggaatttaaccagagaggtggtaaaattgagccctctcatagtctaaaatacaccctatagtactgactgtcttatagcccaagagaaaggggtgtaccaaagttctattttcaaagggtatttgattctgtagagttctttgaaatgtttccatgcctactattcagaacatcatgcttctgaaggacaaggagtgaatgactgcattaccctgatctccagctgcccaagtagatctcagtggtgtaaaataacctgtcccatctaggataccctactaattcctaattcccaggtcaagcgcttgtggtccgtagagtctctgttgctccctgctttcatctccttgcgccactttcctcctcctcctcaggctattccaaggagctggagtcatatgaggcatgagatgttacaattcttatcgctctacatagttcacaacgtcaagtgtgccctctgctttctgggaacccagcagaaaaacaagttgtgtaactgtgtgtttatcctgttataagcatcctgaattgaaaaacctgaaatgtagcaatcttgtgaatgtgtgttattatctctctgttgctttgcttcagttggtcagcatatttgctttattctttattatcgtctcagggcttgctatttttcttcctatctaattaaatgattccattttgaataaattacatttaagtgccatcctgtgcaaggggtatttcaaacatagaatttgacatagtctttcccaagtagattcatagtctgaataagatagggcataaacacagggaaggataaggacagccccacataaccttaccttggtacagttcttagcaggttaagccactagcagtgtcctaagacataaaaggttctctgattttgtgatatctgaaccttagggattatctgggaaacaaactgggaatctttccttatgtatgtatttttaaaaataaacggggagggaaacgcaagggtttcagtattgtttcagatgaaaatatttttaaaaaaattccaaaatgcttgtagctcctgaattaagtgtgaggggaagcaaagagctgtgtatatgaataatgtgaacgtcttttacagagttgctaccagttatggtaacataactctggaagctgagagtgaccctacccctttaggagtaaggactcttttccttcagttggagacagagttgtaccagcagtattcagctgaaagtgagtagtagtaagaacactggaattggagtcaaccaaaattctagtttcactctctagtgccttgtgccctagaataagtttccttccctgcggaataccagtggtgcctgttctctctgccctgtcaggattgtggttaggctcaagtgagattatgtttagaagtgacttgaaaaatcaacaatagcgtcaaacatggctttcctgcatttaaagatatgagaactgaaatgaaacaatgatcaaataatttctccttcacaccgaaatctagcaagggaaaaaaatgttgatactcagcattggctgtaatactacttgaaataattttagtgagcccttggtattattatttataacagaaattgatgcaaataatcctagaggagtttgagatttgattctcctttaattttcaatgcattttttgatcaagtcattgacttccaagctatggtcaatttctgttaatggtgattttaatcacagagatgttacttctgtctataaagtttctaaataaacttttctcatgatatttaaaaccaccaatctgctaataatagtctttaggtatatgttgtaatatttttttaaactgacattctaaggaaaatttttgtgctgacttcctttgcccattgtctaatccttttatgaactgtttcttccagatgtctatctatgaatgtttgtgtgtgaatacacactttctagttaaaaaacatcagatgcatatctaggagtgacacaattttattttctctaattagccttgtaatatagcactaatcttggtttgtagtttgtgaaaatatggggctagaaatgagggcaaaccagaacctcgttacatgtaaccttaatgctttaatgttataactttaggcaaagctaataaaagatgcaaaggactcttaaataatttaaattatctaaaaaattgagcatattccttcaaataataatggctttcatgaactgattttttaaaaattcatttttcatgtgaattacttagaagatatcaaagtaagtttgagtttatttaagattattaagtatatttgttatgcagagtcgctgaagattccattttctagtctagcaattgtaatctatagcgtgatgtagtacataattctggtaacatcggatgatgtcatggtagtatagagttaattcttagcacttctctttaaaacggtgctttgtgatgtgattccttgattattttgaaccattaatcaattctatcagcttaaaaaatagacacattgtgtacctgttaccactggtttctaaaatcaaagtttctcttaccatcttaaccttaccagtttaagctgggaaactattacttttataatgtgtttatattattatcattacatactctttgataaaggaaaacaatgggactatactaaattgtggcaactgtgattaaagataagtctgttttctaaacttttcctaagtgattatagtagagaatttcaagctataagtataccatcctttgcttctcctaaagctatgatctatagcaataaatactctgtattgatactacttaattttaatggatgtatactgaggctggaaacatattgtagcttagcatttagtgccttaatttttaaacagttttgaaattttaaaaattgatataattgcctgaatattttgttattggacccgtttcatgctagaagattattctcatttcacatctttcctaaaaattatgttgttcacaatgtatttctactgacacttcattgctatttttgcataactgaaaatctgtcattttcattttagctcagtttggaaacatgaaaaccatatcagagcagcatattaaagattagtatagaaacacacaaaaaatgaaagagccacatagagataaatttagtcacattattcaagtgtgccattttaatccattaatctggtttgaggctgcttaagagaaatatttctctctgaatgagttttttctcttaaaaaaatgttgagaagagaagcatctcatctaaaacaattaccatgggtttttttgttttttgaagaaaagggtaaagcaagagccgccctaaactctgccataatttattcttagtcaaaaacagattaccatttacacattaggtattaaaagctagttatagtgattaaaggttgtctttctaatgctatgtattaagataccaatacgacatttattttcaagctattttggggccacaggggaagttgtttttcttatgaagggaattctgtattttacttcattatttataagtatatatatatttaaaactatacacacacacatataactgggaaggggagaatgggagctggttgtttctttgaatcctaatactgtatgtcttcttaatgaacctgccgcattgcccagaaaacagctccctgcaaataaacatgctagaagtgatttagccacaatgtccagactgtgtaaacatctcattattacaataaaattgtcaataaatttacattactgctcccttttcaaacgttaaccaactttttcttcacttgataaaagggcataaattgtatttttatgtgttggtgtttttgttttcattacacctcttgctgcactctagacaaaagacctcaagccttaatgccctgagttattcctggatgaagaaaactcctacagttgtttattaatgtaatgtgctgtgttcctttcacagtgagatggacatggagccctcacaatctgatctttagtcacggcattttttaaaaagccataaagccagtagtattgtagtcactgcagctttaagagagacacaaagaattaaggcccttataatccactattagaatgggaatttaagttacattagaagcaaaagataaaacggcaaaatgcaataatttcctttaataaagattatgtccagttttcagaattatgatatcacgtcgaacataattgtggaataagcccccgccccaccaacacacgtatttcttatataactggtacattaacattagaaaagcagagtgatattgaattctaatgaggtctggcctatatgctctgctaggagaagaatgaggataattcatttgtattctacaaagcacttggaaatccacgggcatccctgtggcttcagcacgtggtgctgatcatctgttcctacttggagttggtgggggggtggggggtgggtattcattgctttgaacagcatctgagctggggaaaatagttaaccactttcttgctagctgttgtttcctaatgactatttaatatggttgctctatgcatttgcattacctattctcttcaaggatcttaaaaattgtgatgcctgtgttggtgacagtgcacctctgtagaagccaaacaaagaaaacgaagtgaaattcagtaggataaatgtgttttcaccatcctcagtaaacatgtcagttttaagtaaacaatcagatgacagtgaggtatttgttcattaaaaaaaaaatctgaaaaatgctccatttgatctgatactggctgttcaggaaaaactgcattcatttgtgagtcttgctgacattctgagaaaacagcccattttggaaacttatatttagtaaaaccaaggaatgaaagattttagcaaattgccacgtaaaatgatctgcacaaaaaggcattggggaagtgagctaaggcctgtgccaaacagatggcaccccctgctgtgtttttgattgaaaaagaaaggtaacatttgcagccacgtcaaagagacagtgatcagctaaacaaattggtctccaaagtaccccatcgctagagcaaaccccgctgcagggtacaagcgaggctgtatttcaaaataatgctatgtttgcgtctttcctaagtgaggggatatgtccccttttcatgcggcaaagagaagatgaggtctttgttgaagtcgactgcagtactatctgcagaataagcaacagacctcagtagcacaattacccgttttctctgatcaccgccaaatgcctacaaataatatttgggaagaccgcaatagcttcttatatattgttcactttcctgtgtcaggtctccagagcttacagagaggaaattggtatgcagcatacaaacaaaaacaacaccaaatcatgacaaaggcacagtctgaggaggagaaagaaagaggagatcaggaaaaactctccttgcacttgaattcaattgcaaaatacaaacatcaaaaatggcaaagtgtgtgtcagtgcgtaagttggggcggggggggcggggattttttttttctttggctcatctcagctggcagccttattccgcttcagtaaagacaaggtacagaaatgtcctttgggtgacattcaaaactcgatataaatcctctgctttatgagactgcagtgcaataaattacttagcctaattgtagatgtaatgaattaccataattagtcatgggctacattaaattaatcagcatggtacattattttgctaaattacatctttgccttccaaagccaccagtgcagcaatcagtgttttttgcaagaggggaatgatgctataatgagaagcctttctgctcctagaacagtgacaggatatgaattttgatgggaagcaggaaggtttggaaacactggagttccaacttgtgccttaagtgtctttggttgttaatgataccccagtcctcctgcaggggagcagtgggctgtagcttgcgaaggctgtggaagattcccctcacaggggaagaaaaacacttagatggtgctttaaggcaaataatatagctgatacaacaagtcacaaagcagtggggtggcagaaagataatgtctttgaaaatattaatagatttagaatgttcttttacattggttgatgagatttatagttaccaggtatttctttatgattattattattattcagaccgtttggatccaagataaagcctgtagctattcttgttttttacttaaacctccagctgttcaaaatcttgcttctgcttctcagtgggtgatctggaggcaacccacatatgatctaaatattattcactcttcaggaaaatctcgggcagccgtggggttcatagactcataatctgggagtataggtgcttgcttttgtagaaggtcttttttttttgcactggggccggagacacatcctggtagatgaaccatagaaagtaagaggtacttcacccatattaactctttgtatgaaatatctttgtaagttccactctttcaaaaagcagtgctcattctcaaacccagttacctgctctttactgtcctgtgttgttatgaaagagtttctgcaataagattcattgtcttgattccagaataagctctttggggtttgtataatatttttgatagtttcttggtttattttaagagaagagctgtaactgatctgcacatctgtataacggagattcaagaaaggctttcagaacatatctgtgtttttgtttgtacacttgtctgctcataccagaggaaaccaagttattatcaacttgtttggaaacagtataacagtggaatgacacagtgaacgactatgatatgaacacaatctttaaagagtggaagtgaattaaaacctaatatccaaaagaaaaatacaaataaagcttggtcacagctgtagaaaaatgcatagggatgcagaaaagtcctgtattgtaatttgtgtttttgtcctggtgggaagccatttaattagtgcaagaaggtattgaattttagcttatcatgcatattgttttccagctgtactgaggattgccaagtttctaatggcctgaccctgttctgtaaatcagcagtaaattgcggcatttacactgagcaaaggcaaagggctcattctgttgggtttgtgctgtcacaggaacctgggctaagggattaataggctgatgttaaacatctgtcccctgtctttggggggacgtaaacacacaaagagggaatctaatgccatctactaaaagatcttcaatgagaggaagcccttgctaacatttccatccagtggcaccttagacacattgcctctttatgctaaaaccccacagcactaagggccctataaatagtctccatgtgacagctcagagaagaagagaggtttcctccagacattagttgtgctaaaagattcatcattacctgcagtcatgaaataaatctttgatacttacaactataatatccatgctctacgttttattgcagatataggtagacagtcattatttctgacactttctcagcattacaaggagtactctagggggaaaactagtgtacggtgttacagaaatagattgatataaccacatagaaaccagttactttactgagccattgtaaccaatacaatattcccttaatgacattaaacagtcacctagattccaaattcagtgtaggactcctatctaaaaacaacctcagttatctacaaattaagttgccaagagggaaatttatttttttcatcatacaatggtttacaagaaatatattcctgaatgacaataattttttttagcattcaagtttattattatttaggggacattaaaacaagacaatggtcaacagcaatcactttatggcacttgtggggcattagaaatcagtatattgagaagcctccgcttaagaggacttggagtggttactgtacagtagatactagtgtcacataaattgcaataacatgatttatcatacagaagaggtgttaaagttgtctctggccatgagctatttaagagagaggcttttgcacaatgtttttgagcccagcaagtgagttatggaatcctgtaagagttccttcttacctgtaagtcactgcttttagcagtggtgatctcctcaaaacccctgagcaatagtaggcacaggatttcaacctttagttacatcacttgtaactgactgccacatgctttaccacagcagctctaagaggccatctgatacacctggggaccacctgatatcaccaacgggtccctggatcactgaattcaactagtagtcgccacttctgaaaagagttatcaattcaaaaggaatctttgtgtttgcatatttaaagccaagataattattggtagtgtctgcataacaaatgtaatttcaattagactgtttttctcaattaaaaactattgcttgtgtgtaatgagtattcctatttttttaagtgcatttttaatgtttttattctaagaacattaagagcattgaacaaaagattgtccgattactgtataatggtaacaaatatgccaagtctttcatttctgtgggaacaagtgggggccagtggagcagggctgtgaaggctgattgttgcagagatcttcaacaccagactagaggggacaacatttacagttgtacggttatagaagagtaggttttttaaaatttaattttcaagaaaagttgcaagaggttatccaaacacttctttgtggcttaatatccataacatttgataatgctgtatttcttgtgttgaaatgtaatagcataatgttgagacttctacccatatttaggctactgaataaaattaaaaacaatatgaccttctgatagcatataaaaagattgattgtgcaagaaaaacatttgccatggtacataggatcattttaccattctcaggcagatttgagaattatgcaattgaatggaaaaatcaaaccagagatccttccttcctgtgcaaactggtttccatggctttcatagtctggcagttggggctaccgctgttgttgattacaagacatttgcttttgttgttggtttttgctggcatcgtgtctgaaacagcttaggaaaagtgaatattcatatgtgttctccccatctgacatcatttcaccactctcaggcctctccatagtgttgcttctttgtatctggagagaagcaagtttttaaaaatcacttgttaaaatggatcttggatgtttgtttcctattttctaaaagcaggttggctattttgcccttgagccttaagaaatgtggctcattggctgtttgttatttttaagtaatatatggcatgtatccaagtaagcattccaatgacctcgacaataaaatgtgattcttggctgcaaggtctgttgggggatggcaggctgccagccactcatacatcatttacaggtggctgtttctgacaggccagtgttagttattgtaaatgagtgacagtccctataactcacctgtaagccccactccactggcccaaagcatccaagatccctgacctctttggcacacgtgcttgtctatcgtgaagacccccacacccatatcctcacatgcacgctgctgcctgcacaggctcatcagtacgtggagctaccttgtatgtgattgacgataattaggtttcaactgccttctgatgcagaaatacacaccattactgcatggccaattcagctcctgcagtcttgcctctgaaagggtattgattcactctttcacatttttaaaaggtcatggcaataattccatctgaactgtgctaagtgaaaatggtttgtagaaataatatggttgcttcttagtaccattgtaattgaaaaccacaatgacttgtttttttagtatactttaattacatatgtcactttgctccatcttaccctgatgaagtgtttgtaaagttataaccagccgaccttttctgttaatgctttctgactttttggccaagaagacttttttgttttcctaccgtgtaaggtgaagcctaaccaaacacttgggtcacactgccttattaatttatgaattgaaaagagaagacacgaaccttttcctggggtctgtcatctgcctgcctgttttaataagattagaatatattggctctggtgaacaggatgctaaatttgcttactttctgaaaaattgtattgtaaacagcctcttctgggttggctgaaaaatattatcctcgatcgttatcagaacataataaaatgagtttgttatgagaacacatagctcctgtagtgtaaccaccctagcaagtgacaggaacctatgaatgatatagcataaattgccagaatactcagaccgcagtttgaggctttttcctacatcttcagtgtttctgaggtgaaggagttttaaagtgcttgaattgcatgttttgggaaagtgggtgatcagattttatgctctgagccaccccgtatctttctcccagttagagggggtaaagtatcagctgtttctagcctcagaaatgagccagtcattgcacttgcaaactaaggggcatattctcattgagagcatggggatttacgcacataattaccattaatgctaatggcatttatgtctgtacagccccacacatcaagatgagaatatatttccacgtcttcacgctgtgaaagtccatttaatattattcattttacaacttatttttaaagatgatgtccatattctgtcatggcatacgtatgcctagttaaaagtaaatgtgggaaatattgggaagagatgtgatagctaaacttgttcatgtagatgaaatattgctgaactcagatccattcatactctttaaacacaacgctctattcggctttgaaactgctggcacacttttcatactgctataaatttgtcagcctaatgggacattttgtagatgttttcctttttaagtgctttaacaggagtaggtattccattgatccaaaaatccagctcagcgtttcatttcttagagatgagaatcatacatttaatgtcttatcagaaattaagtggtggatggtacccttcatctcttcaaggaaagaaaatgtgctccccaccgaactctgttctcatctggcctctgggaacatctcgagagtgcggcatggtttgcagttggaaacatcagtggtcatcagaatctgaggctgttccctctcttcattgattgtgtagttgtctttatgcatcaggcccagtagcctattgaaaggtgtcttcatgtctatgctggccaagcaaattcagatccaggtcttgatttatctttccaaggactttggccattaaaagaaaataatggatctatcccgactgtccagtctctgaagccctgatcttgcaaaggggctatgcatttatttattttattttatttttttgagatggagtttttctcttgttacccaggctggagtgcaatggcacaatcttggctcaccgcaacctccgcctcccaggttcaagcgattctcctgcctcagcctcctgagtagctgggattacaggcatgcaccaccacgcccagctaattttgtatttttagtagagacagggtttctccatgttagtcaggctggtctcgaactcccgatctcaggtgatccgcccacctcggcctcccaaagtgctgggattacaggtgtgagccaccgcgcccagctggggggttctgcatttaaagcacagacataagaaggggacaggagtgctgaggtctttcctgagggcacccttcaggtctcctccataggtatacacaatctcctcttggggaaagagaagagctttacatctcagaaggctaaatgaactaaagatgcccaatagtgcccagctgggtgacctcagggaggccactggacctctctgagcctgttttctcactgataaaattgagcagaatgaatactgagtgttttacctgattaaaactttataaccagtgccatgttgtgtttggcttttataagtattgggattacggggaattataatgaatgaccagaaggaaatactggtttccaagggtttaagcagatgaggagagactgctttaacacaacacatttgtagtgcagataagatatagtctcacagcctaattcccatgcccactccgcatcctcatacatgattacattgcattcaacttggtgacttgtctattcgcagcttggctgcagaagctgctgtcagtggtgttgacattaaattccatggggcagaaggcagtgggccctttgggatggaaactgtcccaactgtaccatctttcctggcatgaccaaactggcaggcagggattgctttacctttcttgcccaatcaccagcattctctgggctttttcctcttaagcttaccattttcaaaatcgtgttgatcacgtaattctttttagcccaaaggcattgccctccagatttccctgattctagtaatacgttgtttttacccagtgccctagatgcttgttttgtaagttcatggctccacatatagtacaagtgttttgtaaaagaccattacttcattgtaataatgtgagttatcttattctcatttttagaagtagggctactctagcattaattcaacaataatatgcatcagcattgggcaaggacttggggatagagttgaatgaaacacttcccatgacttctaggtctaaaatagttaacactcgtataatgtttaccaatttcaaaggacttctctccacattttctcatgtgctttccacaataatttggcaagggaagcagagcagatgatattatttccatttgagagaaaaactaggcaattgttcagactcccatgggttagcagtgttgagtgccacctcaaattcttctggccacagacctcttgctcctacctctccaccatgtgcctacccagagccatagccaagacaaagtattcttagtaaacccttcccaatgtgttctgcttctgagatgcatctaatactgtgagagactaaaacggtggtgagtggaggagctggttaaggtgtttaacccaagtctccctatgccatgcctgttggattggtgcctcctttgggtgatgaggcaagggcggcccgtccactgcctgaagtttctaatccagttgtatactttcttgaacttacaccattgaaaaatatcaaggtcagaacatgattgaagaacctttttcctctcttttaagttaccacatttatatattgttttgcactgaagaaggttctcttaaaaatgaggttgagatccctaaagaaattgcttcaatcagcagcagggcttaatgactgttaatgggaagtggagataggatagtaagtgttactttgattaataagagaacggcagagaatttaaattgtgccactgatggattattttcttcaagcttgataagcacttctcatttgttcttaaatttggtcaatactgttaaaggcagcaaaatgaagtataattaattctattacggctactcagaccaagtgttactaagaaacagattatgatgccaacaacagtgggagtcacagtgctgacagtttgattctttgaatacctgtcatcgcttattagcctgaaagaatgaacaaaataattctgtattctgattttgagatacctaaaaccatttttttccatctgtgtgtgttccactgaccatagtacaggaaatatcagtaagatgatcaactgacactaaaattatcctgtattggaagtatagagagtaaataaaagattgagctaatatatcagtgaaaacattaagagctgatgctcattttgaattaatcactaagaaaatgggatattgatttgatgttgaatggctgttgaaagctttacatatttcctcttttccaaagattctgccccatattaataagccatgctttttacttttcctattaaatttattcggaactgttgatatgcagatgacatttagagcaaagatactttattttagtagacaattttatttgctatgaatgctaatgcctaggacactagacagaccctttcccttgttttctgcaaacagcaggatgcatcaatattttcagaataggctttttttcttgacccctttaaaatctatccctatctatttatttaagagatacaaatcactctataagttatgctaaaagtcatggctgaatgtgggctgatacatacaaggtcttacctactagtttttagcttcttaattcagtgactcttagcctggcagttcatactctgagtcatctctacgtaattcaaggagtgcttgcatgccttaaaatgaaagagattaattccactttattttttgaaagaaaatatgcaatacatcagttctgtttcacagaaaccactaaataacagcaggattttacaacttcagaaaaactgggcctcagactgaacatgtgtccttctgttcactgtttctaattccaagtgttgcgtttcttccaagtgtataaagttactaggtgagtaatctagggttaatataaaatctaagtatggttggttagtagtgcagttataaagtttctctgaagttctaattccattaataaaaaatgtaaaccttatctgttatgaattgagaaccaattcttttgcccagatgtcccataaacataatttccaaagatgggaaaattataggaaaaacacttcagaccagaatgtgaaagtcaagccatgctagaagagcttgtctgcagagcatgtctttggagacagaatccagggtatgagaaggtgccctgagccatcagactgccagtagccctagttccgggggtacttctgctactgcacagcgcagaacgaccttgggccagcctcttgatccccgtgagactaagtttcctcctctgtaaggttaagggttggcgcaactgatctcccaggttctttcacccctaaaaacactggtctttgagtaaagctcgtgcataagatattcagatgatccttttaaagctgtttgctcaaaacgatgtggtctgtggtctgtatagacactagaaaggcctgctatgcttcaagctcgtgttctcccagtgtggataataattcattcttcagatgttaagtggcccccaccacataccaggcctgtgctccatgcaggacatgaggaacccaggcttgtttctgcccccagggagcttcctcactgagggtgggggaggcaaatgacaagtgcacacaccagcatgtaacagaaaagattccttcagataagtccactgaagaaatgcaagccaagaaatgtgatcaaatatggtcagagaagggctctctgacaatgggaaactgagagagaaaaaactaaccagcagaggcaggtgaggggagatggaaagggtaattcagccttccttgcctgagtgcagaaagaagcatgacatgcatctgcattgtcttaacacctggtcagtttttctttctttctttctttttttttttttttgagacagagttttgctcttgtcacccaggctggagttgcagtggcacgatctcggctcactgcaacctcggcctatcgggttcaagcgattttcctgcctcagcctcctgagtaactggcattacaggcacctgctaccacacccgactaatttttggtttttttagtagagatggggtttcaccatgttggccaggctggtcttgaactcctgacttcaggtgatccatccacctcggcttcttaaagtgctgggattacaggcatgagccacggcgcctggcccagtttttcttttctattaaatatacttgaaatgtgctcctgctaattcaagaaaaaccaagccgagaaacgattgtttccattgcttttaatccagtcattcccagccatagcaattcgagtcattttgactttggttttccagattactgcagacaattcaagttttaaaaacttcaacttggattctttccattcatactgtatctctgtgtttgcccagagaatttggtacaacgtatgactttagaattactgtataatgctcagaggtgtgaaatgccatttcgagtaatgcctttcttcagttaatatagataaatattgatggcagacagcagtaaaacaagtcattaaattcttcagtgcaagtgtgtcccacatattgctgcaagctacagaaatcacaccagactccaagaaaaccactgcctgtgattacagagcacttgtatttccagctttcgcattccagataggaatataagggagtttggatgagtcacggggaccaagaaccaatgtaaagagacagggaatggggcttagattgccctgctggtctattctatccactgttcttttctcgtccaccctaatgaattcctgggtgagccagaaacctttgaaaaatggctatcagctacaaatgggaggtctgatgctctgaaaacaaagaaactttaaactggtaaccctataaaaccagctgaagatttggaggaggaataaaccccttcctctgctgctgttttgatgatttgacatccgcggctgtcgtggtgatgcagaacttgcttgggtttcacagaagcatcggggtgcttatagggccagataacatgtttgctgtctgagtcttcagatgaaaaatgaaaggaaccatttcctcatttgataatgccaccctcaaggattccagcctggtatagactgtgaagctccacagcatggtgaatgctttcttcaaggtgtttttaatgggccctggattgtcaaagatgccactcataatgaggccgagagtcccacatgcggagaaagctctgtaatgagggaggaggacgatttgttacagttatgtggttacttggccataatatctttttgaggcttattaaatcatataaaatttcaattcacactgtaatattctataaaagatggagcgcacagaagtaataagtatgacaacatttctttctttatgaatcatcctgttgattgcgttaacactgtcacatccagcggcagggttatttatgtcgggacagtaattttccatctccaacttaattttgtaaaagttaattacaaattagaataaaataaatgcagttatggaaggcaaagaagtgctgaaatagatgttattggggaaaatatttacgcaggctgctgctcgtggagatcattgtgctgtacctggtggctgtcagggcaccccgcaccacccatttgttgggtaaagagaagctcttggctttctctaccagaaaatgaactgttcttggaagaacatagggtctcagctgtcatcctagtgaaactcctccctttcctagtctggccattgggcccagacaggtcacaaaacttgccacagtcaccagcaagatcattacagcacaaggatgagaattcagggctcttgacactaggtcagtcaactttcacttcacttaaatgtggatgtattttcgtttctgccttaaaagtgcgggaagaggaggcttaaaggaggaggaaagtttctccaaatttcctctcaagacaaccgtgcctagggagatggaaaatcgaaatacacgtatcccttaggtggggaccttctcagatgaattcctcttccgtcttgccactgccattggtagcagcaaagtttcttggacagaattcctgccaaagcaacctggcagaagggtgggttacactgcggcaggcttcacaccagccagccctgaccccagagagaaagaagcaccagagaggagaaccaaagcagaagtggtaagcgctccgggcccctggataggaaaccctggcccttcatttacttccccagtcgtttctccagtgttcagttcactttcccctgggtctcaagtgtgtctgtgcctgctcaatgacacctgcttactttcctccacatccactttgctctttccaatcaaatgtgctctctcttttccttcccgtcctcaccatcacacttgacccattctgggggtcttttgaagtatcatgattgactcactaggtgaaagacttttatatttcttttttaatagagcaaaagtgactctaaatttgttaatattctttaggttacataggacaaattacagataagtgaatcagtaatgaaatttgtaatgagaatttctcaagtatgaaatgttggcacaaggaaagttaattgcgggattttacagccattatagtttatatcataaatgcaaaaatgactaggcccatttaattacagtaggaacacactaaatttttatggagtgccattttgttaaagagatactcggagcattaagagccaatacctcctaacagtgggtccaggtagctttcgaaacatcaaataaatatgctattgctacaaaattgttccttagatactataattgacacaatgactaatgagatgggtttattctcacagcttcacgcactcaatttacagtgtctgaaagttatttttttctgccatccatagacctggaaggaactagaaaaatccctcttggaaaacactatctctgctgcttctctaattaaccttcaaaaatgcattttgaaatatagaagttggtgcctggcatagaaattggattgtctcagaaaaaaaaagacccaagtgctaatttgttccttattaaatatctgacatgtcaaaattacaggcagttaatgttttggagcctttcaacagggctcagggacagctcttcttgcaggcgaggcttagtagagcagttgtgggtaccagttctcccaggaattagtgcccaggctgcctcttcacacccccacctcccatccagcctgggttctgtaggcatcaagcccccttttctctaggggaaggaggctgtctaaggggacagacatgggattctgtgcctccccatcattgtgagcttgggggatgcatcccctccttaccttcttaccccaggccttaggagcgcccagaatggaaagatttcatggggattagcgttgtattcactcaggacccctgagaatatttcagattattctggaaaccaagggtgtcatccccaccttccattattcagtgaagtcctggggaggatacttttctaaacagtattcctttccccatcaaaaacaactgaaggatatgtgtggtccccatgtttaaccaacggagctgaaattcaagtactcttgatttgggaaaacctgcattcaaaccctgcttgatcatacagtaactgtgaacttcgagcttctgtgtctgagtaggaaaaaacacaatgatttttcctcttccctcacaccacaacgatccacacagaagacttctcgaccaaacgtggggatttctccccaccaacaagcagtcagttctgcagcagacaccagctgaggggcctccaaatcagttctggcgcgacacacctggagaccacagaagaccccccccccccccccgccgccactgagaccaagggctcagtcccacaagactcacctcactcccggtgctgatccccaggccccaggttctcacctgtgcttctgactgaccggccgtaagttggggatcccatgatcccctccttgggtttgattaatttgctagagtggctcatggaactcagggagacacttatattgaccggtttatcatatagaacagtaggaaagatacaggtgaagacgcataggagaaggcacgtgaggggcgcagagctcccagtcctccctggcgcgccaccctccacatctccacatgctcagccatcccgaagctcatcctctcccatcctgtttggcctttacggagacatcactggacaggcatgatggaggcacggacaaccatgtggaaaggtgattggacacaaagggtaccatccagcaggaacagacggagtggggaacccagcagggcctgtctgtccagatccttcttggcctgtctgtgtggctttccttccccagggatggggcgggaccccttctgaaatgggggtcttatgacctacggtcaggcaaggtaggtcagaaattttctttagggtcagctccaagaaagaaaggtgggggaatattcctgccttggggagaaaaaggagggcaggagaaggtcagagagaagggttctgttttctgaggcctaaagcacccaacatggtaacaaaagggctatgggagttatgggccaggaaccatggacaaaactatgtattctattaatatttctatacctatgtctatacctagctatatatacacacagtatatatacacatacactcatacacatcacacacatgcatacaacccacattcacacacatcacacactcacatacacatcacacacacaccacacacacacacagcacacacatacactcacacatcacacacacactgcacacaccacacacaaaacacatactcacacatcacatgcacacacacatacacatcatgcacattcatatacaccacacacacaccacacacatacactcacacaccacacacacaccacacacatacactcacaccacacacacatatgcatcacacacaccacacactcatcatccaccgcacacatccaccacacacacaacacacacacacacacacacacacagacatacactcacatacgcatcacacattgcactcacatacacacatataccgcacacacacatacacatacgtatacacacatatgtgtgcccacacttggagtgaatccctggcattgtgaggcatgctccccaaacccttcattaattccccaaattgcaatattaacaatggaaacatggccatataaagtcacagtgtcctcatctgaaaaatgagaaagtaatcatgatacgtacttcacaaagtcattgtgagaatctgataatttagtgaagagtttgtaaatataaaagcaggatagcacatgtccataccagcgttattcacagtaggcaagggatggagactgctgcagtgtccacccaccgatgaatgaatacgcaacatgtgacatgtacaggtgctcctcggtacccacagggaattggttccaagaattcccacaaacaccaaaatctgtggatatgaaatgtaccatttgcatgtaacctatgtacatcctcccaaatactttaaatcatttctatattacttataatgcctcatacaatgtaaatgctatgtaaacaattgttatatggtattgtttagggaataataagaaaaaagtctgcacgtgttcagcacagatgcaatttatatgtgtgtatatatatgtaaatatatatattttatatatatatattatatatatatattttatatatatatattatatatatattttatatatatatattttatatatatattttatatatatatattttatatatatattttatatatatttttttgagacagagtcttgctgtgtcacccaggctggagtgcagtggcacaatctcagctcactgcaacctctgcctgccggattcaagcaattctcctgcctcagcctcccgagtaggtggaagtacaggtgtgcaccaccacgactggctaatttttgtatttttagtagagatggggtttcaccatgttgaccaggctagtctcctgacctcaagtgatccactcgcctcagccttccaaagtgctgggcttacaggcgtgagccactgtgcccggcctttttaatattcttgatctgcatttggttgaatccatggatacagaacccacagatatccagaggctgactgtacctacaatggaatatgattcagccttcagaaggagggaatttgaacccatgctacaccatggatgaccttgaagacattatactaagtgaaataagccactcacaaaaggacaaatactgcatgactccatgtacacgacatcctgcagtagttaaattcatgaagacagaaagtagaatagtgattggcaggggctgtgggagggaggaatggggagttgtttaatggggacggagtttcagtttttcatgttagaagtgttctggggatggatggtggtgatggttgcacaacaatatgaatgtacctaatgctgctgactgtacttaacagtggttaagatggtaaacttgatgttatgtgtattttaccacaattaaaaataatttttataaagcacaggataccaggggttcctaatctggagtttgtgcacctagaatgaactcacctgggttcatgaatttcctaaaattgcatgaaaaaacatgtttgagatatttcttctccttaatagtatctacatgaaaaactgtccagaaaataacttaccttttcatcataggaataattgaactgtatcctagctcatgatttatacccatttcactcagattctggctgtggaaacaacacaaatgagaatcaacagtacttagggaacaactgggtactggatgggacagtgcggagcggtgagagaggggcaggaggcagctatcttaaccagcccaggagagtggggagatgacaggaccgggaacagaaaatatatctaatgtacattgcatacatggaacttgtagatgtagcattcgtggtggccttgactatttggggtgacctcaaatgtcacagcatgggtccttttttaaagtggaaaacaatgccttcctaacactcttgggaggctgaaacaagctatggcgtgcagagcactatgtgcatgtgacctgtggtgccggcaggccactgggcagcccgtgtgcctgctgtggatgggtctgtagacggccctcaaaagccatgtttccactgttactattgcgatttggggaattaatgaaggtcttgggaagcgtgcctcacgacgccaaggactcactccaagcgcgaacacacacgtgtgtgtgtgtgtatgtgaatatgtatgtgtgtgtggtgtatgagtgtggtgtgtgtatatgcatgcaatgtggtgtgtatgtgtgtggtgtgtgtggggtgtgaatatgcttctatgtgtgtgtatgttttgtgcgatgtgtgtggtgggtgcctatgtgtgatatgtatgtgttgtgtgtgtgatatgtatgtgtgtggatgtatgtgtgtggtgtatacttgtgtgtggtgtgtatttgtggtgtgtgtatatgtgtgtggtgtgtgtatatgtgtgtatgtgtatgtgtgtagtgtgtgtatatgtgtgtatgtgtatgtgtggtgtgtatgtgtgtacgtatgtgtggcaggtgtgtgtgtgcttgtgtatgaagcgtgtgtggtaggtgtgtgtgtttgtgtatgatatgtgcatgtggtgtgtctgtgtatgacgtgtgtggtctgtgtgtgtctgtgtttgtgtatgatgtgcgcatgtgtctgtttgtggtgggtgtgtgtgggtgtgtgcttatgtctgtgtgtgtctgtgtttgtggtgtgtgtggggggggatgtatgtgcacatgtgtgtttgtgtcagccagccctggctcgcacaggcagagcagaccacctccacagtgtgacctgaggagcagtggccctcaaacacctttcccaccatgtgtcatgacactgccaactcctccattaatttctctaaatcaaggcagtgattccatttcctaggaactctctcaattacatttcaaatacccctgtatccatttgctagggctgccataacaaaataccacggaccagggccttaaacaacaggcatttattgtcttacagttctggaggctggaagtccaagatcaaggcgtaggcagggttggcttccccgaggcccctctccctggcttgcaggtagccgccttgtctctgtgtcctcatgtgtcttgtctctgagtgtgcacatctctggtgtctcttcctcttcttaaaaggacaccagtcagattgggttagggcccatccacaggaccccattttaacttaatcacttattcacaggtcctatccagagttagattctgaggcgctgggggttagggaagcagcatagaaattttggggaaaagcaattcagcccatagcagccctgagagaggtaacacactagactgcttcggggtcacaggaatgacatttgcggctcccttgctgcacatctgctgcttgagggtgggtctttaggggatagtggggcttttgatagatggccgacctggggcagggcaattccggagcagagggctctgactccctgtgaaggaaggaccctggctggaggatccccacctatgctccaaggtggtagccctgggcctatgaggggaccatcacgatgtgggaatgggatgcagggagtggagctgaaagcccaccagagacaaacccgactaactacccttcagttttgcccaagacgctgttcacttcaactcatccattcatggaagtaactttcctgccaagctctcttcctctggtgatggtggagattctatacactttcttcatggtctctcagccagcggcagcttctgggcccaccttgcttcactccccatccatacccagcaggggcttcctaaggaactgtattagtcggttctcacactgctataaggacatacctacgattgggtaatttataaagaaaaagatttaattgactcacagttccgcagggctggggaggcctcaggaaatttataatcatggcggaaggagaagaaaacacttcctttgcgacgtggcagcagcgagaagtgcagagggaaggaggggaaagcctctataaaaccatcagatctcgtgagaactcacttgctatcacgagaaccgcatgagggtaaccgcccccttgattcaactacctccctccgggtccttcccaggacacatagggataatgggaactgcaattcagcatgagatttgagtgcggacacagccaaaccgtatcaggaacttatgtgattaagcagtacatttgaagaggaaatggttgagccgttgttataagatgcttcccagagctttgcggtgtccagcattctgacatcaacgtagggtttctatcaagtagttgggctgtcagtctaccaccagcaaataaacctgaccctctaaaggctgatagaaagaaacatcccataaggggtagctcttccctttacattaccacctacctcaacaatgaggtcagcgggatagagcagaaattgcactgggctggaaaccgagatcctactgctgattttgtctccaagtgactttgtgacctcatataagtcatttaaccttcgtgggcctctttcctcgtgaaggaaatgatgaaagtgagtgttggaacaatctgtgatactcagcggcaggaaagctcacccagaaggctgaaatctgcatacataaataactcgaaaacaaagccatgcttggtccttttttatttagttcaatcaacatatctcatctaatgttaaaagaaaggacataggatttttttaaagaaatttttgttttgaactaattttagacttacagaaaagtggcaaaagtaatatatactttccttatatctcttctatcatttcccctgatatcaccatcttatataaccatagtacaactattaagaactggaaattaacatcggcacaatgtaactaactgaactacagtcctatttgaaactcacaatttttttccactaatgtcctttttttctgctcaggatctaatctaagatcctaaattgcatttagctgtatttctccttcttctcctccactgggtaacggttccatggtctctcctttactttcatgaccctgacactttggaagaaaatggatcggttccacaggagaatatccctcagtttgggtttgtttgtgcattctcatgagtggggtaaggttatgcctttttggtgagaatacacaaaaatcatggcacatcttcctcagtgcatcattcaaggggttcatgagagccacatcttataactggtgacattgatcttggtcacttgattaaggtggtgtctgctgggtttctcactgtcaagttattatctttccctttgcagtggataagtatctaggctgacgctttgagactaggcatggcctgtttgtcctccagctttcactcaccagtgctagcatccctcagcagatcttgtctgcagtgctcactctgtggagtcctgtcctcttcccttctacatgtattcattggcgttccactgtgcagaagcgctgtcttttctccttcattatttatgtggtttttgtttgtttattcatatcagtgtggatgtttaattattgtatttgtggatgtttttagtctagcttaaaatgtaacgctatctttatcttgctgctcagatcgtctcagctcttcgctctttcacattggttcccgagctcttttgacagactcttatctttattttgagcattttcttattttctggcaccacaagatgtttcagactgaccttgtgttttccatgtcctggcttgggaatcagccacttcttcacgattcctggttccttttacaggagaatggtgtggagagaccaagatctatgttgtagatgggtccattgttattggaatggtattgcttttaagccctcaaaacagagggctaggtatatatgtgtgcatgctaagctgcacaaacatacccatctacctctgtcttcttctctcctgccctctttaaagatcttgagttcatagtgatacccatgattctaagctataccacaggaaatcattttatacttgtttcttctcttatttgtgacatctttctccaacagtgaaaaccctggctctcatcatatacaatatatttacttatttgttcaattccactaccgttgtcccttggtatacacaggggtttggttccaggaccccctcacccatgccaaagttcgtgcatactcaagttccgaagtcagacctgggcaacatgagtagaggaaaagtctgccctccgcctctgcaggtttcaaatccctcgaataccgtaaaccacgcctggttgaaaaaagcccatgtataagtggaccctcgcagttcaaacctgcattgttcaagggtcaactgtatctatataaagtagttttgaacggctagctcatactgccatgagaaatgcttttactaactgatcacagcgtttatgcacagttccatgcccttggcttttcagcatccagcggaatactgttttccacagtggtttagattagttattttcttccctgttccttgaatgtggttaccttatttatttgcagtagagttagactcctttattagtgtttattatattccattttgggttccctccacatcccagttgcttttaattatttgtttagtttgggtgttatgtaaataattactatggtcaaagagtcagatctgtacaaaaagctgtatacagagaaggatctttccctcctcaaccctcccctttcccactcaccccctgtaggtagccaacatctttagtttctggtttatgttcctgtatttgtttttcctttcttttctcttttttttttttttttttttttttgttttttgaggtggagtctcactctgtcaccaggctggaatgcaatgatgggatcttggcttgctgcagcctcaacctcctgggctcaagtgatcctcctacctcagcctcccgagtagctgggactacaggcatgcaccaccatgcccatgcccagctaaatttttttttttaatagactgggtctcactatgttgcccaggctggtcctgaactcctggactcaagtgatccgcccacctcggcctccaaaactgttgagatttcaggcatgaaccctgcgcccagccacttatatttctttatacaagggagcagatagctgggtattttcttatttccccttctttattacatgaagagtagcatgctataaatactgttttggattttgctttttttcactgaacaataggatatgagatctttttttttttttcaaaataagtcatgaatttcaaaagtctgaggaatgctatgcaaactggatcatctctaaccatttaaaagtagaagattctaaatggggcactagaatggtctactagtttagaaaactagtctagaaagactgaagggtccttgctttccaagatcttccaaggaaactaaagagacaaaatgggcatgcatagaaaaaattatgtcaatcttccgagaagaatcgcatcttcctgataggcaggaaaaaagatatcagacagtgacaactttgtcaaagaaatgccaggtggaaagagagcaaagcaataatgatatgaggcagtgcaaagctcttgaatttcaagagacccataagttcagctgagcttctggcttgttgcaggtcatattgtcacgtaactttctttagtgcactttctgtatgggtcccttttgtcaatgtctcccagacttcagcgtacacacaaattacctgcaggcaggcagatcttgttttttgttttttcaaatatgagtatgaaatgtcccattttcttccgcctttatttatcagtcactctcctctcggctgtgatttttttctaaaaatgaatgaactgcccatcaccggagcctgagctctgttggtgacacagaagtcaagaaggcatggtccttgccttcgggaaggaatagtatgagacagtagtacaagggagagaagacgatgcacaaacatggacactcagacgtgggagagtctgtctggccatgggggatagcagacagctgtaacttgttccaaaaaagaataattaataatgatacagttctagggagactaaaggaattgtttcattcttcaagatgaaaaatcgatttcttaacaaagactgaatttggttgtgaactggagaaatgttctctcactttaaactctctcttgtcttggtttcgttctatatttttaagtcctctattagtttagtcacatgcaattaacgtgttccatttgacattgggattagtaatcctcatgaacacattagttcttttttctttatttctataggtttttgggcaacaggtggtgtgtggttacatgcgtaagttctttagtggcgattgtgagattttggtgcacccatcacccagcagtatacactgaacccaatttgtagtcttttatccgtcacccccttcccagcctttcctccagagtccccaaagtccactgtgtcatgacccactgccgcagtaggtctgaggtggggcccaaaattctgcattcctaaggagctctgaggcatgctgatgctgttggttcatggaccacaccctaagcagcaagaccttatatggcgcctgtggcttgagttccaagaaccacttccttaggtagagaatcaatatgcttgtttgccatatgtaaaaaagaaaaaaaatcccaagagaaagctgatgcataactctagcattctcctgtttactaaactctctgaaattcttgatctaacaataagataaacaacataaaagcattaaaatatgtttactgatgcatataactaacagaacctttatattcaatgaaaagcagatcctatgtggagaaataggaacacttttacactgttggtgggactgtaaactagttcaaccattgtggaagacagtgtggcgattcctcagggatctagaactagaaataccatttgacccagccatcccattactggatatatacccaaaggactataaatcatgctgctataaagacacatgcacacgtatgtttattgcggcactattcacaatagcaaagacttggaaccgacccaaatgtccatcaatgatagactggattaagaaaatgtggcacatatacaccatggaatgctatgcagccataaaaaaggatgagttcatgtcctttttagggacatggatgaagctggaaaccatcattctcagcaaactatcgcaaggacaaaaaaccaaacaccgcatgttctcactcataggtgggaattgaacaatgagaacacttggacacgggaaggggaacaccacacactggggcctgttgtggggtgggaggagggggaagggatagcattaggagatatacctaatgtaaatgatgagttaatgggtgcagcacaccaacatggcacatgtatacatttgtaacaaacctgcacgttgtgcacatgtaccctagaacttaaagtataataaaaatatatatatatttttaaaaaagcagatcctaaacatttatagatacacctgctatgcaggcagattagatgcaggtatttgctgagcttctctgatgtgtgcatgccatataaaaattaaaataaccttagctctggtggattttgattttagttacatgtgggaagggttaattagaccttggacttcatgatggtgaccagtgtataacatggtacagacgctgcagaacactctattacctattgcaagtttcctgaattgaattcttgcttgtgcatgtagaataaacttgccaacatgttgtagctccttaaagtctctaagaatacatttttaaaaataagtatgtttctaagtccaaggcatacaggaagcatatttttatcagcttcaggcccctatgcttaggggcctgaagaaagtataggttgtaaaagaatttttcatggtcagtgtcaatgtcccagtgttaccacacatattctacagcacatttagtaaataaatagtgaattaactcaaatgctccttggagaggaaaatatttgacaggtttggcagaaagctcttgcccgaataggacatctctgggaccaggggcctgttgtcatctaccaaagtgagacttggcttgaccctgctggggatgtcactcgtggcttctcggagagaatcatggatgtcatccaagtacttcgtgtaggcttggaatcggggcattttctttccttcacccacatgccccaataacattaagttatctaacattctagcatctctgattctggggttctctgggttttctttccacgtcatgtctcagacccttcccctactttccatcctcatcagcacccctaacctaggccctcctctcccacccgagatactgtgacagcctcccacctgcccctgcaaccacaacctccaactcctgtccgagccactgtctgaagaaactccctaagtgcacttctgatcatgtcacagctgccacctccagcacctcccaaagaccatgaaattgggagcagttttctccgtgcaggctcagcccagccatcctccttctttttctgtgcccacctggtctccgctccagatcacctccccgctcctgtctttgggccgctcctcttactagtctctgaccctaggttctcatcccacctcacaccctcatctttgcctactgcaatttcacttatctcccaaaatctgtcctttctccccaaagcctctcctgatctcaccaagggaaattattttctattcctgcaaaccttttcgacctgcggctcatatcttgtgaggcactgcattctgccttatgtcacagtgactagtgtgcttgtcttagccttgggactaatccatatggtggtcatcatagaaggattcacttctaagcccctccaggtcgggggaccggacttgtcctagacagtgtgcgggagtgggagcggtgcgtgtcctttctgggatgaacgttcaactcctgaagtgagcaatctatatctctctcttcccctctccacagaggccttcagtgtttgcactggtggctgttttgtcggcctggtccttgtgtgacaatcgtgcacagtccccagctgatataacgcacatgtagcatggatgagagacacatttttgctattttaagtcattgagggtttgcggttgttgccacagcaaaacctagttccgtgggttgttaagatccatgcaggtaggagttttgccttttgacttgaaacatctgtgacatttaacacagtgcctgatatgtgatgagaatccagaagttatttgtgcaattaaatttaaccaaaccatgtccagtgtaaaatgagacggcaggaaaatcaaccagcaggcactgtgaagtcagcaggcacttctcagcttcatggtttaggcaagtgaccccctccctcagcttccttcccctgttcataaggggaataacagtacggcctccattacaggatttctgcaaggatgccatgacataacgcacacacacactccaaacagccagtgcatggcggctgtcattattactgttattatgatcgatctcccagtatgaaagtggcatttactgccgattagaaggggggcaaagaaaatatatctagaaatcaagtaacattaggattcatgtcccagtggacaggggtgagatgactggcatggcagcacctcacactgagtcctgttggggaggcaatgctcaaggagagactccctggcctgcggccccggctgctggcttcccctggcccactggcttcaggcagcccgggtgcccagctcttcacagaggaaggcagcagaatccagaaagctgacagtggccttctggaatgaggacccagagtggcatggtgggctctttcagcaatctactctccaggaccccaaatgtaacaatgtgtgcattgctaccaaaggtagaacacagctaatgtcaccagcagggaagaataacaagtaagcatgctcattaaggctaattcatcttctattttcatctataatcatttcttgaaaccaaagaggtcattatcgtcaactacatcttcagtgaaaagtgcatttgaatttccatatgtgggccacatcttacatgccatgcattcatcaggatcctagacatatttctatgtggttacctggaatcacacctaagtcttacctaaactgtggttatatcttttaattaaaaaataagcgaactcaaatttcctcctttgaatttattccactaatatttgttaggtgcccaccatatgcttgtcatggtccctcccacaaaaattcaggcagatggctgactcggtaacttaggagagttctgagaaacggaagaagcttctagaggctatgtggggctcgtgcttggctctgttgagtatttttattgttgatttagctgagtacagagaagacatgtttatcaagtttgtagacatagtacatctgttatctaggagaaacagctcctttacagatgacacaatcaggattcaaaatgttctcaataggctgacacacagctgaaaccatgatgaggaaactaataaaagtaaatgcaaagtcctgcatttaggttcatagagtaaactacacaaacacaatcccagtggttcatgtgaaaaagagttgtgggttttggttggctatgacctcaaagggtgccaaccatgtgagcatctgctactcatttgagatcagcattgggccacaatgaccctgtgttgtatgggaatattgattcaaatggatgccttggtcaaagagagaaattgaggggaattaagatggtgaagtgtctgtaaacagtttaaaataaatattgaaaacagaaaaatattatagatgtgttcaaaaatgtcaagcactgtgacattaaaaatggagaacacaggccgggcgtggtggctcacgcctgtaatcccagcactttgggaggctgaggcaggcagatcatgttgtcaagagattgtgaccatcctggccaacatggtgaaaccctgtctctactaaaaatacaaaaattagctgggtgtggtggcgcacacctgtagtgccagctactcaggaggctaaggcaggagaattgcttgaactgggaggtggaggttgtagtgagtcaagatcgcaccgctgcaccccagcctggcgacagagagagactccgtctcaaaaaaaaaaaaaaaaaaaaaggagaacacaggttctgtctgttgcagaggcttgatgtcaatttagcaggaagcccaccttacaacagatgctccagtggataacagaagcctcataacagatggctccagccacagggcacctgagcaggactgagcttctcctcttcttgtggtggcagctttcatggccgagcatgtcagcatcccccagaaatctgcgtgagacacgtaggctttcaccttgccctctgccctcactggctctcagagtcttgaatagggtagactgtcatgagattttcagttttcttctaagaacacacttctaattttataatggaaggcagtgggaaaaatagaatttgcctcaaatgcatatgccctacaaccacactggatacaaaacacagattgacacaacccaaaagggtaatcatatacaagagcctttagctctcttgccaatttggcaaccagaccttgccatggtacgttataagcacaagatgccacaactggatcatctgatgctgttggggaaatagggacggatgggtgaccatttcccgtagccttctccaagcttccacatcccagcccgctggacaacaaattagttgaaattccagcgggaaggaagtttatgtggctcttttccccatataatagatgctctgtcgagtcgtgtgtgtcgtgctgtgacaattcattcctgcacttgtgacaggaccgccggctgatttcactatgctcaattaggagaaaatgcatattttaatctgccccgtggtgaagtaccactttgcttggtggccttggcagaccagccatttaaccatttaggaggtagaagcttctactccagcccgtcatgtccctgccagcagcctctctagtctcattttgttgccaacacttcccgggtttcaaaggacaaacaattaaaggccactccatcactctcccagccaccgtgctgcagcccagccccttcggcagtggccgccaccctggctgctggcagtggctttagtgcggtgtctggaggagcaagtgcctccctccctccccggcctgggggtggagagcccagcatggaagcctgcatgcagcctttctgctcctctctctccggcctcagggcctgccttcattagaagcggaggggtcgtgccagctgccagctcagctctggcattggagaccgggcccatcctgggatgcccatgaaggcagcttcttaaactggccgtgcccacaccatctccttactgcggcctccaccgctgtggagagcgagattctgcttttcgtttgtgtgttttctgatgcatgagctgatcccttgagacacttcttcctttccttctattccaccttccttctcccttgggccagtgcagacactccatggtgcttccaacgctcagacagacctggaatttggtcttggagcttccactaaccgacttcagttatctgacctctctaaagccataaatgttctcattttctgaggggaagaataacagtcctcgcctcatcggtgtctgaggatgacacacgcagacgcctaaagggcggatgacgactgagccctttcctgtgctcccagaaggcactgggacaggcgcatggtctcatttaattcatgcaaacatcccataatgatccccatcttacaaaggtggaaagtgaccctcagaggagtcaacaaccccactgggggcaggggtgagggctgcataaaggttagctccattgtctcccagatctcaaggaggtcaggactggagatgaagccggacccccaggagggtggaatcccacagcgaccaagcccagagctcacgggtgggtaaaatgtccacagagtcttcttagagccaagcactttgctcttcccatttaaaaactagaagaatcccctgatttgtaattgtccctgatttttttgttaaccagttcttctcagatggtttcctctaactgcagctgacagcccagggtcaggctcaagccgacagccaagcccagacccagattctctgggtttctgtttatggagctgcagtcattgaaccctcactgtgaacctaaggaccaagaccagacagtggggtggggaccagacagtcgtcaattctgtgctagattctcccacttctgatgcttttacagagcctgtgacttgttgcttcaaggcccctccactaaatcacagctgcttgggggcaggggaggcactggccacaggacccagggctgtttttccaagaggggatcacaggcacgcaccagccttcctttcctcctctgtcccctccctactatacctctcccttgttccagcaaagcagcattaaaggatcaagcatccctagaggagtcctggggtcccattgataaggctgaaaaggagaaaccagcatcagacccacccgcacccgccctgtaatggcaaagccttcccacagggcctgggccaatgggctgagccctgtaggtcatcattttctcctggctccacaaagcttctctctagagatgagtgtgttccattcttcctggctgcaaggtgaattttcatagctgcacggcctttcctgtaagacctgaaactgtctcccacttgtaacacttttcccagctctggagctgtggcatgtatgtcacacatgtccacgtgcagatgtatgaactggcatgggggcgagaggagttctgcacccggcctctagaaggcctctcagcaccaccccagagcctcacaacccaaggcatgttctcctgcggaagtcccaggcttcttgaggaaacattgctgtagccccagctagcatgacacccctcaagagctactttggatc

SEQ ID NO: 60064 - DNA, 422 bp, Homo Sapiens
tttttttttttttttttttttttttttttttcatgggattaaaaatttttattctttgtgtatctgatttccgaaacatagaaatctctctcccactccttaaacctgccactgggctaagagagtattgtacagaatatgcactcactgacttaacagaattagaacatccaggcactcactgagattttgcttccacaaccgctcaaagtctagtcattagttcatgagttaacaccacacttgaccttcaaattttggaaatgctgacggtagacagggacttgttttgggaaaggaagtacacagtagacattgttacccatgacccaaccaccaccacctttcctttaaagaaccccactcttcctttaaggttgcagagtctcagaaagtgggaagaaaggaagtttttgcatttt

SEQ ID NO: 60065 - DNA, 420 bp, Homo Sapiens
acttttttttttttttttttttttttttttttttagtttcacaagaaatgccagtaaaagtttaataaggaacatcttccatattcagcaggaacaaggaacaagactacaacacaagcactgaatgaaacagaaaagcatgctcacggcagatgcttattccattcatgttaacatttaacacatctgttaaacagggtgctctaagccctatttttgacagtgactaaaaatgatgtattctaactaggataagtagaaatcaagggaaaagaggttgaatctgaatacacaaatttatatagctcattcctagaacactacactgtcctgtgttttcgataaattaactatacatatgcattttacttcaagatagggaaaagcagaagtttaatgatttttttttttacaattgtt

SEQ ID NO: 60066 - DNA, 2900 bp, Homo Sapiens
cgctgggtggtgctggcagccgtgctgatcggcctcctcttggtcttgctggggatcggcttcctggtgtggcatttgcagtaccgggacgtgcgtgtccagaaggtcttcaatggctacatgaggatcacaaatgagaattttgtggatgcctacgagaactccaactccactgagtttgtaagcctggccagcaaggtgaaggacgcgctgaagctgctgtacagcggagtcccattcctgggcccctaccacaaggagtcggctgtgacggccttcagcgagggcagcgtcatcgcctactactggtctgagttcagcatcccgcagcacctggttgaggaggccgagcgcgtcatggccaggagcgcgtagtcatgctgcccccgcgggcgcgctccctgaagtcctttgtggtcacctcagtggtggctttccccacggactccaaaacagtacagaggacccaggacaacagctgcagctttggcctgcacgccgcggtgtggagctgatgcgcttcaccacgccggcttccctgacagcccctaccccgctcatgcccgctgccagtgggctgcggggacgcgacgcagtgctgagctactcgagctgactcgcagcttgactgcgcctcgacgagcgcggcagcgacctggtgacgtgtacaacaccctgagccccatggagccccacgcctggtgagtgtgtggcacctaccctccctcctacaacctgaccttccactccctcccacgaacgtcctgctcatcacactgataaccaacactgacgcggcatcccggctttgaggccaccttcttccagctgcctaggatgagcagctgtggaggccgcttacgtaaagcccaggggacattcaacagcccctactacccaggccactacccacccaacattgactgcacatggaaaattgaggtgcccaacaaccagcatgtgaaggtgcgcttcaaattcttctacctgctggagcccggcgtgcctgcgggcacctgccccaaggactacgtggagatcaatggggagaaatactgcggagagaggtcccagttcgtcgtcaccagcaacagcaacaagatcacagttcgcttccactcagatcagtcctacaccgacaccggcttcttagctgaatacctctcctacgactccagtgacccatgcccggggcagttcacgtgccgcacggggcggtgtatccggaaggagctgcgctgtgatggctgggcgactgcaccgaccacagcgatgagctcaactgcagttgcgacgccggccaccagttcacgtgcaagagcaagttctgcaagctcttctgggtctgcgacagtgtgaacgagtgcggagacaacagcgacgagcagggttgcatttgtccggacccagaccttcaggtgttccaatgggaagtgcctctcgaaaagccagcagtgcaatgggaaggacgactgtggggacgggtccgacgaggcctcctgccccaaggtgaacgtcgtcacttgtaccaaacacacctaccgctgcctcaatgggctctgcttgagcaagggcaaccctgagtgtgacgggaaggaggactgtagcgacggctcagatgagaaggactgcgactgtgggctgcggtcattcacgagacaggctcgtgttgttgggggcacggatgcggatgagggcgagtggccctggcaggtaagcctgcatgctctgggccagggccacatctgcggtgcttccctcatctctcccaactggctggtctctgccgcacactgctacatcgatgacagaggattcaggtactcagaccccacgcaggacggccttcctgggcttgcacgaccagagccagcgcaggccctggggtgcaggagcgcaggctcaagcgcatcatctcccaccccttcttcaatgacttcaccttcgactatgacatcgcgctgctggagctggagaaaccggcagagtacagctccatggtgcggcccatctgcctgccggacgcctgccatgtcttccctgccggcaaggccatctgggtcacgggctggggacacacccagtatggaggcactggcgcgctgatcctgcaaaagggtgagatccgcgtcatcaaccagaccacctgcgagaacctcctgccgcagcagatcacgccgcgcatgatgtgcgtgggcttcctcagcggcggcgtggactcctgccagggtgattccgggggacccctgtccagcgtggaggcggatgggcggatcttccaggccggtgtggtgagctggggagacgctgcgctcagaggaacaagccaggcgtgtacacaaggctccctctgtttcgggaatggatcaaagagaacactggggtataggggccggggccacccaaatgtgtacacctgcggggccacccatcgtccaccccagtgtgcacgcctgcaggctggagactcgcgcaccgtgacctgcaccagcgccccagaacatacactgtgaactcatctccaggctcaaatctgctagaaaacctctcgcttcctcagcctccaaagtggagctgggagggtagaaggggaggaacactggtggttctactgacccaactggggcaaggtttgaagcacagctccggcagcccaagtgggcgaggacgcgtttgtgcatactgccctgctctatacacggaagacctggatctctagtgagtgtgactgccggatctggctgtggtccttggccacgcttcttgaggaagcccaggctcggaggaccctggaaaacagacgggtctgagactgaaaatggtttaccagctcccaggtgacttcagtgtgtgtattgtgtaaatgagtaaaacattttatttctttttaaaaaaaaaaa

SEQ ID NO: 60067 - DNA, 390 bp, Homo Sapiens
tttttttttattcgggaaagagacattagagttcaactactctaattcccttcatttaataaatgggaaaacttcatagacaacacagtttgatggaaaaagtaaaaataaaaataaatgagaactaaactaacccagaaaaattatagggtctcacagagagtaagtgataaaaccagagccaagtctatcagcctttttcactctgtggctcctttcactttctttagtcaccagtcctggtgtttagtctcaacctcattcctcttgttgcaatacaatcccatttctaccttgctgcgtctctaaacagataagaattgggtatacttgttccactctgaggctcaaaagacaactattctctccctgtcttttcctcttgtcctc

SEQ ID NO: 60068 - DNA, 541 bp, Homo Sapiens
tctttattatctttggtgcctggtgtttagttttaatattttattaaatacatccaaggaaagtttttggtttctgcctttacttcaagaagaaagttgtacaacagataatagttgttccatttccatgggttactgagtaaagactcaccagttcgccataacagacataagagtgacaaaaaaataaaccttcattgtgtaaaaaaaaaaaaggccaggcgcagtggctcatgcctgtaatcccagcactttgggaggctgagccaggcaaatcacttgaggtcaggagttcgagaccagcctggcctacatggtgaaacctcatctctactaaaaatacaaaaatcatcccagtttggtggtgcacaccagtaaacccaacaactggggaggctgaagcaggagaatcgcttgaaccttggaaggggcagttgcagtgaacccagatcacaccacttgacttcaacctgggcgacagaacaagaattttttttaaaaaaaaaaaaaaaaaacttgagggggggggcccggccccaat

SEQ ID NO: 60069 - DNA, 861 bp, Homo Sapiens
ttttctttttttctcccgaagcgcgccattgtgttggtacccgggaattcggccattatggccgggattttatcatttgttcagaggtgtctttatttttattaatacccataaaacgtttgtgtatttgcttcttcctctttctccttttgatcacattttagctacttatctagaggatctctggccaagtattcccttttattgtattgataacaattcttaatggctggcctctcttgtgtacaatgagccaatattcttttttgttctatatttttgtatcttcccctttcctgaacaaagcatatttagagtctcaaagaaatcctctccacaaagacatgttcctccctctggtgtgggtagacatagggtaagagtttggatgaaacttttgtaaattgtagtgttcttggcataaatatgaattaaatctttttttatatttaaataactagttaaatatgtgcttcttactaagattaggtattttttgccaagataacaatgataaaaacattttgggggggaaattgaccttaaaattttgggataattcaagaaatgtctgcagaaaattgatttatgatctaatttttgggttagcccttggagggttttttgttttggttttggtttttgtaagcccttatctgttttggacaagtccaaggaaaagggtgggctctaatttctggttacccctattttcccattaggaatggttaagaattatcagcaccttaattggtggtaagagctaggcgttcaaggttccttaaatcactttaatagccaaaaaaaaaaaaaacatgtcgccgctggcccgtcgctttgattagcagctatctcggcgtg

SEQ ID NO: 60070 - DNA, 411 bp, Homo Sapiens
  misc_feature (165)..(165): n is a, c, g, or t
  misc_feature (381)..(381): n is a, c, g, or t
tgcttaccatatcagaaattaaaactgagaaataagtaaaacaatatttacttattagttccttttcaaatgacaataataaacccatttcatgttcagctctctcttaactatgttctttcttattagttttcgtttccttctaaccacaaataaacatataanatcttgacctgccttgtggaaaatgttttctctcaaggatgagaaataaaatgagaattctggacttacttcttatcaacattaaaaaagccatgggggttgtatttgttgacctttcctgtttgtatattagttttctgatatggagaattgttctgctttttcgtcctcctaccagtctgattaattccgtaggcttaacacttcctttttctntctccttggaatgccctcttgggatatgca

SEQ ID NO: 60071 - DNA, 3001 bp, Homo Sapiens
gtggggttttgggggggcagtgggtgcaaggagtttggtttgtgtctgccggccggcaggcaaacgcaaccacgcggtgggggaggcggctagcgtggtggacggcccgcgtggccctgtggcagccgagccatggtttctaaactgagccagctgcagacggagctcctggcggccctgctcgagtcagggctgagcaaagaggcactgatccaggcactgggtgagccggggccctacctcctggctggagaagccccctggacaagggggagtcctgcggcggcggtcgaggggagctggctgagctgcccaatgggctgggggagactcggggctccgaggacgagacggacgacgatggggaagacttcacgccacccatcctcaaagagctggagaacctcagccctgaggaggcggcccaccagaaagccgtggtggagacccttctgcaggaggacccgtggcgtgtggcgaagatggtcaagtcctacctgcagcagcacaacatcccacagcgggaggtggtcgataccactggcctcaaccagtcccacctgtcccaacacctcaacaagggcactcccatgaagacgcagaagcgggccgccctgtacacctggtacgtccgcaagcagcgagaggtggcgcagcagttcacccatgcagggcagggagggctgattgaagagcccacaggtgatgagctaccaaccaagaaggggcggaggaaccgtttcaagtggggcccagcatcccagcagatcctgttccaggcctatgagaggcagaagaaccctagcaaggaggagcgagagacgctagtggaggagtgcaatagggcggaatgcatccagagaggggtgtccccatcacaggcacaggggctgggctccaacctcgtcacggaggtgcgtgtctacaactggtttgccaaccggcgcaaagaagaagccttccggcacaagctggccatggacacgtacagcgggccccccccagggccaggcccgggacctgcgctgcccgctcacagctcccctggcctgcctccacctgccctctcccccagtaaggtccacggtgtgcgctatggacagcctgcgaccagtgagactgcagaagtaccctcaagcagcggcggtcccttagtgacagtgtctacacccctccaccaagtgtcccccacgggcctggagcccagccacagcctgctgagtacagaagccaagctggtctcagcagctgggggccccctcccccctgtcagcaccctgacagcactgcacagcttggagcagacatccccaggcctcaaccagcagccccagaacctcatcatggcctcacttcctggggtcatgaccatcgggcctggtgagcctgcctccctgggtcctacgttcaccaacacaggtgcctccaccctggtcatcggtaagctggtggggatgggtgggcacctgggtgggaggctcatggggcaaccgcagaatccaggagctggaagagccactgggactcattcattcattcattcattcatacaacatgtatttatccagtgcctactctggaccagtcactgtgctacatcagtgatacctgggtgaaccaaacagaccaaaatctcagcaactcaagcagggaggcaggcactaagcataatacatcaattctgtggtacctcagaaggtgaagggtctatgggcaaattacagcagggtaagggagactgatgttttctaagtttttgttttatgaagaaaaattaagcccagaaagcccttatttgcaggtacaattatgcagaagcccagtacataagatagataaggagctgctaggagaggggagcagagaactgaccccatggcctttgcactgctgtggaaccccagggctccagggaaccgcagtttgacaacttttgaacaagtcaccgcctgcctctcccactagcctagacaaagagctaaaggctcagagagggggaatgacttgccagagccacttaaattagtggcaggtcccagtggagggctgtttcctgaccaccctgccccctcctccaaaccacgggctctgggaaggagaggtggtgttgggaggtcttaaacaggggtgggatataactggggggcccagctgattccctccccttccactccaggcctggcctccacgcaggcacagagtgtgccggtcatcaacagcatgggcagcagcctgaccacctgcagcccgtccagttctcccagccgctgcacccctcctaccagcagccgctcatgccacctgtgcagagccatgtgacccagagccccttcatggccaccatggctcagctgcagagcccccacggtgagcaccctgtgccccacacagcaggagatgatgatagaggttggctgtcaatggatgcaggggaaaggggtgcctggcaggcattgcagtctgcatgtgtctctgggacaagtgtttttccgtgattgagggtgtctgcaggccagtgtgttcccatgtgaatgcacgtatctgtgtgtgtgcacgactgcttgtgtgagcagatccctagtgcgtgtctgggtgtgtatcggttgtgcatgcatttgtgtgcatgcctgtgtttctctgaaactcttagggccatatgaatttctaaaatctattcagattttagaaaggtaatctggggccaggcgtggtggctcatgcctgtaatcccagcactttggaaggccgaggtgggcagatcacttgaggtcaggagttcaagaccagcctggccaacacggtgaaaccccgtctctactaaaagtacaaaaattagccaggcgtggagcacgtgcctgtagtcccagctacttgggaggctgaggcagaatcgcttgaacctgggaggcggaggttgcagtgagctgagatttggccactgcactgcactccagcctgggcaacagagtgagtactctgccaaaaaaaaaaaaaaaaaaaa

SEQ ID NO: 60072 - DNA, 315 bp, Homo Sapiens
  misc_feature (82)..(82): n is a, c, g, or t
  misc_feature (155)..(155): n is a, c, g, or t
  misc_feature (239)..(239): n is a, c, g, or t
  misc_feature (267)..(267): n is a, c, g, or t
  misc_feature (287)..(287): n is a, c, g, or t
  misc_feature (294)..(294): n is a, c, g, or t
tttttttttttttttttttttttttttagctttccttgatactttaatccaatgattaaaaatgtgatataaagaaatacgnaacatagactacaagctatcgtaggtctggaacatgagccttatattatattacatattctaatcctacatgnaactatcagtaaacatctttttttaaaacattactacacaaagaattccacaaagcatacattcaaacaagaggcatctaaagnttaaaaaaattacccgctgtatttttgnataaaaataatcaacattcnctaatgnacacaaagccaaaagataaat

SEQ ID NO: 60073 - DNA, 425 bp, Homo Sapiens
ttttttttctattaatattttcatttactttataaaactttgttgattaaattgggggagtctctgacaatctaaagggtaacaaaataacaaatatacatcatttctttataagtcataccacacaaaccaagttaagttttttctatctgattacagagtcaataaatattgcatctgtatttagagcagcaacataaaactttattagaaagaaatactatatctggaccaaaaaactgcaacatggtttggaaatctaatgactaagaaggtaaaactggcaactatgtgcaactactgctcgtagattcgggtttgtttcccccccaacatctttaaaataagcagcccccacaaagggataatccattgaataaggagacaatgtagccaaagaagggaatttgtggaaaaccatatga

SEQ ID NO: 60074 - DNA, 3442 bp, Homo Sapiens
gacgcccacgagttcctcatcgcggccctggacgtgctccaccgacactgcaaaggtgatgacaatgggaagaaggccaacaaccccaaccactgcaactgcatcatagaccagatcttcacaggcgggttgcagtcagacgtcacctgccaagtctgccatggagtctccaccaccatcgaccccttctgggacatcagcttggatctccccggctcttccaccccattctggcccctgagcccagggagcgagggcaacgtggtaaacggggaaagccacgtgtcgggaaccaccacgctcacggactgcctgcgacgattcaccagaccagagcacttgggcagcagcgccaagatcaagtgcagcggttgccatagctaccaggagtccacaaagcagctcactatgaagaaactgcccatagtagcctgttttcatctcaaacgatttgaacactcagccaagctgcggcggaagatcaccacgtatgtgtccttccccctggagctggacatgacccctttcatggcctccagcaaagagagcaggatgaatggacagtaccagcagcccacggacagtctcaacaatgacaacaagtattccctgtttgctgttgttaaccatcaagggaccttggagagtggccactacaccagctttatccggcagcacaaagaccagtggttcaagtgtgacgatgccatcatcaccaaggccagcatcaaggacgtcctggacagcgaagggtacttgctgttctatcacaaacagttcctggaatacgagtagccttatctgcagctggtcagaaaaacaaaggcaatgcattggcaagcctcacaaagtgatcctccctggccacccccctcccccaagcctcccgccgcctccccggcctggtgacaccacctcccatgcagatgtggcccctctgcacctgggacccatcgggtcgggatggaccacacggacggggaggctcctggagctgctttgaagatggatgagatgaggggtgtgctctgggtgggaggagcagcgtacacccgtcaccagaacatctcttgtgtcatgacatgggggtgcaacgggggcctcacagcacagagtgaccgctgcctggcgttccccagcactcggtgtggaaaggcccctacctgctgtaagattatgggtccatgaaagcagtaagctggacacagaggtgtagtgtgcgggacagagggccttgcagatgcctttctgttggtgttttagtgttaaaatacggagagtatggaactcttcacctccattttctcagcggctgtgaagcagcctcctagcttcggaagtacggacactacgtcgcgttttcaagcgtgtctgttctgcaggtaacagcatcaagctgcacgtggaagcatctcgcggttttctagaaacaggcattttcttatccctctcccgctcctttttccacaaaggtgaatttcataaatgtaatactagtaaagtgaatgaattactgagtttatacagaaatttaggtaacttctcctttagtctcaagagcgagtcttgctttttaatgggtgccgtttatgttgctgcccgccctgtgtgcctggctcctctgggtgccttggtgtctgctggtggctggcagtgggcgcagcggaggagagttgtgctgcagctcatacggtgtgtctgtcatctcagtctggagtaaatgcagtgtctgccggtgtctgatgggttctgtccctcgtattttctttgccttctatcccattgcctggctaccgctgcctggcagccaagggtgttggtcgcgaagctggagtggcctctggtggagcctgcatcttgtctcgtctgcctctgctttacatttggtgtactttcgggcgtggtggcagtaaaatgacaccgtgattgagcttgtcagcagagctgaaagagaaagtagaaggatgtgcattgtttcttgtaagatatcttgcatgtatctgtgtattcaaattcaaacagagatggtttgtccatttgtccactgagaaattataaactagggacaagggggaggaaaagtactgaaatacagtttatgaagcaagtgtgtctcgggctgtgcttgtcccaggagccccagcagcatctgaactgaggcttcttcagtcctgcaggaacaggatcatctgtctcagcggtgggcagatgttttcatagacagccagggagtaaacactgttggctctgtgggctgtatggtctctgccataaatagtacagagatgtggctgtgtctagtacaacttttagacacagaaatctgaatgacatatattgttctgtgtcaagaaacttagattttttttttaactatttaaaaacgtgaaacctattcttagctcacaggccatggagaagctggtggggaccagacccagctccttagctggctgggctggggagggggcagtgacagtggcagctgctactcactgctcagtgtggaaaacacaggacttggcaatcacagcccgcagaaccatcatgtgtggcagaagcctgagggatgcggtttcttgcccacgtgctctgttcattttctgttgtttttctgcacttaaagaattcacatggaagcatgttttataaatgaattaccagagaaacagagatgggccgagattctcagaaatggtcccatgtgaccaagttctgctgtttgggtgacagtgctttgaagatctcctttgaggatgtgcagtcttttttttttttttttttttgagatggagtttgttgcccaggctggagtgagtggcacagtctcggctcactgcaacctccacctcctgggttcaagcagttctcgtgccgcagctactcaggaggccgagacatgagaatcgcttgaaccggggaggcagaggttgcagtgagctgagatcacaccatcgcactccagcctgggcaacagagcaagactccatctcaaaaaaaaaaaagaagtactaacttaatacaaaaaaaaaagtacaaaatgctaagaaagagattttatctgatggactctgagatttcatatgaaaatggtggtatctgaactcctttcagtgtagctgctgtaagaattctaatccctagccgggtgcagtggctcacacctgtaatcccagcactttgggatgctgaggcaggtggatcgcctgaggtgaggagttcaaaacaagcctagccaacatagtaaaaccccatctctactaaaaatacaaaaaattagctgggtgtggtggtgggagcctgtaatcccagctactagggaggctgaggcaggagaatcacttgaacccaggaggcagaggttgcagtgagccgaaattgtgccatcgcactccagcctgggcaacaagagcaaaactccgtctcaaaaaaaaaaaaaaag

SEQ ID NO: 60075 - DNA, 618 bp, Homo Sapiens
tttttttttgttaacaatcacactcaattaagggcacaatttttggtctgtagttttggctttccaaatactttccaaatgtcaaagacgtgaattaaaggacaaaaggaggatgataaatgtcttcctcagctgaagcaggaggcactcttttctaacacttattatggctacctccgtgactcacctcctctctgaaaagggtaaaccaggtgtgagctttgtgcccaggggaaggtcgagcaggatggtgtcttatataaatacaaaatgctgcttaaaactatttgtagaatgactactgtacaaagctgttttctttacaaattcaaactaatgcttatttggaacaacgtatctggcacccaaggatagagaataatttggacctatcagttctcaaaggaacctactctgccttctacagccagttccaagatccattaacagatggcttctggcagattccacagaccagagggaaagaggcaatctctaagaatctggatctctgtcatgcataataaaatctttcttttttattgtaagtgcagacagtgaaaggctgaatgcacttcagccaggtctttaaatagatttttattcaacataaacaac

SEQ ID NO: 60076 - DNA, 419 bp, Homo Sapiens
tttttttttttgagacagagtctcactctgtcgcccagtctggagtacaggggcaccatcttggctcactgcatcctctgtcgccagggttcaagcaattctcctgcctcagacccccaggtagctgggaccacaggcacccgccaccgcgcccagctaaccttcgtagtttttagtacagatggggtttcaccattttggccaagctggtctcgaactcccgaacttggggatccacccacttcggcctcccaaaatgctgggattacaggcgtgagccaccacgcccagccgccactagcatgattttaaaaatagtatcaaaaattcagacaatcaaaatgtgatttaggctctgactgaaataaaatttattttattcaacttaatattaaacaatatggactactggtagtttt

SEQ ID NO: 60077 - DNA, 507 bp, Homo Sapiens
  misc_feature (497)..(497): n is a, c, g, or t
  misc_feature (507)..(507): n is a, c, g, or t
aaaacattctttattccatcttttgaaatttggaataagacaaagttttcatgcttaaaaatcacagaatctactgaaggtatgctattattcctcgagtatttatgcaagctgtctgcatgatatcctgacactattctattaattgaacttgaatccgagcatttgtatctatcataggagtgaagtaatttattggccattgataagtggtttggctgcaatgtagaaactacagtatgaagtgttttatgtctgcattgtcttaataataaaaacaagaggtatttatagaaatatctattttcatgacattaatttcatggtaaaattgctccattatttgtgtggcacttctcttccttaaatacatgtccccttctaaatccaaatttcacatttttaaatggggctgagagagaaataactcacacatggaaatgtgcgttgctaagatggggcatttagtggggattatttccaggaataatgacccngggaggcccn

SEQ ID NO: 60078 - DNA, 769 bp, Homo Sapiens
ggggtgtgtcccggcgactccgccaaggcgggcggcgccaaggagcagagggactcggacttcgcggccgagagtaacttccggatctacccctggatgcgaagctcaggaactgaccgcaaacgaggccgccagacctacacccgctaccagaccctggagctggagaacgaatttcactacaatcgctacctgacgcggcggcggcgcatcgagatcgcgcacgcgctctgcctcacggaaagacagatcaagatttggtttcagaaccggcgcatgaagtggaaaaacgagaacaagaccgcggccccggccaccaccggccaagacagggctgaagcagaggaggaagaggaagagtgaccgatggagaaagggcacaggaagagacatgagaagggagacgaagacaagcagctctgggaactgaatcaggaaactcaaatcgaatagggaactaaaaaacaaaacaaaaaacaaaaaaaaacaaaaaaaaaccctatttaaatgaaacgagtttaaaaacattttttaaggagggaggtttggtttttttgtacaatatgaaaaggacattatctacctgttctgtagctttctggaatttacctccccttttctatgttgctattgtaaggtctttgtaaaatcttgcagttttgtaagccctctttaatgctgtctttgtggactgtgggtctggactaaccctgtggttgcctgccctcctgtgcctccgccttcgcagcagcggcaccaaggggcctta

SEQ ID NO: 60079 - DNA, 481 bp, Homo Sapiens
  misc_feature (328)..(328): n is a, c, g, or t
  misc_feature (357)..(357): n is a, c, g, or t
  misc_feature (444)..(444): n is a, c, g, or t
  misc_feature (464)..(464): n is a, c, g, or t
ctgaataacaaattttattgatttccaggtgcttttgaaatacagagaacagtggtaaacaaagaatttgcctccagtaggaactggaaaactaacagtcctaacccctgctaatatcgacttagtcataggacagaggatgggctcaagcttacatctgctctttgaaacacgctaaacaaataatagtttaaatgagacattgctgagtaggaaatggctaaattacaggtaccaatttttaaaaagtgacgtctcaatttagaaaataaacaggaaatagtttctctgttttcaagagaatttcattacatagaagcctcttaangcaaagttccctggtatatttacctagancttcacgtttaaatttgcagcttttttttttttttttgggaacgagtctcgctctgcacccaggctttgagtgcagtggtggatctnggtaactggaccttcacctnccaggttcaagaattct

SEQ ID NO: 60080 - DNA, 1556 bp, Homo Sapiens
cgaggggttgctgcagtttttccgcgatagtttggggcagttccgcgcgttgcaggcccttctgaatttcctggacctacgcattggatcctcaaagaactggtgatcgaattaggggaaaaggggcctcgtcggagagtagaggtttggaggggcaagggccgctgtttgcgttctcgtccgtggcaccttcttgggcttgggtctgtcctcgcttcccgggggcattggtacttggttgggtcgcgtctcacctggtttcagggtttccggggctctgagctcgcccactccgccccctgcaccccacgcgcgtggccacttcttcgcgatataacgttggggtgttaatctccttgggtttcccgttactgttctttaaaatggggactttagggccatcctaatggaatcgttttgggaactggaagaggtaacacaaatgagagccttaaagcagtccctgtcacttggtgactggtggtctcttgttaatttcccacgaaggaccgggtggggtcagagctccagctgcaggggcctcggcccttctccctgatccctgcaggacgctggatgatcccggaagccttctgacctctttttaggagagcgagggttgcgtccactttcatgaagggaaaggagcatttaacttttatgggggacggcgacgcggtcaaggtgtttcacagctttctcgttccccaacccgacctttccagaagagctgcagggagggacttcttggcttctgagggcaaagctctacgtgagtggtccttggctctttgaccgagatgctcaccccaaccgagagtgtataggttgtgtcctcgggcatgggggtcgataataattaagtcttaattagtaacttcattctaagggctttatacaaataaatttacgccacaccgtggctctgtggagaagtattgcttttttctattttaaaaacgaaagtgagacacagagcgcataggcacccgactagtgagaggtggagctggggttggaacctaagcagtctgggtcagagcctgatttgatcttctcttgggatacgttgtcattgaggcagaggaactagttggacttaggtggggaaagcaagacttaggggcttgaaattttctgagtttctaaaaatgttgtcaactattttgtttcaatcattacaaatattttgtattcttatagaaccatgtcattgtacagcattctatttttctttattaagaacaaaatgggcctggcgcggtggcttacgcctgtaatcccagcactttgggaggtccaggcgggcggatcacgaggtcaggagttcgagaccagcctggccaacatggtgaaaccgcatctctactaaaaaataattacaaaaattagctgggcgtggtggtgggcgcctgtaatcccatctactcgggagggtgaggcaggagaatcgtttgaatctgggaggcggaggttgcagtgagcggagatctgccattgcactccagtctgggcgacagtgcgagactccgtctcaaaaaaaaaaaaaaaaaaaa

SEQ ID NO: 60081 - DNA, 513 bp, Homo Sapiens
  misc_feature (8)..(8): n is a, c, g, or t
  misc_feature (446)..(446): n is a, c, g, or t
ctcctagnacattgactatggctccacatcagatgcagggtcggggaggggtagactggtagggcttctgatttcttactgattggtttctaatctctgtgtttaggccacttgattatttgagtatgtgtgtgtatgtggcaaaacaaaagccaaagaagaatgcagattatagaaatctctactatgtgtgcatatggggcaaagcaaaaagccaaagaagaaacagattataataaatctctaggaactgttctctgtctgtttccttcttgtacttattcctcctggtggcaagcctcttctccctctagtaaccaagctggggtgcttcctcttgcccagatttgtgctctgatttcttacagctaattctggtcatctctagaaccagccacttcagcttcctgcacactctagaaatctctttatactttttttttttnttttttccgagatggagtcttgctctgtcgcccaggctggagtgcagtggtgcagtctctgttcact

SEQ ID NO: 60082 - DNA, 533 bp, Homo Sapiens
ttttatattaaaaagctatttattttggtgagttattccaagagttgtatacagctttattttttggaattgcaatattaaagttgcacgttggatttaactctcatgactttagtaatacctacagaggtgagctaatggatggtacatggagtagggactgcagagaccctagttttgtccccactccatcttcaaataattttggtctcttaggtctgtgatacaaaggcataaaacaattcctatcttgaagccttgagaaaagctgttacatatacgcagatagtagcaagacagaaaatgcaaatatgtaaatgtcttctgatatcttgaaataaagataaatttcagttaaacttgtataagttcagatttctgttaatgagaaattacaaccctacaaggtaaggtctttacattttagttattaagcagaatcaatgcttaaaactatagttaatacttagtggaaagaaaatttaatccatgtatcaggataatatattagactgtcatgcattaattttttc

SEQ ID NO: 60083 - DNA, 358 bp, Homo Sapiens
ttttttttttttttttttttttttgcgaggacaagtccaggaagcgtgtttaattggcgtgacatggacgacatacagcaggagcttggggaggctggggcatgctacacggcccctgtccacccctgggcctcgcctgaccctggccccagagacacacaccggcagttcaagacaggacggcaccccaaaaagagactcaaagggggctggggaggcaagcaggaaaggaaataaccacaaccagaagacattgccttttgtttgtttgtttttgcaagcattataccaatttctcccccaagtggcaggctccgggtgggaggcagcagcagtccaaaccgctactcttgggcac

SEQ ID NO: 60084 - DNA, 442 bp, Homo Sapiens
ttccttatctaggaaaccctgatatttacactatctcaatttaagtttgaacaagtaactgattaatctctgacaaaacatactgaagttagacgagtttgggtaaaatccgttaaggtcatggttggttttaatcacatagctcaatttaaaagctgaacactaaaacatctttgctttcaaagagtgcttgttagacagcaagttttgttttgcgtaacttgaattctgctacttccttttatttttttctgaaataacagtgattgagtcaatgaagtggcaatacgaattaaagggcaactcacctgcctttgaagggacagatcccaaagggcccagattaaattttaaccacgattatgtttgccaggattttatatctcaaatgattatgtttggcttttgtaataataaaaggttattttgggaaaagaattcc

SEQ ID NO: 60085 - DNA, 457 bp, Homo Sapiens
  misc_feature (400)..(400): n is a, c, g, or t
  misc_feature (443)..(443): n is a, c, g, or t
tttttttttttttttttgggtagagactgggttttggtctctaacttttgggctcaagtgatccgcctgcctcagccttccaaagtgttaagattacaggtgtgagccactgtgtctggccccggtcactatctttaatgaagaggcagatttaacaaacagactagaaggaccaaagtatacatcttacaccagcagctctcagcaatgccggtacaaaaggatgtgatcacttcctgatgttaaccaaacccaaatcaaaatgactcaagttccattctaggagccagtaggacatgacattcctgcacttcagaccccctgggttgttgtgccctcaatttaagacaggcatttttccaaggctcattgacaagctctctctcctgatgatgtcggnccctctccagctggccttactctgctttgagggatctgggtangcagcgctggccag

SEQ ID NO: 60086 - DNA, 480 bp, Homo Sapiens
gctagtcttctagtccttaaactgatctgatgacttggaacataggatttcactgcaagtctggctttttagtctggaaatacatttgaggtctgttttcgcacagctggatcacctgtttcctggttttattacacaattcagaaggctagaagaggagtttgggggcttggcacctgaaaatttagaccgcattcttattaagtaaaggaagaggtagggaggccgaggcgggcggatcatgaaatcaggagatccagaccgtcctggctaacacagaaaccccgtctctactaaaaatacaaaaattagctgggcatggtgacatgtgcctgtagtccatcccagctactcgggaggccgaggcaacgagaatcacctaaacctggaaggcggaggttgcagtgagccgagatcacaccactgcacttcaggctgggcagcagagcgagactccatctcaaaaaaacaaaaaaaaaa

SEQ ID NO: 60087 - DNA, 573 bp, Homo Sapiens
tttttttttttttttttaacttagcctccccctaagcaatcgcgtgtgaaatcaaggggctgaggcatgacactcagctttctaaagttcacaaaagctaactcaggactattttttaaagtttactcacgtaagacctgaaatcatcccatatatcactgacgctgaatgtacacactttgggaaacactgcattcactcgtagttaatcctcacaacagctttaagatgaaagtactatgatcattccatttgacagaaagaggaaatcgaggctcagaggggttaagtgacttgtcaaaaatcacacagccaggaagcgtcagagcaagaatttgaatctgggtctgacaccaaagccagcgctcttaaccatcatgtcagcatttcccaaagtatgttccaaagaacactattccgagcagacttgcctgcctgaaaaaacgttctcaccagcaaacacaactgggaaacagcacagcctggattcccctgcatgggaatgtgtaacgggctcaaataagtcctgcagtcatctctttccatttgtttttcccaaacttttcagtctca

SEQ ID NO: 60088 - DNA, 447 bp, Homo Sapiens
  misc_feature (408)..(408): n is a, c, g, or t
tttgattgaaaaaaatatgaaatttaattttagacatggcaagttcaattacatcacttcatatcacagtagaaaatataatttgttctaccatgggaaatagtataatggaatagatcacaatagtagtataataaaatagaatatccaagtgcaaaaacaattttcaagtaagtacacacactgtttgaaggtactttattaagatcaaagatttttcattacatttatttataaatccttcctagtcaaaataaaataataaaaatctgtatctttagaaagaacatagttttgtaagtctgagaaggttatgtttgtcagtttcaaattattacagtttagatacattcaatcattacacaataccaggaaggtcagccttaaagataccaagaacttccatanttgtcagtaaaataagggtaaaaaattaaattttacttt

SEQ ID NO: 60089 - DNA, 392 bp, Homo Sapiens
tttgcaggtgactacgcatcatggtaagttttataccctagtcaaaatgaaaaatagcaaaaaccgcactgtaaaaaaaaaaaaaaaattggtttcctttagtagatagtatttcaacccatcatattcttattataaataaacagaacaatcttaagttgacagatatcaaagagaccttgatctgattttggtgccaagtgaggtcttaattcctcattcctgccttaagtgcttggtgtcatacagtgggtggtacaaagctgttttatgcctaatattgctaaatgggacccttctaattgatttgaaagacattataacatattgtccagactttaagacttaaagagtaggaaatactacttttagtggctaaatttattcatttt

SEQ ID NO: 60090 - DNA, 325 bp, Homo Sapiens
ccatcttctgtttctgcatctataggagacagagtcaccatcacttgtcgggcgagtcagggtgttagcaggtggttagcctggtatcaacagaaaccagggaaagcccctaaactcctgatctatgctgcaagcagtttgcaaagtggggtcccatcaaggttcagcggcagtggatctgggacagatttcactctctctatcagcagcctgcagcctgaagatttcgcaacttacttttgtcaacagactaacagtttcccgctcactttcggcggagggaccaaggtggagatcaaacgaactgtgggcccaccatctgtaa

SEQ ID NO: 60091 - DNA, 465 bp, Homo Sapiens
  misc_feature (25)..(25): n is a, c, g, or t
  misc_feature (348)..(348): n is a, c, g, or t
  misc_feature (376)..(376): n is a, c, g, or t
  misc_feature (391)..(391): n is a, c, g, or t
  misc_feature (425)..(425): n is a, c, g, or t
  misc_feature (442)..(442): n is a, c, g, or t
  misc_feature (448)..(448): n is a, c, g, or t
gtcagctgagtctgaagagaacacngaaactaagccttactcaattgatagaccactatgggttagatgataaattactacactataacagaagtgaagaagaatttatagatgtttaattcctgatttttgctccagaatatctttgagaatgacaacttaattaaaagatacttaggcacttttttttttttttgagactgagtttcgctcttgtcatcctggctggagtgtgatggtgcgatcttgactcactgcaacctctgcctctcgggttccagcaattctcctgcctcagcctcccgagtagctgagattacagggcgcccgccaccatggcccgggctnaatttttggcattttttagttagagaantggggttttcaccangttgggtccaggctggtcttcggaactcctggancttcaggtggattccancggctnaggcttccccaaaattt

SEQ ID NO: 60092 - DNA, 2120 bp, Homo Sapiens
gggggaagccatagtcggcgagcaacgctggagcatcccgctctggtgccgctgcagccggcagagatggttgagctcatgttcccgctgttgctcctccttctgcccttccttctgtatatggctgcgccccaaatcaggtctgtgcaaatgtattgccttctcttgagaattcttgttgcggggcgggagggaaacatagaatccccaccaaagctttcttggaaaactcccctgggggggctccaagatggcggagcccagagttcggtgggttggaggcgaggtccagctgtcctgggtgccaggaggacacccgagaccccaggcggtgagaaagggcggcagtccggggcgcactgcttttccctggcctgtttttcttttgtctaagcaccccctgattctggctccagggaatcccgagggtaaggctacctcaaacgcttgagtttcggactcttcaatgggatatggcccgacgctgttttccccttattccccacgccttaaaccagccttcgaggtacaaaggagcgattccacatttcgccctctgaaactgatagcaatcgtaacatctgcggccccatccttgctctctcgttgctgttacaatcgcttgttctgtgggcggatgttgtaaaggagaaaagtgaaaaggaagagtgtttggttatgagctctatcctgccttgcgagcaggagcacgggggatctgagttaggagctagggtactggggcggtgagggctgggagaatggtgggaaggtattgaccaggtgatagatcaatcagcccaaggctggccaagtgccccagtgaatcagcagcgggctgtaaaaccggcagcctgcttattggttctaagtaaatcaccagtggtgacggaccagtgactgaatagacagacacactccttccccaggtgggcggtcttagtcccaatagaacttgaagccaggccagatcacagtcatttcttaccacagtcacctactttccttcttttatttttattttctcttccttctctggtgcccctcttccagttatattttttctgccttctgaacactcagttctcccacctctaggcacacatggtttctcacactcagatgaaaacactgctttttatctttttttcactacaagatcctcttatccacatagaatctcaatgaaaagttgaaccagaactgaaaatagtgctcataccccagagggatttttctggaaaaaaaaaaatatatgtgtgtatatatatatatatatgtgtgtgtgtgtatatatatatatgtgtgtgtgtatgtatatatatatatatattccaggagctgtattcccaactcagcagggttatgggagtcgggccagagctggacttttatagttgtctctttcattcctgctggttaaggagaagaaagaactaagtacaggtcctactaagttgtcactcctggagctacatacagtaaggggatgtgggaaacagcctagaggcttgttttctgaggagggaggtgatggtttgtggggaccatgagttaatctgcctccctgtcagcattttcgcactatgcaggtagcttcaatggctaagagtatgtaccttgcaattccaagttcaatgaaaaaggctgaaatgctctttaagaatgcatctcctggtcaacagattgttttaaccagagtcccaacattgccaagaagagaataggccagtctgagaaccaccaatctgtgtttgtgcattcattcatttggaaaaggcaatatagtatagtacttagaaacaagcactctaggctgggcttggtgactcacacctgtaatcccagcactttgggaggctgaggtgggcggatcacctgaggtcaggagttcgagaccatcctggccagcgtggtgaaaccctgtctctactaaaaatacaaaaattagctgggcgtggtggcgcatgggtgagggggtgagggatgagaatcgcttgaacctgggagatgggggttgcagtggaggtggaggttgcagtgagccgagatcacaccattgcactccagcctgggcaacaagagcaaaactctgtctcaaaaaaaaaaaaaaaaaaaac

SEQ ID NO: 60093 - DNA, 115295 bp, Homo Sapiens
gatcatagattctgtaatctaagatcatcgttcagattctcagggaaagatggcagatggaacatacacctttatttctgttcgctcctaaaacccacaaaaatgaacataaagaaatgcaggaaacataggaacgagggaaactagaaggtaaaatagcaagaaaatttggggagctgaaaaaaatatataagtaagtgggaaatgacttagaagtgagaaaacagaacctttcatcagagttgaggaaggcagaagtcaagtcttatttacacaacagtattgccaagatggctgagaaagtggaggtggtttaggggagtccgattaagaagaaatggtagaaagttgtttaagaagcaatgaggaacccagatccccttgccactttctgcagatgagcgaccttgacccaccttggcagacaactgggaatgaatgccttagagaggttgcaaagaaggctgggtttctgtgtgtggtagggaaggggtgggcaataggtataggtgaggatggtgacaatgtcctgaaaaccatgggattatgtgaagaacatgtaccagaagctgagaaacactccagccctcttctcctatttggattccagaaagttggcagccagatcttcttcctccagacaagagatggggtgagtcttccctggggatcctgagcagcccaagagagaaggctgaatgatattgacaaggcacttcctcaagcaaatggccaaggagtcaccctcctgtgaaactcccagggcaccagccccactgtgggctcacagcatccaattatcattagaattttgttacccaggcctgagaaaaagctctcaagtgaaagagaagaaagaaactaaacagagaatagtgaaggcaactgggaagaaacagagaccacctaaggaaccataaataaaaacagaaaactttttctccaagggctgtttccaaaacagagggaggcagagagagaatgagaacaacagagaaatgggagagaaaaaaaaagaaaaagacaactgatccaggaggtgaatgcttgaataaaaggagttctagaaagacagaacatagaaaacagagaggggaaaatcatgcatgaactaattcaagaaattttcctgtgaatttctagatcgaaaaggccactcactgtgcggagcaaagggatggaaatagacacactccaaggctcatccctgtgacattccaggacaccgagaacaaaaagaaaacgctgataaagtgaagacaacagatcacatattgccatagttatcataattgctcctgacttttcaacaacaacaggagcaagaaggtaacatagcaatgccttcaaaatcctgaggacaaattgtttccaactcagaattttttatatctgtcaaactgtcatggtaaaacaggcatttttaaatataaaagttgtcaaaatgtattttccattccccctttctcccgtagttactcaaggatgggttccaccagtacaaaggagtaaacaaagatccaagaatcaagaaaacgttgtagaggagacaaagagaagccccagaaacatgaggaagagacagctgtgtaccaactggtggaggcagtgcatccatacagggcaaaaaaaggctgcaggcatgactttttaggaagatgctcaacaaaatacttgctgagaaaaaaaaaaacaaaacttagaaatgctggttccaaaacatgtgcttttgtttgtttgttttttcttgttctgacttttaattcattacaccactgctctccaagaaaaggctatcaattattcccttccaacaatgcataagaatgactttttccctacttctccaggacagaatataattatcatttattttaatcttttttgaactgttaaaaagataaactgaggcacagtaaaattttaaagagttttggtgcgttttttttagcatgaacaatttatgaactgagcagctccgaaccagaaatagtttgggagctccactgaggaacacaaagaggagacttttataagacagacacagaagtaaagcaaagtatttaattggttactgttatacaattgctttttttggtctctcaacttggaaagcccctcgttatctaagtttgtataaatagtaacttctgattggttgagcttaagttctgcttttaaaaatatatatatagatatagatatatataggcattcacaagaaatagctcaagttaagtttggttatgtttgcaaatcaagcaaggtttaggtcacttacaaatcataacttcttttgtcccctctgggattcttcaggtctggtctccattttaatttactttaacaatcccaccgcgttgggtcaccctctcagcaagctaagaagaaggtggtagcattcctctcagttaccactagtgaaatagtcactggaacaaagagtcatgtaatcttatcctcaacagttgtattgggatataagattacatggcatcattacctgcatcatgggcttcagtggtagggttgttgagttcttcaagtcaattaatgatgatggcaatcatttgatgtgtgagtgccttctggaaagctttgaaatccttgagaggataagatatagtaggatggtaaacaaaatgactacagagagaataatagccaaggatttttaaattccctggagcacagattcccaggagccaatatttcaccaataaaataaatcagtggaggaggcaacacctgtctgataaaagacatatttgttccttaagatcctttaaattgggctcaacaatttctaatttattaatatagaaacaatatttttttttacaaataagagcctccttgttaagttgctaaggtatcaaggacttctattttggagtactattgaggttaaattgtttatttcagatagtattgcttgaagggaattcaaggtagcattctataaaaacaaaagaaaaaaaaaaggttaacattaggaacaaattatgatcttagtctttaagtccagagagcagcctgtcaagatttctaaatttgagtttgaagcatttttagatgatggaatgaggatggcaattgcaacctgatggattttcctggcttgcagtttgaatgtctctggaaatatcatcaggtgttccagtgaattctccaagtgacccacacagcagcagcatgaaaattttccatacatggtctgttgtagtaatttttctgaatttaaagtcatccaatttcagctggcagggcttcggaaaaaagcagttttagtttctagtgaaactagaaaatgttaggattcaatccaatttacaaggacataacaaagaccagaatttgatgatgggtgctatagttttctattgaaatacaatcttttttatggtcattccaaatttttccaaaaataatcatggttaactcttctttttgtgcaaaatcagtagtctcattaaacttgatctgattatttacataagtgcaacaagaaaagtgattctatgtatgcatatttttaaaatacatcattttgtcaaagttttgataatatccaaggggctttattgactttgtataagtcaatcttagttatttgttcattttattgtttgttttactatttgttaacaaggaatctcagattagacctttaaaaacctctctaggctaggaggccaagttaaggacttacccaattatgtcttgttataagaacagattcttattgaacctatgcaaatacctatattgccatgaaaataagaatattcaataagtgcttccaaattatggggtgatcaggtagggaggaaaaaaacgttttctttttgtttacaaaagtatattttatcaaattgttttaagttatagaaaaaagttttcctaaatctagaaagcaagacattaaagaaccagcaatgtttcaaacgaaaagttataaaaattataattattctcatcagttaatttagtctcacataattaatttttgttttgcttgatcttgggttagcagatttataaatacattacttttccattagaggtctggaaattcttacctagccttatagtatgagcttaaaattatcagaaacctgtactcatcagcctttatcatgaatctcttacaattctgtgtcatgcaactgacaagggagtttggttgctttggtaacatacgacattttaacataataattaaaattatggatgataacattatactagtacatatcagatttctaggaatttgacataatttctggaacactcatcaataacaaacataacttaaagaaggtttagcatcacccattatttgacattgcttctcatgcaatttaacatatcaaataagcctcactagtttaacatgtctgtttttacaagaagagaagataaattcttttgagatattccagggacccttttggacactcccaaagttggtttgaggtcaaaaagacctatatggcatggccagttctaggggtaaggttgtgtccatgccagtgtgtggcatatggcgatgttcagctagcatgagtctgaattaattaccacacataggagccagagtaaagtgttcccaggccatctacccccaaccaatgtccccacttattactgcaacctcttacatcttctataacatgctccaaaaagtacgcacaacagtaatcccccaaatgccaaataccacattatttcacgttgaacagtcttgttagtgcatgagttcgtgtgcagcacacgtggtattgtacacaaattatatttcccttctacactgtaatgaacatggagtgtgatgtaaataaccatggaatactgagttaaagctagaattttatctaaattagacctgagtttgtcgtgcccccaggtgcctgacagaactaaacagtgagaaccccagaaccctttccaatggggaacgtcagaggcaccacagccacggaccctccactctctcctgcactcattgcaccttgactgtcttccttggtgcttgcagacgtttgtcatagtggatttttttaatcagatcgtgaattttgggcaaactttctacagttcgtgggagtaaatgtttgaatggtttgagttcagaccgtgagacagatctgcattttccattctgaagaggttacacatgagctagcagatgggatcgaatttcaattatacggaaacaaggtagaaaagaagggacctcaggcaaacgagtaaaagcaagtttgcaacttagagtttacagtggctggtcacaggagtatctgaccctggaattcccaaacttctccgcaccttagaattacctgaggaatatttttaaaatgccaaagcccaggccacacccggaccaattaaattaggcgcactggggtggaatccggcatctgcatttctgaagctccctagatgatcccagcatgcagaggagtctgagaatgactagtctaatttcatttccacaatatgcttgtgaagcggtcgccactatcccctgtgattcccttaaggttccccccagtgaatttgtggcatcaggagcccagcccagcactccttccactgcacgtgccgctgtcctggaggacaggaagcagagccagggtgctgcgtacgtggctcttcagagggctcttcagtgtgcctccaagggcgcacagccgagttgagccgtctgattacgctccggggtgatggacaggctgcccctgccccctgctggccagaggctgctattgcagccagcgtgcacacgcgtgcgcgcatcttcagccacctgcagtttctctgattcttccctggtctcctctctgcagtgtcgccagaacaccttcgcacactctattctttgtggcccttctgactttctctttgccgtgtgacaggggagtcctccctaaccagcagacagtgaaggtggagtccacgtttctcggcctccacgcatagcgagtctcagaccccgcaaggctgcagacagtgctgtgtaagtgggccttcagtcctgtggggagcccaggttgaatccccaggaatagaagctccagaggaaggtccccaatcagtccgtggtccccaatcctgagaagggttgccttttctgggaggagcctgggtctcatcgctatgcgggaacagggctctgggaggtgtccaggaaatgtgagaccggaagtcgccgtcagggaacggagtagtctgtggccctgttagaggaaacagccctggggggtccccaattgcttctagaatctattctgtttactcttctagggaatacctgtaacttctttccttggaaccaagatttagcacatgagaagaatctggaagaagctgagcccacaagggtcccaggagggcattctacctgcccactgaccgtctcagcatgctacaccctcgagggaactcaggttccctgtctgtaaaatgcagattctctcctatgaaatctctgaggtgaatagctctggataaacttcagtggccttcttttagatgttttttgtttttgttttttgtgggttttttttccccttgggtcttcctgcctggggccctctgccctgggtctcctgcagaggttcccaccagctcaggaaaacactcaagggtgagtgtctcagagctcaataggcctgagttcctttcccaatacctcctaccactccctggacatacacactagcacatacatgcacacatgtgtgtgcaatcaagctaatcagagtggggccttgattgagtcagagctctttgcactcctccacatgtcctctacagtgtagcactaattctgtgtcctccggggtcagggccaggtgcagcaggtgcaacccacattgcaggtgaaacctgtgagtgaaggagcctggtgggggctcttgctgtcatctaggtggaaggagatgaagatcaggcagaggaggccgaaaaagatctggagggtttggtgacaaaggaaaagatctggagggtctgtgacaatggatttgaaagttctttgtcactttcaagttctacacaaatttgggacagacatcatatgattctagcaccattgtctcagatttcatagctgtcaaaattttacaatattctacaagaagcaaataaaattaccttgcatctttaagtttagaatttttctttatattttttttccattttgatcattgttaggtttgagccccagccgaggtccaagggagcaggtggacaggagggcagggagctggaagaatactcaagagacagcaggtagatgagacatggctttattcagcagctcactcacactgtcggtgctgcatttatgcacctcacaaacaatagtggctccaagccaggcgatgagcctctccatgttatggctacatagctgtgtttacattatacaccagactgtgtgcctgtgctacagtcccgctgagtcatgcgggatgtttacctcagcctatgcctatgtggctgcagctcagccatgttccttacaatcatcataagggtttaaagcattgtttggggaaacccaggcaatctttttttttttttttagacaaaatctcactctgtcacccaggctagagtgcagtggtacaatctcagctcactgcaacctctgccttgtgggttcaagtgattctcccgcctcagcctcccaagtagctgggattacaggcatgcaccaccatgcccagctaatttttgtatttttagtagagacggggtttcaccatgttgatcaggctggtctcgaacctctgacctctggtgatccacccgcctcggcctcccaaagtgctgggattacaggtgtgagccactgcgcccagccccaggtaatcattttttgagctgaacttgccctttactttgactctgcaagtgtgctacacttgtagctccttggcaatgaggttgtgaaaacaagtccaacacacacaggataaggatccatcattcttgcatatttagcttaataccaggtgaggctctccactcctctctcatgctcatttccctctccaggctgccatctgctaaggtatgcggtcccctctaggcccaggtcacggagcccgtgcttcacctgctggtgtctcccctcacccagcctccagaccccaccaggccagccgtgactgtcaccacctgatcatcttcactcttagacacaagaaaaaacttccaggttttgcatttcaggagttatgactttgggatctctatcccttgcttaagaaacccatgaatttattttttataatttttaccatgccagtgtgggtgggagagtaaaattccccacctcccaaggacatgtttcaggaaataaggaaacgataccagctattatcagatcctgacatttcactggggccctggcctgatcttggggacaggagacaggtgcacaccagcccaggccttaagtccactcttcttacttcattcaactcctctctttcttctcctccagctcagagaatctttatttggtctagggtgttgagggtaagactagaagagctgtttcggttcgcacacatatgggaaaatttctactcaatgtgttgagctacaatttacttaaatacatatatccatatatcaatcatcattatcaagatacagaatgtttgcattacaccaggaagttctttcacatgcctttacaattaatacacttctcccaaatgtctttcaacacgtgaacagataaacagatagcagcacatcacacgatggtatattactcagcagtaaaaaggaatggtctatgatacaccaacaacatgaattaatctccaaaaccttagaccaagcaaaagatgacacatataaaataatctgcactgtatgattccatgtatatgaaaatttgttacaggcaaagatcttctccagtgttttcgtttgtttgttttgttttgttttgtgtttgtgtgtttgtttgttttgagacgctgtctcgcacagtcgcccaggctggagtgcaatggcgcagctcactgcaacctctgcctcccgggctcatatgatactcttgcctcagcctcctgagtagctgggattacaggcgcacaccaccacaccgggctaattttttgtatttttagtagagatggggtttcactatgttggccaggctggtcttgaacttctgacctcatgatccgcccgcctcagcctctcaaagtgctgggattacaggcttgagccaccatgctcggccatccagtgtttttatctaaaagttttctagtttgaactttcacatttatgactataattcatttagaattaagttttctgtatggataactagttgtcctagcaccacttgttgaaaacactttgcttttgtccgttgaattgctttggtggctttgttaaaaatcagttgcccgtatatgtgtgggtctatttctggactatctaatctgttctatttatttaactgtctgtccttactacagtagcacactgtcttcattactgtaattttatagtaagtcctgaaatcagaggtgagttatccagctttgtacttctttttcccattgttttggctactctgtgccctgtgcatgtaagtttcagagtcctcttgtcaatttcaacaaaaatgcctactaggtttgtgtctgtgacgtaacctagtattgagtttatacatcagtttgacaagaattaacatcttaacaatattgagtctcctagttcaggaacatggtatttctctccatttatttagattttctttaatttatcttatcttcctggtgtaatgcaaacattctatatcttgataatgatgattgatacgtggatatatgtatttaagtaaattgtagctcaaaattaagtagaaattttcttatatgtgtgtgaaccgacagaaacagctcttctagtcttacccttaacaccctagactaaataaagattttaatttaatttatctcatcaatattttatagttttgaatgtataggtcttgcacatattttgttaaattcatccctaagcatttaatggtttaggatgttgttttaggtgtcattttaaaagttttcatttgtctatggtacactgcaattatatagatagtccatttgagttttctatattgaccttgtaccctgaaacactgctaaatttcagtattggctgttatagctttttgtgtagatcgcttaggatttaatgtgtatacaatcatgttgtctatgaataaagacaatgttccttcttctttacaatatgtatgccctttgtttccctttattgccttatcaagtaattaaatctccagaacaatattaaagaaaagtgctgagagagatagccctgccttttctcctaacttagatggaaatgatggggtctttcatcataaaaggtaactctgactataggtattttgcagataccctttattaggaaaaggaagttcctttattttcctagtttgcttatagttctaatttttctaatgttttcctacattttttgatatgaccttatattttgttttctttttaatatcatgaattacactgattgatttttcaaatgttaatccaacctggagttcctgggataaaccccatctggccatgtgtattaccttttttatatactgctaaattcagtacacgaatactgtgttcaggatgttcatgagggacattggtctatcattttcctttcttctaattccttttcctgccttttgtatcaggctgatttgagccttataaaatgaattgagatatgtttctagttttcttaaagagtttaagttcaatattagctttttcttaaatatttatggcattttgtcttgctaaagactatatttctcttgaagttggaggccaagatgacttcactggtaaattctatcaaatatttctatgtctgaaatggttatttttgttataatggattatcgtttattcgaaatgtttaacttaaaattgactatcacattactctatttctgcatagggtttacttttattataagtttattaggttttctttacctgcttattaattttctgtctcctgtctgccttctccatcctaccaaacacccttctctgaatatgaatataagctccaagagtgaaggaaacgtgcccgagctctccatctattccctgtgtctggaatggcagactcaataagcatttgttgaatgaattgtaggaatgaatgaagaaactccttttgttctcttggttttcagctaatatgcttgagttttcggaagctggaagaaacaaggcatggattctcctctagaaccatggggactgtgcagccctgccaacaccttgatcacagacttctggcctccaggctatgataggataaacttctgctaaggcacccagtttgtgatcatttgtcacagtagacttggaaaacgaatacaccaactaattaatatttcgattattatgtaattatagaaatatattaattcataggttttctcatatactttatttttgtaatttccactagtttttcattcctaaaaatatatagatgcattccttttacaaatatttttctagcagcatatttattaattacatttgatttacattttttcacctttctggatggacattcttactcttcagtatttgttcatgttatatattttatacgtgcacatactaaaatataaatatgttcttgtaaaatatttaacattttatgcatgttttaatttatgctaattacattgatataaatttattaatttatattacaactaaatacatacatatcataaatgaaaattattagaaataataggagagattgttaatttagatatatataagattcatacacaaaaattagttgcatacatatgaacaaacaacaagcaattacaaaatattatttgataaagacaccacttttggtcaccttttaaaccagaatgcaataattatttaaactttggacttgtcccagtacttactaccaccatttgtcggccctttaaaaaaatgtaactaccagtggattgaagtaaatattcaaattatttctttccaagaaggacattagtttctatcatgtgtaacaccatctggttgtcttcacagaggaaggataatagtgagacttaagagccttggatgatgctgctccttgttctctgtagaaattgatttgttgtcttctgatgtttggtgttgcagcagaaagctctgaagccaatgagacttaaaggaaataactttcttttctctcctgtcctgcacatggtaggatttgtcctagataaatgtggcgggtattgctatcgcagaacatctgtttcccctttatctctggacaaacagaagacttgtgcttttcagctccttgatgatctgcttggctaataaaatatgagtggaagtgacagtcgcacttccaggggaacaatttaaggaccagtgctcaaatttccagcactctcttccccttccgtgacaatcaggcaagcaggcattgatgtgcaagtccataaaagcaatgcacctcaaatcctgagccaacccacagaggacaggacctctaccctagagagtcatccagtcatgtggtgggcttcccaggactcagggaaaaactttatgtgaactcactgaatggggattgtttattattcagatggcctgtgctggaagacacaatttgcatctcaaattagtaagagcttcacatatgtcatccttcatttcagaaaatcttccttccattaagcctatatttgttgcttgtgtttacattcttccggccactccttcagaaacacccttacatataggctgcctctccattctttatcatcttacctctctagggtcagcaaactttttctgtaaagggcaaaacagtgaatacgtcatcgcctctgccactgtggcatggcgcctttcacagagtacacggaatgaagaagcatgtctacaataaaactttatttacaaaatcagatgtcaggctggatttggctccagggctatagtttaccgaaccctgctgtaaaaggaggaaatcaacaaagagagcgttagatatgggatcaggagagagcactttcaacacgggataaaagctatgggagttatcaaggagatggcgaaggggtatctcagaaagggatatttcagctgtgctgaaagcatagaggaaaattagtccagattgcggcgggaagacattagaccacatggggctgtgctggaggaataaaaccagtcaagaactgatatgtatgaatatgttgacacaaaatttacattgttgatgtagagtttggaaaggaatgaatgatggcacataaaatataaagcaaattttataaataaggcaattaataatttcacagaaataaaaagtagtatcaaaaagaaaatgtaatcataataaaccacatgactagggctaagaaaaatatttacattgtcatgaaatataaaatctaagtattaattgtactggtaaatgtatctgactgcattgggaggctaaaggtagggggaaaggcacaggtgtgagtggcatgaaagaggaacaagcctcacctcccgtattatgtgtctaatggagaatagctaaagctgtaaaacaaacaagtatcaacataaggatacaaatgaaaaatactttaaattgcctccaagaaaagggaattgggatgtagtgttgaagcatagaactgctgcatttttgttagtatgcacttacagcatacaatttttgaagatgtgtatctgcattattttgatgagatgttaatacttgaaagaatactgcaacgatggccaatatacacttttttaattcctagattagaatttcttagtcagagctgatttcttttctaaaatgggttttgattcatctcgccacactgtctttcagaaaggtggtgtcaattgcttttacccagcagaataagcaatcaccttttccctaaaatctcccaactctggttatcatcatttatttcaacttttgtcaatctgatgagaagagtggttttgcacttattttaataatatccgttttgaatacaatttaacattttcattaatatttcttctacagaaaagtgcctgttcctagactcatcccctttttcaattgaaatgttcattttctcttattgtttaaaggacttgcttgtctttatatgaaatttaataaccctttatatgtcaaatagggagaaaacattcacagttgtgatttgtttttaaatttcacttattgtattattctataacatccaagttttagtttgcatgtagtatgatctattatttttccctgtatagtttgtggcattgggatcataaagagaaagctctattccaccaaaaaattagataaattttacttttcttttctttcagatcttctgtgtactgctattttatgtatacatatgtataatcaaaagtcaagcaaacttgattttgtgggtgttgattattaatgacagacattaattggggagatagcatataaaaggcacttctataaatattgtgaagtgtttactcatttattcccagaacaattatattaggggttcactaatacccattcaagaaagaaggaaactgagacttttagaggtttagcagtttgcttaaaaatgtcagagccccaaagaggcagagcaggaacccaaacagtgtgtgtatctcaagagtccaaggtctttacaacactagtttgtgagttagatgccttgaaatctacaactcagggtgtgcacgtgtggggctgatattccactaaagaacagaccgtcctcttctgctgtgaggacaatttcaggaaccagaagaaatacgagtctgacatgtcccacttgctgcctagatcttatttttcaattgtcgagacccctttaaggataaatcacattaaagatattgtagttctcttaatagatctatacagtgctgaaacaaatatttttacaataaaaataagctagaattcttttacttttagcaatagtaactcatgtctattacgcaccaagcttttacatacaatatctcgtgtgatgctcacaaggattctgtgggacagatgctgtgtctccatattgcaaatgatgggattgagattcacttcagcctgcgtcctaggtgcactcctaatggctctgggtagatgggctggatgaattggcctaagatgaatgtaccttgccacacaggcactggtctgccctggagtccccatgacaaatgcttggaggcagcccctaccttggatcccacaaacagcaatgacaagggccgctggaaagcacaggatgcgtctgaaggcagctggacaagcccagactcaggtcagtggccctagagggtcttggggaaatgtccccaggggctgaacagagcctggcaatgacccttctgctccactgtgggaccctttctgcagacttgcctgcagccccaggaccttggctgtgccagaacccaacagactgttgatcactcctttactagctcccctagcagtcttcagcagctcttctcctgcccacattgcctagtggcaagtttgtttaattaccctctctgcaggctcatctcctgtatattgtgttctcacttattcccttacactttcatttccaagtgtattgcctcagagtctttcggagaagccccttaccttaggcacaggaaagccatggttcatgacctgtcctggggccaccacccacatgccccaccaatgttggccccaggatccaaagtcactgggtcctctgctttgcccatttttttcattccacctccctttttggccaggcacagtggctcacgcctgtaatctcagcactttgggaggccaagtgggcagatcacttgaagtcaggagttcaagaccagtctggccaacatggtgaaaccccgtctctaccaaaaatacaaaaattagccaggtgtggtggcgggcgcctctaatcccagcttctcaggaggctgaagcaggagaatcatttgaacccaggaggcggaggttgcggtgaaccgagatcgtgtcactgaactcccacctgggcaacagagcgagactccatctcaaaaaataaaaataaaacgctttttaatacaatattttaaatattatattcattacacaatcaacatatatatgtatatatatataaagactttttattaaaaacaaacattgcagatgttggtcgaagtgtacaaagtttcagttagacaggatgaataagttctggagatctattatacagcgtggtgactacagttaataataatatattgtgtacttgtaaagtactaagagagggccaggcacggtggctcacacctgtaatcccagcactttgggaggctgaggcgggcggatcatgaggtcaggagatcgagaccctcccggctaacacagtgaaaccccgtttctactaaaaatacaaaaacaaaactgctaaaaatacaaaaacaaaattagccaggcatggtggcaggccctgtagtccaagctactcaggaggctgaggcgggagaatggtgtgaacccgggaggcagagcttgcagtgagctgagatcacgccactgcactccagcctgagcgacagagcgagactccgtctcaaaaaaaaaaaaaaaggactaagagagtagatcttaaatgtttacaccacaaaaaaagataagtatgtgaggtgatggatatgttaaatcagcgtgatttaatcattccaccatgtatacatatatccaagcatcttgtaatacactaaaaatatacaatttttattggtcagttataccttactaaagctgggtaaaggaacaaacattgcaacagactacagataaagttcccttcaccacttcttccccaacattcatcatagttattgccccaaaagactgctattattagtttgatgtatagcttttcacaaacagaaaatttctgtgtttgtacagataagaggtttatgtgcacagacaaaccattttgagttcagtttactgtatataagtgggattataccatacatgtcattctgcagcaattattaaatttaacaagatgtttggagatctagctacatttgcacacaagctgtattcttttttaacctttacatggtgctgtatagaagacgtggaccagaagttatgttattaattcccctgtggagatcattattataaacaatcagtgatgagcgtctttgtaaatctccttttgtgcctgtgtgtgtatttctcaaggatgggtgaatccttgaaatggaattgacaagtcaaggaatgcacatattaaacatcttagatccttattatttgcattcagaaatgctgaacagtttctattcccactttgaacataacacccacttctccacacccttgccaagagagtaggacaagcttttaaaatatttgtcaaattaatgaataaatattgcaatttgttttaatctgtaaatatctgatgaataaggagataagacattcttgcaaatatctctgagaatgtttatttcaattattgaaagttgctcatccatttcatgaattattgacattaattctaaattcaggtgttctgtgtgcttgtattgatggtttaccttcatgctattaatttttctcaaatgtatgagatacttgattgtcaaatagtattaatgcatagatgaattgagggaatattctcatgttggtattttgagctgttgaggcttctacttctgacattctaatttttcttattttgtttttaacactcggaaatcaaacgtatcggtggccacttttcttgtttaacttggatttatcttttttttatttatttattttcttccatttacaaagatagggggctggaagagagaatgccagggggtccagtgggccacaccgaccctttcttccctccatgttccccgttagaatctaagcacagaaggaagaaggcctacttttccagacagtagggccttctcttggcttgcagaagtgcatttgaaatggaggtggcagagatgggataccacaccgggccaggccttgtggaacctgcaatgcattccctgcagagtgatctccagtaggcttcggagagagtaagggctggggccctgtcaagatgctgcacagggagaattcccccaggagctgtccacaggagcccctgagaaggtggaggctgaagggaggagtcagctaagggcagatgtgcagatacgtgtttgagctgggcagcctgaacttggcagaacagagcggggacagaggggagccggagctggccgtggtggtgactgagtgatttagggaaattaaagcaagaggggagatcatggaggaggaagattctcaggttgggcaaagaggctgaactgggtttggtctcccctgtttggggcgttggatcagatgcacagggagtgttccagaggggctggggacagcaatgtgggagggtcccaccacagcagggatttaggtactggtaggtgtcttctgcaggcactggatggccccttccttactcattatctcagctgtcccagagtggcaagagctgagcatcgcccctcggcctgtgctgagctgaagccttcagagacctccatagctgctgcccccagggtgttcgtgaagtgtgtgcaccgcctggccctgctcctctccaggactgcccttctccagctctgtcaccccctaacttggggctggtttctatggagcagagtggtctgctgaaggagggagtgctgaaggagggagtgagtgtctgtgtgagtgtgggtgcacttgggtgagggcctgagagtttaaaggcaaggatcttgattggcctgtaataagcaaatgagcaaacagagatgacggccaaaggatattgaaatcgatgttaaacataattttctaaccctacccctgatttttgtctcatcttctgaggctgaccacctttaccagcacagctgtccccactgtgctccatttcgctcctcctctctggccccaggccaaacccagccatactccccctgctccagcctgcagctcgggagcacatgaagggctgacagcaccaggcagcacagagaccggggccctgggggcggctgaacggggtgagggggttggaggatggggttggttccatggagtaaggaaggagaagaagcagggagaacccagctggggagatggctgcttcctgcactccctgagcccaggcctcccgcagggtgcttagggtggaagcctggttctgtgcctgacccaccctgaacttcctgtgagggagctgtgcgcccagactgcagccttgtgtgggcagtagctcaggtccctctgacctctctggcagggaaaaagctgctctgagaccagatgctttgaacctggcatcctgggaccaggaagggccattgttatgggaccattgtcatgggagcaggaataaccctgtcagggcaattgatgactgaaggatcctgctggagctggggcagagagccattggggtcagaggtataagcagacttgttggggttcagggagaagactccttggatctgcaaaaggcaagcctggatgaagagtaaggaagtgcccatggagaatctctgagcccaggaggagcaccaggtcaggagagaggaggcctgggtgctagtcctggtttggccctgaaatagctgagtgactgtggaaaggctacttgccttctctggacctcatctccctcagttgtgaaatcagcactgagagaaattcccttttgtccctgctacttctggttctatcatgggggaaatttacagctaccccttcacccctgcccagcctagcttagccctgtgctgcgttttggggatcacctccagacctctacggctccctgctttccccatttctgcatcagaggccagccctcccttcccatggacctacccaggctcggagccactgttgcaggctagactgggccttgctagaaaagcaagtacatgaagtctccagctctcccagctccttctctgggttcctgtgagtgtgtgtgacaatgagtttgggagaggaggttgctgaggttcccaagttctctgagggaccttctcagagggtgggcagggaacccagaatcccccagaaccccaggctctttgacaggactttgctgtgccctgctctgatcgtgccaagggggaggcactatccctagctcttcaagagacttctgaaagggccccagatcccaccacagctacctgccccagtccctcctgcagaaattcaacttgtgacaagggctgttgtgggtccccagggagcagggccagtcccagcctggatgaggggctgcctaagcccaggcttccctgcccccaggtcccagatgccagaggaagctgagcgtgcagatggttccagcaggggcctccccctagggtgctcaaggccccaagtctatgtggagggtgcccaccccactcacacaggtggggaagccacaacacagagagaggggcagattccccgctttgagagctcctgtcccctggggagagacgacacactctgacacagcagagaacgatacagagctggctgcaggctgaagagacacacagctagtggcacatagcaaggggtgctcttgtaagctacaagaaggagctgtcacttagagtcagcaggggtcagagaaggggaaagtcagcatgggaacacagttgctgacacacacacacacacacacacacacacacacacacacacggtgacgtgcctcggtgccatctgaggacagggccgccttcctccccctcgggaggatgcccccaccctgatttggtatgtaattatgttcagggagaagctgggccccactgtcggcgaggaaaccccctaaaagctcacctccgcctgtgtgtgcaattcagtgggagcctctttctcacccctggtttcctgtcatgtctgtgggtcgcatttcaaccagaccagccggaaggctccagaccgaagtcaggaggcctgttctggtcctgtgtgactctgagcaggtggctgaccatatctgggcctcagttctcacatctgtgaaaaagagaagtaatgtctccctcgcgaacctgctgagggtcttgagaaagtgtgcatgagaatgctttgtaaataatgcttgtgtgagtgagtggcgggcatcgctccctgagctgtcttctagctctggagctccagcctgctttcccaccttgggcccttgggcgccaacatctgatagccctactgtgtcctccttttgcatacccctctgcctttcccattctcagtctctgcatactcctactgtaaggagaagggcagtgtactgagatggagtggagagcaggagtccaggggcaggcaaagcagtggacttggaatcgagtccacttgacaagttccaattcccgtctcagttattacctctgttcacagagctcccggcagcagatcgccagtccagcagagcccccagtggtgcaactgcaattacacacagtgtctctaccagtcctaagatatattagctcgttctctttgtaaattgcatcgtattttaaaactgaatcttcaaagtgctgacattaactaaagaaaaatatgctagagtctttcatctgtttatgttttaattaaacaatatttctccagggtccttaagtggcagaggtccaggatgcagagatgaggccaggtcctggttcctgggctccctctaccccaccccactgatgcatcccatgctccgtgtgctcttcccaccctcccctccccgacctttgccagggaccctccctagcctcccttgctggttttgaatctccacctcctctcccctctcctttcccgcacccacgaaactcccagagtggaagcacatcactgacccaccatggaggcctgggcatgacgtccctggccatcctgtgaccagtgaggcttggggcttgtgatcagggttccaagtgcccctgagtttgtcatccaccctcagcctgcctttccctggaaagggcggcaaagctagggccctgcaaagaagagaggcagcacacagagggagcaagggggaagcagtccataactcgcccacagtttcctcctggccttttcagctcctccctcaggggtaggtcatggtggggaggggcagctgggcacaggggagagcaggcatcttctacagaggcctgggaagctgtgtgccagacagcgccgagcccaccagacccagactcacctacagctggagatccccacttccctgtgcccacagaatctgccctttgcagtctcccatctccccaacccaggcctcagcctgtctcatttttctatcagacgtgctggaagagcagcagaatcaggcccagctcccaattccctctccccagtcttctccaggtgtcccctcccatgagcgcacaggaaaaggaccacatggcctggcgagccctacacccactgctactgctgctgctgctgttcccaggtgagggggaggaggagcccagggagcagaggagatgggtgtggtggggactgtcaggacagcagggtcagggagcaggtggctctgtggccagaggcctgctgtgaggcaggttgtgcgcgtggccttgacctatgcgttacttcatcattctccaggctctcaggcacaatccaaggctcaggtacttcaaagtgtggcagggcagacgctaaccgtgagatgccagtacccgcccacgggcagtctctacgagaagaaaggctggtgtaaggaggcttcagcacttgtgtgcatcaggttagtcaccagctccaagcccaggacgatggcttggacctctcgattcacaatctgggacgaccctgatgctggcttcttcactgtcaccatgactgatctgagagaggaagactcaggacattactggtgtagaatctaccgcccttctgacaactctgtctctaagtccgtcagattctatctggtggtatctccaggtgagctctttccctagggtcctcagaggggtgcccctcacccccttttggtgcctccatcacccctggtttcccaatcgtggaagccacccatgcccacgccccagtctcctgggaaggctgttgggaacaggtgcagggggaactcatatgtgcacaagagcagccatctcacagtctgcatgactcccaagcctgcagcctgggcctcctgagagatgctgaaacagacccggtgagcatgctgaccagtcagcctatatgaccctgctacaggagggcaggaccacccggcatctttggtacatagtaggtgcccaggaaaggtgcatccactggctgcccccaccatgtagagccagtggtatctgggtagtctagataccaagatactatgggtatccctcatagtccagatcggggactaagaatgagtgaaaaaaactaagaatgagtgaaaaaaaatcaaaagaaaaacaatattttgtgacatacaggaaattcaaatttcagtgcctataagtggagttattttttggaacacagccatgcccactcaattacctattgtctgtggcccttttcatgctgtgacagcaaaattgagcagctgtgacagagaccacatggctcatccctgaccctttacagaaagtgtgccaaactcctgctcagagcagagctacccacagttcctgtggaagaggaccttctaaaaaaaaatctgcaattcacatgagtaattttttttgtaaaatacagtaaaaaaaaattactagaaaaataagaaaaagatatataaagtacaagcccaacatttattaaatttgacaaacataaaattacattttaatgaatacaatcagaacaaatatcacatagggaaaaatttataaaaactgtatacattgttcatttgaaagtgtgcctaaaggtgattgatgtagtggcttaacggtatacccataacgttttgtcattcctcagttaaaactaagtacaaagctagaagggaaattgcagttctccatattaaatgccaatatgcacccttcaaacaaacaccctgtctttccgtttttaaggattataatgtgacaaatgagcacttttcttacttggtaactttcctaatctgagaactatttatgacaccacatcacttaggagataatgtataaagaaattgtgttgattttttttaaaataatactcacagtagaagcccagaaaactggtctcacggaggtataatgtcagaaatagaagaaattttaaagcaattccgacaagctcaacagttttatatttaacttttacaaaaggaagcaagcgatgctgtaatttcaaaatgcatcttcaatcctttatcagtagccagttccaaaactttatcctaaaacttatagtttaaattatctttcgatgggaaaatatggattctagatctatgaatttcctctgcatatatcttcttctgacaaaaaaacgaaattcaaaacatgctatcaaattattaatgttttcccatgagcacttgtgaagatatgcaatatcaatattatcacttattttgttgataaatgttattaaattaagaacatgtcataacaattcatagaaatggttcttctgacttttatgtttgcacttagactttacttgccattgaaaaacatgtcgctttacttccttgcatggaaatattaacttcagaactacagtataaacaagtctgatggtacaattcacatttgtactaaactggcttcttgtcttaattaggaattcttcctatagatgaaacatgctcaacaaaactttaaatttggcatgcaacagtagctgtttatgatctgtttccatattaccacataataaagagaatgatttcaaatttaatatattcaccttataaaattcacaattctgtccatgttggtcagcacaacgttcagttaagctgcttttttttcatagtaaaactctctcaatgaaggaagcagtgcattaatttaaaatctagcccaagacttcttaacctggatgacattttcctgtcattgcaactgcagccatcagaacatactcttacataaaacttaaccccaaaccacattttgataatataaccttcatagttttatacattcagagctagttgtgtttgtgacaattaagctaaaagatacagaattccttcatatcattgtgttcaaattgcatatactaaaagaatagctatgttagcaatatttgtacattttttcaaattgccatgaaaaatactttgctagctttatttgttctaggagatggtcatccatcttgttatccaattcctgaatatgttgacctaaggcgtcaagggaaaatgatatcaagctcccttctttgctataaattacccaatgtcgtaaagcaaacgttgttcagtaatgttttggcaattgtagatggattgttggtctttgcagtacaaaatgttactttacaagaagccacaaagtctagagcttatatgtgaagtatggattcctttcaagagcttttcaatccaatactcttttttctcctaaaaacagtttgttgtgaacttgtgtttttccgttttatatgtatatgccacttgtttttttgttttgttttatttcgttttgaggcggagtctcgctctgtctggagtgcagtggtgcaatctcggctcactgcaacctccacctccagggttcaagcgattctcctgcctcagcctccggtgtagctgggactacaggcgcctgccaccacacccggctaatttttgtatttttagtagagatggggtttcaccatattggtcagcctggtcttgaactcgtgacctcaggtgatccgcctgactcggcctcccaaagtgctgggattacaggcttgagccaccatgcccagactatgccacttgtttttgttgttgttgttattgttgttgttttgagacagagtctcactcagtcacccaggctgcagtgcagtggtgtgatctcggctcactgcaagctccgcctcctgggttcacaccttctcctgcctcagcctcccaagtagctgggactacaggtgcccgccaccatgcccggctaatttttttatatttttactagagatggggtttcaccatgttagccaggatggtctcgatctcctgacctcatgatccgccctcctcggcctcccaaagtgctgggattacaggcgtgagccactgcacctgacccaactcaaggtcttcaaccttaatcacatctgcaaatttccctttgccatggaaggcaatgtcctcacaggtacctgggattagggagtagacattttggggtacccgtattctgcctaccacaatgagagattctactttcaaacaaaaccagcacaaactctttggaataactgcagaaggaaaaaatttatttagaatcagttctaccatcttcatctggcttactgtcactgccacattcaggaaagatgttttttttcagtgatttttgttttgctatctgttcattagaatgctaattaggtaatcactattctactctaacttagctaatcatgttacactctaaattttgtttaaaaaaagtttgattaaaaattaaaatgattgtaaaaataataaatcataaaattatacatctttcgagatgtttatacacttttgggctatagctaacaactttatttatttatttatttatttatttattgtgagacagagtctcactctgtcacccaggctggagtgcggtggcgcgatctcggctcactgcaacctccacctcccaggttcaacccattcccatgcctcagcctcccaagtagctgggattacaggcgcctgctaccacgcctggctaattttttgtattttagtagagacgtggtctcaccatgttggccaggctggtctcaaactcctgacctcaagtgatccacctgcctcggcctccaaaactgccgggattacaggcgtgagccaccacgcctggccgctaacaagtaattttaaagtatcacacactgtaacatggctctggcataggttactagcacacagctcactccatattcgaccctccatgctaatttgacaacacccaagctggtctatatcctgttcaatgagatgagacgagttaactaatcacgggcttggatcttgaggcagtatcaaattgatataaacgttttgaaacccctactcccaatttttatacttcccttgttgtggaagggttacagacaatttgtagaccagcaccaggccatagatgacacattcaatagcacatgtctaggattttaccagagtgtcccaaacacctctcccaggctgagcacagggttatcctggccagcatcctagacagcctcagagagtgttctatgggacaggatcgtgcccacaggtccataggcctgtgactctctccagggaggaccttccagggcagtctctgggacgaggaatgactcagcctcaggcaccctctcctccaggcccctcccagccctttccccttctttccccttctccccacctcctggactccagttaggtatgtagacctagtctgctaggtcgagacactgataatccccacttcctctcccagccttggttccaaccctactttcttttccttcgccaccccaccacccgccaacagccaatgccttttcgacctcaacagtccccatcacttttccagagacagccattccccacctccaccaagggctctaagcacaggtgggtctggatcttcctgggaaggtgaacagcaggagtggtgcgcagccggttcacagagtcccagagtcaagaggggctgtgaaaggcattccctaggctgctgagacttggggtccagggctgtgcagcagaactgggaggggcagggatctgaaaactacccttcaaattccccacaagaggctcccttcccaagtcccagaggcatgagaaagagaatggagggcagagagccgaaggggcccgaagcatcatggccatgtccacccttaggaggctcggatgggtgcccatccaaagactcgagtgcctcctgagtcctcttccagtgctcctcctagactcaaggatacaactgcaggggcccagtagagcccaggccacaggtgtgtctaattctgagccagaggacttcacagttcagtccccacccctcaaattagttttcttctctgggcgcatgggctctgttcccagtctggtccaactcccccatccagctctcctgccggcaggcacaagtgaggtctcccactcactaaccacgctctttctcctccctggcagcctctgcctccacacagacctcctggactccccgcgacctggtctcttcacagacccagacccagagctgtgtgcctcccactgcaggagccagacaagcccctgagtctccatctaccatccctgtcccttcacagtgagtttcggggtgcccgtagccacacaggcctgggcgggggctggcagatggagacttgcctccccagcccgtcctctccccttcctgtccctctgccttccaggccacagaactccacgctccgccctggccctgcagcccccattgccctggtgcctgtgttctgtggactcctcgtagccaagagcctggtgctgtcagccctgctcgtctggtggtgagtgtggtgtgggttgaactcggggaaaatggaacagggaacagcttctgcccaggatagagggtcagaggggaatcggccagagaacagaggtggaaattataatcggcagagctctccaaattaaagccctcatggagtccatccatctgacatgtcacacaggctcacctttgtccttcagctgcaaacttgcaggaatctcatccatgtttctctgtctctgtgttttctcctctctctctccctctctctctctttcttccccctgctcccttttcctccctttctctctccattcctccccctccctctttcccattccacccccttcctctctccctgtctctctacccctccctcctctcctcttcttccctctacctttctccttctctccttccctctcccctgtccttccactcccccatccctccatcagaaacacagacctacacagctggaaagtccctcccactacctgcccttccaggcaagcccaagtccagggactccctaaagccaccatcccaggactctgcctcattctagtcctgagggagagagggtagacacaggagggaaacagcccccagggagaaggggacacatgggaaaaaaccataggtggggctgagtgaaaggtgcagggacaactcagtcaggccaggagccggcttgctggaggaggggcaggcttggggaaagggacagggtgtgagaacggattcaagtcacttcatgtatttctcccctcatctcaagggttttaaggaatcggcacatgcagcatcaagggaggtctctgctgcacccagctcagcccaggccccaggcccatagacacttcccactgagccacagggcaccaggtgggcggccagtctccaacaaggctgggctcccagcagctcctccctgacttctgacctctgctgttatccgcaaagaaaaggccaggacttgatccaaggcctttagccacgctctccctgcagagctgcagaacccaggccctctacttgctcaccctcagtttgcactgcggccagcaccccgttgtgggagcaaagcccagcgcctgcagcatctttctaccaaacctgagtcactgatgacattccctcttccctgcctcctcctcctatctatagcccctgataaaagaaaaacgtgaggcctggaacgctggtggctgacacctgtaataccaccactgtgggaggccaaggctaaaggatggcttgaagccaagagttcccagttgcagtgagccatgatcacgccactgcactccagcctgagccacggagtgagaccttgtctctaaaacagaaaagaagaaaagaaacactttagacaaaataaatttaacagagtttatctgagcaaagaacgatttgcaaattgggcagccctcagaaccagaagaggtttagagaactctgctctgcaacctgggcagttgtagagagaaaaaaagactgaagaaagcggaaacaaggaacaaaaagaaattggtcatttcaaagttaccttcttggtaaaaggttaaagcagaggggatttccctaccataccggctaaaactgacctgttcagggatttggctgttacctctctctcctaatttctcggaaggtgagataaacaacttggttttggcttggtggtgtggaaccttagcaccagtgaccccattttggtttgggctgttgggcctagtgcaggagctcagtctaaatcaatggcctcttattactctgatttaacaccccaaatccagacgcctgggtcaccccaacgtttccctctccctctgcccttgctcagccacactctgccaaggcctctcctattgtgcctcctccccctttccaagccccttcacctcacactggcactcggaccactgtgtcagccacctaacagggggtcctgtcttcagtccccgcctcctagattgttcccctgatatgtcccttcccaacaatacctctgtgcatttctgccacccaggaattgaagtccagtgtcgttactggggtcccaataatgctttgcctagatcagccacccctgtagcacagcaccccactgtgctgtccttaccaccaccaacatggctgcagcctccacaaggaagtgaacctttcttttttcctgcacaagctggtcaagaggcgcctcaactcgccacattcaagatcactccgtgccttgccccaggcctgtcacccccacagtgctgttgtctctttctgacgcttacaatcccgatgttggacctaccagactgagactgacgtgattatcttttctctcctgtttgtcatctatttttctttattcctactttctgagaaagttccccaaggttacattctattcaaatgttttcaatgtacacgatcacatttttcatttctaaacggtccatttgttctccgaatgttcctttttatagcacagcatgttttattttggcaagccacattttctctggaaatattaaagttttaacttttgaacttttccgaagctttccatattttctatgtcctccaagtgcccatcatatcttttattttctcctttcattgacctctgtctttcttcagagctttctggaaacctttgccgcttctcggccacccacttgcttagaagccccatgcgggccgcggggtgctgtgggctccaggcggattgggcgggagtatggctccattttttctctttcacagctctgtttctctagaaaggactcttagctgtccttcctgggagtgtaagtctagacccagggttctaggcaccaactggaacagagcaaaggggtctcgctgcccaatgtctgttcccacccaggcccccactgcacactctctctctgtggcgccctgtgccctgagcagagcatctctgtgtcaccctcatcagagacttacctcaagctctctgcagctgttgagagagaggaaagacagaggatgtgggcagctaacctactctcagtctcacggaagccagagaatctaggagtctaagtgattcttaaagttccaacctgttctctggtttccagcacccacttcaaccctgccttaagagatacctgcacctcccatttctccaactttctggggttccaaggtaaaaatgacttccctcttattcccccactcccaccagctctctctgatctgtgaagtcatctgattttacccaccttcaaaacatgtatggagctctctgtttatctttgaggatgggtttatgccatttttatccagttattgctgctttcaccttcttggcaagagtgaggagggaccccagattttccatcaaaacacccctccccagcacccgccaccaagggcaggagcaagtgagatcccaggtctccacttgctcctgtaaagactcctggccccctccccttcccccaaggtcagcactcagactccagtacagcctcttggtgccttattatatccctgttcactctagttgccataagatgcccaggatgccctggtcctccctcatcacccagaatcccaactcagtaagaccttgtaaatccatgacattagccccaattcccactcgtcccaaatcccataacctttccaccctgcacctgaagtgcgcagtcatcagcacaagctcctgtatgctcagcttctctgaacgtcaccgcggtactctccctgacatctgcctgttctccgaggacaatgctttctccgcagttctcttgcggggggagggaggcggtttgttctcctttgcctcatgctcctgagcccaagggtggggtcagtgtcctctgtgcccctcacagccccttcctatcttctgatcctccctaaagcactccacaagtagctttctgccattaggctgtatcactgtgggtgaccacccatcatcactgcagattctgtacaatctggggcacggctctttattcctcatgggtctcaaccccaggctcagcgtcactctgactgctcccgccataattctttgtgatcttgggcccacgtagacaagatctacatgaatgattcttccaaatctctggcatcacagttccttggcctcctatccccagtggtctcgtcctcttccctatttcagccaccattgcagatggtcagtaagcgccaatagcccccctcttaatctcattcccaccaccccctacctcagtcctgctaacctgatcccagtattgcttcaacaccacagggacccatgatccattgatcctgccacccgcccctttccgccatctcacccatgctttcctttcccttagattccatgatccaacctcaaatcagtctttggcacacagcctccccttctgtgctcctctccccttttattgaactcctctgggaaaactgtaaccctggttgaacctagcttcctgcttactctgtgcctgtgtccagccaagatgaatgtggctgtggctgacaaaatacaatctatcatcccgaaatgtctcactgtcagcacgtgaccttgagagtggagtggctctgctccattctagacccacatcattctctgtcctccctctccacatgctcagctggtgtgcccacatcctaactcactgaaaagagagagaaagagggggaaagagagaaagagagggagggagggagggagggagggacagaatgagaggaagagaaaaagaggagggaagaaggaaagaaggaaaagggagggagggaaggaaggagaaaaaagaaagtccacttgatcccaccacacctaccaatcatctgcctctcttcttcctctcactctccctactcttatctcaagccaatcactttccttcagctccaaataccatcttctcttgtctacacaagaatattccagccgagcatggaggtgcgtacttgtggtcccagctacttgggaggctgaggcaggaggattgcttgagcctgagaggtggaggctgcagtgaactatgatcgtgccactgcactccagcctaggtgacagagcaagaccctgtctaaaatagaaaaaggaatattcatccaggagccacccctctctcctgcatcatcttcccgggttgtatgtcatgaccatcagaatctaaatgggctctaatatattaaaccctccccacctacagccctccagctactgctccattatcttattgtcctctgcagcaagggcccatgaaaggactggctgcaccatcagcctccaaaattctcttttcttctctcttgaagccactccagtcaggcctttgactatgccactccttgaaacacctccagtgagttgtgcactgtgaaatccagcagccaatgctgaaatctcctcaccctgggaagaggagcaccctaggcatggcctcccacttctgccttcttgagatgctttcttccagggcttccaggaaaaaagaactcttgtgactttctcctgactcatttgatgttgcataataaattagccccaaaacgtagtagcttaaaacaacaaatgatacatattcattaggtcacaggttttttggggggatgggggtgtgatcagaaatttgggaacaacttagttgggtgttcctggctcagaacctctctggtgtcgcagtcaggatgtcagcaagaagtgcggtggtagggaggcttgatggagggccgtgcccaagacggtgcatcctcatgtggttgctcgcacaggcctcagtgctttgccatgtgagcctttcttcacggcaagggaactaacttcccaagtgtgactgatccaagagagggtgcggaaggaggaagtcatagtgccattaataacctagtctctgaaatcacaaaccgttgcttctgccatattctactcatcggaagccagtcattgggtccagcccaatgggattcgcctccaacccttgaaggaaggtatattaaagaattcgtgcctgtattttaaaaccaccacagtacttgctctggccacaaattatttacattcctcccacatgcaaaaatacactcagtcccaccaaaggtctcccaaagtctcatcccattatggcgtcaggatgaggtccaggaactcatcatttaaaccaggtccaggtgtggaggaaattcctcaggtgtaattcctcaaatacaattctcagtatgaagacctgtgagctagagacaagttatctgccacacacacaaccccaatgtccaatgcagtacagtcataggaaaaccactacagatatttttgttcaaaagaggtggaagggggagacaaaaaaaaaagtcactggtccttagaaaatcagaactttagctgggaaaatgttggaaattccttgattcagacactgctcaactcctacctagaaataattctcagtggtcgtggctccttcctctgtgctcgagtatgtcttctgagccacccttctctttccatgaaaggcagcccatatttacagcttcgtaacttcctcaggctgcttcctgccagtttaatttgggggatacaaagtgagatcccagattttatgctatttctgttcctttcagtccaatctggcagtgttttgtgactgtcattctcttaaaaaaaatgtggatctcctgtaaaacttattgtgactcactccattagacaaagaccatacccacaaatttctccaagagaagatctcttccacaccatgtgcttctgacaagaaagtgaggataatgtctttatacttcttagaagatctaatgttcgactgaaaaatctatgaagcacgcacccttaaattcatgaaagggccttttgcctgagacactatgtgaaataataattattatacattattgaaatcattataattttatataaattattatagtttattatatttttaatatattttataaattttttatatttttattttttatattttatttatatattttatattaatttttattaataattttaaataaattataattttatatattatgcatatattatcatgtatataattttcatatatatatatatttctttgaccctagttcctgacacagagctcctgagacccttataaatgggagtgctaagataatcttttgttctcatatttggtctttgacctctgctcctgacacagagctcctaagacctttctaatctcctgagtgataggagtgtctaacacagaggtcctacctcccttggaatttcctggcatcttttcctctaaagaggtgactcttagtgtgctcttggatgggggctggtcaccagaaggatcaatccatgattgaaagcttggaactttcaccccacctcccataccccagggaggggagggggctgaagactgcattaatcatcaatcaagctgacatgatgaagtctctgtaaaaatcacaaaagtaaggttcaggagcttctgagttggtgaacacattcatgtgctgggaggtatggtgcaccccagctccacagagaccagaagctcctgccctccagcccttccatacctgaaaacaatttggtttttcctactaaacacacaactttctgaggtcttaacaaaggattttacagcatagccttggtttcatctttagaccacatattcctgaacgtgccctggatttgattttagcatcatttactgtctggaggctgagaattttttaagtcatcaagtcccagctccctcatgttgaataatcctgcctagagtttacctctcacctctctcatttcacaatgagccacaagaagaaaccaggtagcactttcaagagtttgcctggaaatcctagctgtacaacccagctcatgagggacattttctactttccacattactgcagatgacagtgttgctaaactttctgccattgtgtaacaaagaacccccttcctttttaccaactaaatgatgctggaaaagtttcttaaggtctctaccccgagtcttcttattggtaaaaacagaactgataacacacatattaccaagctatttggatttctaagtagggtgatgtattcaaaaagcaccagacaaaaggagaacacccaacaaaggctgagttttagagggagtgaggtgtagaagaaagcagactcaactgtgacacagcagagaccatctgcctttccagagcttactgcagctgaaaagacagataatagtgtgtgggcagagggtgaacctggagacttgaaggaaacaggcccctcttcttggtggacagtagaggaaaataaaggaaaaaatcagggtgaggaaactgaccaaactgggctcaaaatccatgcatgctcactgacacttttctggcagcagtggccaggagcagacttcatccttgtgaggtgggtatggcaaccaaccctgcgagtagtgggatggggaaggggttgcctctgcacctatgtgcaattatgtggcagtctctgaccaccttcctggtttcctgctctgattgcaggggggacatatggtggaaaaccatgatggagctcaggagcctggatacccaaaaagccacctgccaccttcaacaggtcacggaccttccctggacctcagtttcctcacctgtagagagagaaatattatatcacactgttgcaaggactaagataagcgatgatgatgatgaacacactttgtgaataataaaattatctgaatgttttattcctgttgtttcctaagtttccttcaaactctgtctgcatccgcacatttgatctctaggggaccagcttctctagtttgccctctttcctccatcataaccctttcttatcttcagttcacctgatgtcccctgtacgtctgggagctgccttagatgctgttataatcagggaagggcactgtacacaagcccagtgagtagaaaggctgtgggcgagcaaggcttggaaacaagacctgggtttgttttctcagctcagccctgtatgaactcggacagataggtcactgcccctctctgaacgtccgtttctttctctagaaaatgaagggggtggagatgagttctgaaaccccttccccatgaggataagtcaataagcatgaactcaacacctgcctgtgcccagctcagggaccaagcaccacaggacacaaacaaaaggagccagcctgggaacacagttgtgagtccataggtggcggggcccctgtgcaagattccagcacaggctgagggaaggggacagtggagggggagcaaagctgaaaatatgtggctggagagggatagaaaagcaggacactagtgggtaccagacagtgggggaaggagcccaacaaggatgaggaactttgctgtgaagtcatgttagtcaggatgccatgaccttccatgagcccgaaagagggcacacagtcccaggaaggaggcgaaaccctgccccatctctactcacccctaaggttctgggagcttcctggtatccagggaaaatttaggctcccagggtctgcggtctttttcttggaaaccccagtctccggcttcctgtttccagtttcgccttccttcctgggctcctctgggtaccaggctccataccctgccaaaggctagaaagtctgcggacagccggccgggcgtggtggctcatgcctgtaatcccagcactttgggaggccgaggcaggcagatcacctgaggttgggcgttcgagaccagcctgaccaacatggagaaaccctgtctctactaaaaatgcaaaattagccgggcgtggtggcacatgcctgtaatcccagctactagggaggctgaggcagcagaattgcttgaacctgggaggtggaggttgcagtgagccgagatcgcgccattgcactccagcctgggaaacaagagagaaactctgtctcaaaaaaagaaaaaagaaagtctggcgacagccaaggtttcagacagaccagagtttctgcttatggttgaagtgctgaacttgttgggtctaaatgtgaatatgcactgagtagtagagtctattaagaaactatttttaattgcattggctgtgatcatattaatttgctaagcagcaagagctcttgttttagaaatgtatgataaattatttaagggtggaatgtcaggatatctgcaatttatttaaaaatacttccacataaaaaaaaataccgtgagttaaaaatacagaagtggagtggagcacctggcccctgagctctgatgatgacagggcctgctataggcccatcctgttcctccatggaaattagacaaatgacccatcttgcagagagatcacaaaaaggcacacacacccccacccccagccccgggcctactgattacaaaaatgcaccctagccaatacctggtagaattccaaccctgctggcccaaacacccagggacttcctgtggttatgggataacagccaacacagccaccatcgaagcagagtccacagtctcagcgaggtgctcaaatcttggtgcagccctgaacttgacattggtcagcagatctccacaacagctgcacctagagttgcacacaccacaccagctttcctggtgtttttctcttttctttgtacattatatgtaaacatcatttttccaattctaagaatcccgacattcaataaagggaaatatgttagattcttgtatctactattttttccccaaccaacctttctcaagcattagtaggtaagagagcaggagcaagtggtccagccatgcttccagggctgaggctttcctctctcctcctcctgactcccctcctcctgaacaaatcctattccctcccagcaccctctctgaggattcctcggtcaccaccccaagagctcaaggagaagcggcttggttgggaggaccctctcctctgcctcttgctgctaatggcacctgcacctagtttgcaggtgccctcagcttcagatgggggactggggaggaggacaagaaagaaggctggagagggaagtggggcaggaagaagtgaccttgcagccagaggaccagcaggaggctgatcccaggggtgggtatacatgtggccgcttccccttccccagccctccagggctcccagatctgatgctcctgaggagaaaaatctgagcctgaggaactgagggaagggaacaggaagggcctctgtggggaagggagagcatctcagccaatcaccgtgacctgccagttacctgaccaggcacaaagcttaactatgtccttcccatatttgacctgggacaacaccctttcgtctggctttgctgccctccccaaactgggctgcaagaaaggagctcaggcacagtggtgggaaacagtgttccctgcagctgtcagtatttccaaagttgtcaccaagtgtccccaggtgagctcctcccctgaggaaatggcctccccaagcttctgggagaaatgccatcacctgccccctagagaaggacgggccctccatataaacagctcccccatacagagccaggaaggaggactgactgatttttctgcctaaaacacaatcctgtgtatgacgaaagatactacaaacaatgttttttaaaatgtaaacggaggccaggcgcagtggctcacgcctgtaatcccagcactttgggaggccaagaggggcggatcatgaggtcaggagttcaagaccagcctggccaacatagtgaaaccctgtctctactaaaaatacaaaaattagctgggcgtggtggtgcatgcctgtaatcccagctacttgggaggctgaggcaagagacttgcttgaacctgggaggcggaggttgcaatgagctgagatcatgccactgctctccagcctggtgatagagtgggactccatctcaaaaaaaaagacaaaaaagtaaagcgagattttaaaaataatatatatgttatacaaagattaatatccaaactataaaaggaacttgtgaaatcaataagcaaagggcaacaactcaatagaagaaacagaaaaggatagaattgcaatccaaagaaacgccccatggaaaattaatacatggaaggcaagatcaattttatcagtaagtgggaaaatgcaaattaaaacaacaatggagggatcatttttcacctattaaattaatacaaatttaaaagattggttattcccagcagtgacgatgttgtgagaaaattggcatctcaaaggatgtcggtgggaatataaattagtctatccttttaggaaatcaattagtccagatttatcaaaatattagatgtatatccactttccacagacaattccatttttagtgtctgcatgagagaataaatcatgtgtgcacaaagaggcatatgtaaaaggttatttgctgcaacattttatataatagtgaaacttagaaacaaatcaaatggctacaaataggaaaggaaggaaataaatgaggctacatctctagcctagggcactaaacagcaggttagaaaggaggcagatatgtgtgttctaaatgcacagagcagattgactaaacaatttagctcaaaaaaatcaagctgctgagtgacacacatcacagtacctcatttatatcagcaaaattgaagataaagctatatccccagtgatacggtttggatctgtgtcctcaccaaatctcatgtctaattgtagtccccagtgttggcggtggggcttggtggtacgtgagtggatcatgggggtgaatttctcgtgaacagtttagcaccgtcctcttggtactgtcctcgagatagtgagtgagttctcatgagatctggttgtttaaaaccatttgttctcactcataggtgggaattgaacaataagaacacctggacacagggtggggaacatcacacaccggggcctgtcatggggtcaggggacgggggagggatagcattaggagatatacctaatgtaaatgatgagttaatgggtgcagcacaccaacatgacacatgtgtacatgtgtaacaaacctgcacattgtgcacatgtaccctagaacttaaagtataattaaaaagaaaagaattcagtccccctttgtcttctgccctgattggaaatttcctgaggcctccccagaagtagaagctgctatgcttcctgtacagcctgcagaatcatgagccaattaaacctctttttaaattacccagtctctggtatttatagcaacgcaagaatggactaatatacctagacacaatgtatgtgtgcatgtatgcatgtgtgtgtatgcatgcatgtgtgtgaatgtgtgtgtgtaataacaggaaagaatgtgtgcaagaattgcctcaagatgctaccatgggtaatgtctgggtaggggcaggtgactgggatggaacagggagtgtgaaggggggctttcgcattttaccctgtattctaccatattgtttgaatgtttttacaataaaatgtacttgggtgttttaaaaagtagacatgttttaatgactgttgaagtgagtgaagaatatggaagtcagaggtcacagcagccctgcccctgggacagccattgaagggtgtgtgcgtgtcatcctgatcaagtcccctggggataggctactttcagtgtcctcactggagactcagcttctgtgtggtgtgtgctgtctggcttcattacactttactcccttgttctgtcctctcaatagtctagcaaacctaacactaccaatgaagccctactccatgtcctgcccctggcttcccacttaccataccagcccagcaaatacgtttatgtcccccacaaaagcccatacacaaatgtttacagtgcccttactcataatcaccaccaaccagaaacaacccacaggtccttcaactggtgaaaggatcaacagactgtggtacatccatgcaacagaacgtgactcagcaatgcaaaagaacaaagtacccacacacacgacacacctgataaatctcaaatgcattaggaaagaagcgagactcagaaggctgcacactgcatgattacatatgtatgacattctggaataggcaaaactgtcagcacagaaaccactgatcagtggttttcagggactggggggatctggggtggtgataagatggttctgtgtctggattgtgttgatggttatgcaactgtaaccatctctgtccactccacctgtgggatctgatctggacccagaggttgttcaagccagtgccttccttacttctgttcttcccatctttattccttctttcctcttctgcttcctctttgctcttcagcagtggaaagctccttcaaatggaatcctatacatgccttgtagatgtgcctgttcaagtgacactgttcttgatgaagaagggtaagggtcctctttcaacagaagtttgtccccatgctttcattcaacagatgaagaaattgaggcctgagaggaaaggggctccctgtccacatccatgttctgtgctcctaatcatcctccatgctgctttcagagaccattccagggtaggctaagaggggccatcacggtgaacagcttattctgagcactctagagtcgtctaaatctgcagtctggtcatggggtaacaacatagcaacagacttgggagataacatgtcctttccaacacctgcccctgtatccttttttataccttcttgtccagaacaggttcatgaggccatgtgtccagtagaggggactagtttttccagattaactgtcagctttgccatgctatagccaccgccttaataaggttcacctttcagcctcttgtgcaactttctcagagcacgaatgtgtcttcagtgtttgggaatcgcacttctaggaatttatcttacagatacaaacacacatgtgcaataacatctgtagattgatatttgttacagcattgtttgtaatttcaaaagactgaaaacaacctaaatgaccaagctattgaacatccattcaatagaatactttgcattttcacaggatgaagaagctccctatgtactgatatgtgccgatcagcaagacatcttgtattttgtaaggtacggatttctgtctataatatgctaacttttgtgctttaagaaatatgaaaattgattaatattgatatgcattttttaaattctggagaaaacaataaactaataacaatggttgctgggataagcaaaaggtagatggggaaaagtgggatagacattttcactttctggatgtgtttttattttgaaaataataaagttattcaaaattaaattaaaaagaaataattgtaggagagcttctacttctgggaagatggagtagatgtcctttttcctattcttcttactatgtactatatatatatataatatatatattatatatataatatatatattatatatataatatatatattatatatatatattatatatatataatatatatatattatatatatatattaaacatgagacaactctgaaaggtggagagaagaaagaggaccaacaaggaacaacactgcagtgagttccctggattttctttttaccttgtatatcctagactggatactagaaaaactacaacccggaaacaccaaccgacacagtaaaaaaaaaaaaaaaagccctaagaaatgcccgctttctctaaccaaaggaccaggaaagaagcaggcagggcaagacagaaaacttttagatacaattgctctactctagccaacacaacagaaaaaaactgcagcctcacctcacctacaccagcaaaggctgagtagggagcccagacttctaccccaggctgtagtaaggcactcccactcccacgctggagtggagccacagaaggccaagtgggaggccaggactttcaatcacccagggtcagcagagaccacacaggaagcctggactccacccctaccagcagtcagagggtgcccctcaccatccccactggggtggtgtcaaaggaggactggcagagcatcaaaactttcatcactgttcagttttttgtttttttttttttgagatggagtctcgctctgtcgcccaggctggagtgcagtagcacaatctctgctcactgaaagctctgcctcccgggttcacgccattctcctgcctcagcctcccgagtagctgggactacaggtgcccgccaccatgcccagctaattttttgtatttttaatagagacggggtttcactgtgttagccaggatggtctcaatctcctgacctcatgatccacccgcctcagcctcccaaagtgctgggattacaggtgtgagccatggcgcccggccatcactgttcagtttttaacaaggccaccccacccagcagttgcagtagaagcaccccttccccttccagccagggtggaatcagtgaaggcctgaccgccacttccattcagcagttacaaggagcaccttctcggcaatccccccaccccccgcccgcccccataggcatcaacagagaccaggaggacaacctggacccctgcctggcagtaacaaggtgtcatcccacttttacccacaagatctgtgccagagaaggcttgctaccacacatgatttaaataagatccacagttataacacaatactgaaatgtccaggtatcaaataagaaaattactcatcataccaaaacccagaaagatctcaaaatgaatgaggaaagatactcaacagacaccaatgctgggatgcatacatattataatgcttcaacaaataattagaaacacattagaaacaaattttaaaaaatagaaagtctcagccaaaaaaaaaagaaggtctcagaaaagaaataaaagatacaaaaaagaacaaaatggaaactctaaagtgtacaatagttgagatgaattcaatggatgggctcatcagcagaatggagaaaacagagaaaagaatcagtaaacttaaatatggtgcaatagaagttacctaaactgaaccatggagagaaaataaatggaaaaaaaaaacatgaacagaaccatgtgggactataacaaaaaatccaatatttatgtcactagagacacaggagagggggaagaggttggggctgaaaaagtattcagagaaacattgggtgaaagacacaaaccttcagattctagaaggtgtataaatcccaaacaggataaaacaaacaaacaaacaaaaatccatcttaagctatatcaaaaacacaacacttttcaagtgctaaaagaaaagaactatcaacccaaaatttagttttagaaattcctccaggtatgaggggaaaataaagacatcttcagatgaagagaaaaactaatttgttatcagcagacccactttttaaaaaaacttattgggcactggagcaaaggtcacttttcttatgcatcaccaaagaggttggaggcactatgcccctgccatagggatctgtggaacattgaacttgagagtgacaatttagggtattgggcaagagaaatttctaagcagcaaagtgttcaagaaatggcctggctgcttctaacaacctatgctcatatacgtgagcaaagaaatgacataaaactggaacttatatttaaagggaaagcggagtgtaaaagtttgaaaaatctgcagcccagccatgtggtagaaaagaaatgctcattttcaggggagaaattcaaacagggtgcagaaatttgcataagtaaagaaaagccaattgctaatagccaagacagtggggaaaagaccttgaaggcatttcagagaccttcaccacaatccctcccatcacaggcccagaagcctagaaagacagaatggtttcatgggccagacccaggaccctgctgccctgcacagcctcaggacactactccctgcaacctggccactccagctccagccttggctcaaaggagcgcttgtaaagcttgggctgctgcttcagagggtgcaagccataagccttggtggcttccacttggtgttaatcgtgtgggtgcacagagtgcaagagtttaggcttgggagcctctacctagatttcagaggatgtatggaaaagcctggatgtgtaggcacaaagcctgatgcaggagtggagccctcatggagacctcttccaggtcagtgtggagggcaaatatggggttggaacctctacacagagtccccactgggacactgctttatggagctgtgagaagaaggccactgttctccagaccccagaatggtagattcaccgacagcttacaccttgcacctggaaaagccacaggcactcaatgtcggcccttgggagcagccaagggggctgaaccctgctgagccacaggggcagagttgcccaaggccttgggatcccacccttttcatcagtgtggcctggatgtgagacatggagtcaaatgagattattttggagctttaagatttaatgactatcctgctgggtttcagacttgtatggaacccatagcccctttcttttggccaatttctttccttttctggggggaggatggcaatgattacccaatgcctatattccattatatcttgggaataactaacttattttttattttacaggctcacagatgaaagggacttgccttgtctcaaatgaaacttcggacttcacacttttgagttaatgctggaatgagttaagactttgggggactgttgagagggatgattgcattttgtaatgtgagaaggacatgaaatttggaagggtcaggggtggaatgatatagtttgaatctgtgtccacacctaatcttaaatcaaatcacaatctctagtgttgaagatggggcctggtgggaggtgactggatcatggggaaggagttctcatgaatggtttagcaccattatcttggtgttgttctcatgatagagttctcacaagacctgtttgtttaaaagtgtgtagcacctcccaccttgctctcttttggtcctgctcctgctttgccttctgtaatgagtaaaagctccccgaggcctccccagaagcagacgctgccatgcttcctgtacaacctgcagaactgtgagccaattaaatctcctttctttataaattacccagtctcaggtatttctttatagcaatgcaagaatggactaatacatttatataatcataaaagggtcaatctaccaagaagacatagcaatccataatgtgtatgcaccaaaaacacagaactgaaaaatacatgaagcaaaaattgatggaactgacaacagaaaacaatgaatcactaattatagttggaaacttcaatactctctgtcaaaaactgatagaacaactagacagaaaaccatcaaggctatagaagaattcaagaacaacatcaaccaatttttatagaacactccacccaattatagcagaatacacaacttttcaagcatttgcagaacatataccaagattggccataccctgggccataaagtaaaactgtaacaaatttttaaaaaattgcaaccgtataatgtatgttttctgaccacagtggaattaaattaaaaaccaataacagaaatgtgaccataaaatcttcaaatacttggaaactaaataatacactttaaataagccatgggtgaaaaagaaagttccaagggaaatttaaaaatactttgaagcaaatgaaaattaaaacataacatgtcaaaatgtgtgggaagcagttaaagccgtactgagagggaaatttatagcaccaaaatgctttcattttctaaaaataaaactttcaagtcaataatataggcttgtaccccagtctaagtcaaacatagaggaaagaaaagcaaaataaacccagagcaagcagaaagaagaaaataataaagataaaagcagaaatcaatgaaactgaaaataggaaaaacaatatagaaaataaatgaaatgaaaagctggttcttttaaaagacgataaaattgacaagcctctgacgtagaaaaaaagagaaaatacacaacttcctaatatcaggaacaaaggcagggatatcatgacagtccctgcagacatcaaaaggataataagggaatactatgaacaacctaaccctaaatttgaaaatttagagaaaatacaatctaatccctcaaaaagcatagcccactacaactcacccaatatgaagtagataatttgaatactcctataactacttggaaaattaaatatgtaattaaaaagaaatctccaggcccaggtggttttacttgagaattgtaccaaacttttaaaaaggaattaacaacaggccaggtgcagtggctcatgcctgtaataccaactccttgggaggccaaggcaggaggatcccttgagaccaggagtttgagaccagcctgggcaacatggtgaacccctgtctctacaaaaaatacaaaaattagccaagcatggtggcacatgcctgtaatcccagtactcagaaggctgaggtgggaagatcgcttgagcctggaagtcaaggctgcagttagctatgattgctccactgcactccagcctgggcgacagagtgagaccctgtctcaaagcaaaaaattaaataaataaataaaaataacaccaattctacacagtctcttccagaaaatagaagaaaaaagtcagtagtgcgttgataccaagaccaaagacagtataacaaaagaaaactacagactcatattcctcataaatatggatacaagcactcttaattgaatattaacaaatataattcgacaatatgtagaaatagttatatactatgaccaagtagagttaattctggattcaaagctggttcaatatttgaaaagctatcagtgtaatccactatattaacagggtaaagaagaaaaatcacatgatcatatcaattggtacagaaaaaagcatttggcaaattcaatactcatttatgatactctcagaaaactagaaataaaggggaatttcctcaaattgacatagaacatctgtaaaaaatctacaactaacatacttagggaaaaactgaatgtttctcactaagatcaggaacaagtcaaggttgtccattcttcttcctttttagatggagtctcactctgttgtccaggctggagtgcagtggtgccatctcagctcaccgcaacctctgagtcttgggttcaagcgattctcctgcctcagcctcccaagtagctgggattatgagcacctgccaccacatccagctaatttttgtatttttagtagagatggggtttcaccatgttggccaggcttgtcttgaactcctggcctcaaagtgatctgctcgcctcagcctcccaaagtgctgggattacaggcgtgacccaccacacctggccaacgttgttcattcttatcactactattcaaccataacactggaagttctagccagtgcaattaagcaagaaaaggaaataaaaggcatacacattagaaaagaagaaattaaatgtccctatttgcaggtgacatgatgttcaatgtaaaaaatctcaaggaatctacaaaaaaagaccttctaaaactaataagtgcgttcagcaaggccatagactataagatgaacatataaaaatcaattatatttctacatactagcaataagcacatgaaaccaaaacttaaaatacaatcctatttacaatcagtcacaaaagatgagccacttaggtataaatctaacaacaaatatatagcatgtgaaaattacagaatgctaatgaaagaaattaaagaagatttaaataaatggagcactcatggattggaagacttaacatagtaaagatgtcagttctccccgaattgatatacaggtttgatgcaattccctttttttttttgagatggagtctcactctgtggcccaggctggagtgcagtggcatgatctcgactcactgcaacctccgcctcctggattcaagtgattctcctgcctcagcctcctgagtatctgggactacaggcatgcaccatcatgcccgactaatttttttgtatttttagtagagaagggtttcacctcattggtcaggctggtcttgaactcctgacctcaagtgatccacccgcctcggctcccaaagtgctgggattacaggcatgagccactgtgcccggccaggtttgatgacattcctatcaaatccctgcaagatttgtttgcagacatagacaagattattctttaacttacatggaaaggcaaaggaaaaagataaaagaaaagataaaacaattctgaaaaaggagaattagagtgagaggtatcaatctacccagtttcaagacctatatcacataccagcaggaatcaaagctgtgtagtattgatggagggaaatggaacagaatagagaacccaaaaatagacccatacaagtgtggccaactcatttttggcaaacatgcaaaagcaattcagtggaggaaggatagccttttcaacaatgctggagcaattgaatatccataagaaaaaaaaaaaacctatgatttaaatctcacaccttatataaaaattaactcaaaatggaatatagatttaaatgtaaaacataaaactataaaagtttagaaggtaacataggagaaaatatttaggacctggtgtttcgtgataagctcttagacacaacaccaaaggcagatccatcaaaggaaaaaaatcaataaattggacttaatcaaagtttaaaacttttactttgcaaaaatccctattaagaggatgaaaggagaagctatagactgggagaaaatatttgcacaatgcagatctcacaaaggactcaaattcccaatataaaaatgactctcaaaacccaacagtaaaaaaaaacaaataatccaattagaaaataggcaaatgacatgaaaagacttttcaccaatggcaaataagtacatggaaagatatccatactactagccattagggaaatgcaaagtaggaccatgatgagatattagcacatatctgtcagaatggctaaaataaaaaatagtgatgagactaaatgctggtgacaatgaagagcaactggatcactcacacactactggtgggagtgtacatggtaagccactctggaaaatagtttaagaatttattttttaataaaaattgtgtatatttaaggtgtataacatgatggcttgatatacatagtaaaactgattactacaatcaagctaatgaatattttcattaccttacatagttatcgttttcacatgtgtgtgatgagaatgcttaaaagctactctcttggcaaatttcagatataaaatacagtatttttaaatatagttccccttctgtacattagatttctggaatttattcatcctacctaacaaactttgtaccctttgaccaacatcttcccatttctccccactccccatgcctgataaccaccattctcctcttgcttctatgaatttggctttttcacattcgacatataagtgagatcatgcagtagtggtctttctgtgcctggcttatttcatttggcataatgtcctccaagtttattcatgtttttgcaaataacaggatttccttctttttaaagggtaactatgattccattgtgtatatgtacattttctttatccattcatctgttggtggatatttaggttgattccatatcttggctatgataaatagtgttgtaataaacatggagacgtacatatctcttcaacatactgatttcatttcctgtgggtatatagcatgaagagatattgctggatcacatggtaattctatctttaactttttgaggcacctccatactgttttccataacggctataccaatttacattactaccaacagtgtataagagtttcgtattttttacatccgtaagtttggcagttactttaaaaaaacaaactaaacttacgcttaccataagaaacaccaattgctctcctgggcatttatcccagagaaataaaaacttatgtacacgtaaaaacctgtaaatgaacgttcatagcagctttatttataacagccaaaatctggaaacaacccagatgtctctcaacagataaacagttaaactgcagtacatccatagactacatggcaataaaagagaatgaacaattgatacatgcaataacctgaatggatcttaaggaatttgtgctgcatgaaaaagtcttaaaagatgacatacaaggccgggtgcggcagcttacacctgtaatcccagcactttgggagaccaaggggggcggatcacgaggtcaagagattgagaccagcctggccaacatggtgaaccccatctctactaaaaatacaaaaattagccaggtgtggtggcgtgtgcctgtaaccccagctacttggggggctgagacaggagaatcgcttgaacccgggagatggaggttgcactgagccaagatcacaccattgcaccccagcctgggtgacaagagcaaaactccatctcaaaaaaaaaaaaaaacaaaaacaaaaaaagccatactctgtgatttcttctatatcacattctcaaaatgacaaaatcacagaaatgggaaacacattaacggtggcctggggctaagaatgttgagagagggaggactgggcatgaccaccaagggatggcagggaagaggtctttggggtgatgaaatggttctgtgtcttgattactgcgggggctacaagagtccacacgtgggtgaaagttacctgggacctctctgtactacccttgaacttcctatatgctatagtttcaatgtttgtttcctcctaatctcatgttgaaatttaatccccagtgtgatggtgttgggagttggaacctattggggggtgtttgggtcatgggggtcctttgattcatggattcttcattaatacatgcatgcccttggaggagtgagtacttaactctattagtccccgaaagcgccgattgttaaaagagtccagcacctccctccttgtcttgcttcccctctcaccatgtgatctctggaaacactggctcccctttgccttctgccatgaatggaagcagcctaaggctttcaccagatgcccaatcttccagccagcagaattgtgagccaaataaatcttttttctttataaagtacccagtcccacgtattcctttacagcaacaccaaatggattgggacactatgaatctataattatttaaaagttaacagctttaaaaattgattgtcaaagtcattttgtgtctgtcttttttacttttaaaatatgaatccatcacgctaaatgggggctcctctggctcctcacagggcattcagcgtttggtgggggcaatgaccctgggtttatgcggacacaattccaggatgttctgcagccagatctttcccgaagtttcacatctctcttccaggacacctgctgtctctagaaggagcatccctctggagaaggaaggagagaaggcagaaagtggccgcagcctagtgggaaggagaccagtgacagctgcatcccagcccactagggagcagcagaggatggagaatggttctcagctctgcactggagtgggtggaatctcaggcaggagaaggggaggggctctgcccagagacctttccccagcctgaccactgcaggtgcaaaagcagcttgagcatttccaatgcctgataaagagggagcccagctgggctcagtggctcaagccactaatcctggcactttgggaggctgagactggagaattgcttaaggccaggaattaggattcaagaccagcccaagcaacatagcgagattccatctctacagagattttgaaaattagctgggtatggtggtgcacacctgtagtcctacttagaaggatgaggtgggaccatcacttgaacccaggagtttgaggcttcaatgagccatgattgtgtcactgcactcctctaaattaattaatgaaaatgaaacacgaaggaaagagccctatgccaagcagaggtctcctgaccttgggattaaagatggagaagaactgaggtcgactcagtgtggtcacccattccatgctcttcgtttgttctgtctgagtatctgaggtcgcaggagtgccccactcagaacaaagcaccttgttcttcaccttcagggataagattgctcaaggagcctgaatcccagagaaaggacagagacctctaactccccatccatgcaacatgcatgatagagtttcccagctgtccctgaaccggtctcaacctgcaggcccatgaacccatctgaaatgggctcaaatggagaatgagaaaggaccttggaacattcccagagactaatttgggagctcagtacatcagctaaaggtattttctagatgattcttcagagccaaggagagggagagctcctggcctaggatggaagccaatattttactcttctcacactctgtgcaccaagagatggtgtgaatgtgagagaatcactctgcaattttactagctctatgttcttaatcgaagtgcattgcctctcttagccccaatttccttatctggatagtatgggaaatgacagttctctcttctggagttactctattgattaaataaagtaagtgagacgccgtgcaaaacacctggcacctgccaggcaatccgtaagccttttcctgcgccccctgtcggcgctggaaaagttctgtatcttgtatcaaccccggctgcagtatccttcataaccaccaggaggcggtgtgggaccacggagcctgctttgcccacaactagactcactgggggaaaggagagaattcctccgcctaaggagcagcggaattggagcgccagaattggagcgccagagagacaccggatcttaccttcttgcgctggagttgcccacgctgtctccatagcacgaaaaagaaccagggtaggcatagcaaaggcaacaggtgggacggggagccagggagtggaaacgccggaggtcctcaggctggggatcccggagtcctcgctcagattccgattccggagaaggccaattccgggaccctatccatgtcccattccgggcaccttcctcaaaagtaggggtgggaggggcataagccggtcaagtatttcccgggccttccggagcaatcttgcctaagcgttcatatttaacgcattggactgggaaacatttggagatcattgattaagaaatactcaaacctgggccgggcgcggtggctcacgcctgtaaatcccagcactttgggaggcccaggcgggcggatcacctgaggtcaggagtacaagaccagcttggacaacatggtgaaaccctgtctctactaaaaatacaaaaatcagcccaccgtggtggtgggtgcctgtagtcccagctactcgggaggctgaggcaggagaatcgcttgaacccggaaggcggaggttgcagggagccgagattgtgccactgcactccagcctgggcgacagagcaagactccgtctcaaaaataaaaaaatatatatactcaaacctgaaacccatggataaattaaattctctagtctttgtttatcgtttttgaaaacaaaaattgcattttttgacagggttttaccattgcccaggctgaatgcagtggcacaatcacaggtcactgcagccttgacctcctgggctcaagcgatcctcccacctgagcctcctcagtatagctaggactacagatgcgcaccaccatgactgctaaccttttagtttttgtaaagatgggatttccttagattgcccaggctggtgatcctcccacctcggccacccaaagtgctgggtttacaggcatgaaccaccacacttgacccacatcgttctctttttaaaaaaatattccagcccggcacggtggctcatgcctctaatcccagcactttggtaggctgagatgggaggatcccttgaggtcagcagtttgagaccagcttggccaagatggtgaaatccgtctctactgaaaaaaatttttgttaaaaaaatgccgggcctggtggcgggtgcctgtaatcccaactacttgggaaggctgaggcaggataatcacttgaacccaggaggtggaggctgcagcaagccgagactgccccactgcactccagcctgggagacagtgagactccatctaaaaaaaaaaaaaaaaatccactggcttcccatcacacctagtatataattcaagacactctctccctcatcatggcctacaaaacgctacagaatctgaccctcctgactttccattgaccctccctttcacctccaccctctctcctcctttttgagctccattccaggcactttccacatcttaggccactgcatttgcagttccctccgcggggaccctgccctttcagaagtctgcatggctcattctcttctgggtctctgtctcctccccaagttcctctctggcccacttcatctttccttcacagcacaaagggctgtcctgcctgataccatgttgtgtgactgtgtttatctgtttcctgtctttctgacccaggaatgtataagcgccctgagggatgggatcttgtcttcctgttgctcagtcatttaataggtacttgctaagtatttgtggaatgagtgaatgacttaattaatctacaagctgtggagactcaggaaggatcgtgatagtgacagctgttggtaaatttaattcaatatgtattgtgcgcttattttgtgcctactgtgtggcattcagcatcatcttgttgctgctattcattgtggtgaagagaatacggcagcaggtaagtctgatctgggcccagagcacagaccgtaggcgcagctcatctcttcattgctttctccccattcttggagtggcagtaggaacccccaccccccccccacacacacacacatacacacacagagagagagagagagagagagagaaagagagagagagacgggacagcctcctctatgcactgcttcctcttccccagccctgctccctgcatccttccctctggtcctagtgtcctggtgtcttgaagatgctgggtagttagaccgacatccctctccctctctcaccctgggctctgggacgctggccctgcttccccagagagcgatcgccccggacttgtgcctgtgttccggcctagggcagccggaacctcccgatatccccagaggagtctcaggacagcgcacagggaagtactggcttggagctgcgtgttccttgggcggccggcggagggcgaagagcaggaagagcccgggggacgacggtagcagagtgttggggaggccacagacgcggactgcgtggagaaagcacgcacccgggccgcagtagccgggcagggggacggcggaaagcagccctctctggaacattttattctgatccccgcaggactcccccgcgagccccggcttgagcagtcgtgtaacaagtgtgcgattgcgcgtgcgactggtgtgtgcgcgtgggcacttacacgttcccggggaggctgggggcaggagcttcactgttcacacaaagagcgcttagaggaggaacatttaagtttgggggcaaagaaagaaaaaagagttaaaggtttaggagatgggggaggaggatggggcttaaggacgcggtgttgccgcggctcagccatcggggcgggaagctcggggagggagagcgcctgggcccgcttctcgcctattctacgcagaacttttctctcctccttcttccctcgctctgcctctctcggggcggtctccggggactgtctctcacatccattctcctctcctccttgatttatgctgcagagtggaacgaccttccctgacctcattttcatgtcggcgcgagcacacccggagccggctacgcacattccggaggaggcgcgcgctgacacgcacacacacacacacacacactcgagacactgcagggccctgcccatcctcgagttcacaccagccccgccactattatgggcactgccggggctgtggacgctcaaagaatagatcctcattagcatcttgctttgaatatcatttgcattttattcatttcatgtcaaaacgctcagaactctccccagcccgcaccttccccagagcttgggagtcatgggtttccagctcaagccccttctctgtgggccccacgcttgctggctacccccaccccacctaccctgcgccacagcccccacaaaatgaattgacgtctcctaagcacttggcaagttccatctcctgcgctagggtgcattgtctcatctaatcctgacagcaactcaaggagcaaagcactatactatacccatttgagagtcgaggaaactgagtcacaaaggtgacttgaccaaggtcgtggagctaaaaaccgaggaggagaaactgaaacccaaggcgaccaaacaccaaacccaaagagcttaaccgcttcgctgccccggctcaggcaaggtcaaagctaaggtatgataactctggcaggagaaagtctgttttcctacgtggtagaaagtccttgggcccgccacgacccttcccccatcccggccgctggggcaccggggcacattcccagtgcgggcgctcgcagcaccacctcgcctggccgcccccagtcctgacccctttctagcgctggatcggccgggtccggcctccgtgctcgcggggtcgtccgtcggcgctggctagttaagaaaaataaacaacgttccaaatgaaggcgattcctttcaacccaagctccgccgcctgccagagaaatgcaaacagcggggtacggccggagtccgccccagcccccgcgccggagctgcgggtggcagggtcgggccgcggtaacccgagccgccgcgccggctccccgcgcgctgccctccgcctgccccttcgcccctgaccccgcagtcggcgcgctgggcctgcgcccgccatccccagcgccccccaccgggccgggacctccgccagcggtcctcggcgcccttcctgccccctccccccagcggtctcggccccatcccgaaccgccaccctgggatccccagccctcctgcgccctcgaggccaccgggctcctgcgagcaacgcttccctgcggcgaccgcgcgctgggatcactcaacaccaagaaaaaaaaaatgcactgggaacgacagaaacctgccttagcgaactatcctctagtggatcgggcgtggggggctgcttccagataggacccctgctcaccctgcagggtgcggccgggacaactacgggcgccactgcggaaggcctgacctgatccggcacggtgtggccaccgtgggcccacagagggtgaaggggtagcttatgctgagtgggggtgtccacctggacagaccaggcgagcctcgctcctggtgcgggagctagttttccctggatcttccgcggcagagaagcctgcgtccgggaccagcagagtgagccgaccggcggatgcagttgaccccattcgcgtccaaacttcacttcgagaaaacgcagccctgcgcgcagtccacgcaggacgcgacagcgccaccctcgtttgtacggctgcgcgaatgactcgagagagtcgcggtggctgcacgtgcgtgcgcaaagcgggaaggagtcagaaacagtcccgggcgcagagcgaagaaatcctgggacctcggcaagagggcctcaccactggagatggggtagctacgccgtgtggctgggggaggggtggtagggggcgcctagccagttgcaggggcctcgggactttccatggcctcacccctcttctaggacacgtggccagcgtcctccaggccaccactggggatgagggtgctcgagcctcggtgcccagagtgttgggaggagcggcggcgcacccgcttcctccgaattcctgcatcgcaacgctgggccgcaccgaaggcggtaggatgtgccaggcgtaaagctccgattggcttcgagagagtcgggggcaggcgaagacgcggaccacgcgggcttcctgtcctctttattcccagctctttttcgcgggataagcgtgtctgacggcttaagtgcagtctccctgcgtccctgcctgagctttccagctcccaattacttcgcgggattgggagccgagcgctctccctggagcgatgctcacacccgtgcgcactcgcctagacttcccagcccgctctccgggtccctctgcgcggcggcactgcgcagctcttctgctgccggggctccaacacctctggagctccaggccctgactttcccgcagtctgtccacccgagctgcaatcaataccagctcagtacggggccgctcgctggcctccactcctcccgctgcacacacgtatacaccgcattagagattcccttctcgcactttcgtgaaggggcaagatgtaagctcgggagaattccactttcctcaaagattccctacccgggcgtcatatggggattttttcccccattgtagttttctttttaaagaagttttctttaaaagtagaaaaaaagtagacatgaacaccaccgccaccatctcttcccagcttcctaaatcggttcctttttgccagctgaaacccagcaattatggcaggaaggaatcctttcctcttgggtccttcaaaaagcgccactttggagacggtgataaatctgcgctgcctgagtcgttcccctactcccaacccctcgctcctcatcactgcccctcctagaccctgctgtgtagacgggacctcaaggagttcccgagggaacagatttgaaagcccagctccgggttccatggacagtgtttgacaggtcagcccctcgctgtcctcctatccccctcctccaagtccggtccccctctttcaccccaacccccactctcgcgtgggactcagacactgatcccggagcgagaatgcggctgacagttaaattgcagtgtaggccgagggggggaaaagggaccatgtctctttaacgggccctgcagacaaagcgtctccccttggagcgagcggagccaggcgcagccgcgcgcagacctgtcagcgcgtctcacgcgcttgggagagagtttgcaaagtcataattatatctcttaacctgtcttgctctctgcagaagaaggtcccattatattgaaatgagattattagccatcaaatactttctttctcgggagttttttttttttttaattcaaataccttaacgacttggcaattgcattttgatcagatttagttggcgccccagcccggagcgggagccggggcgggaaggcagctggttggggagcgacgagggggaggtcgggggggaagccagaagagtttgcaaagaaatgcaacccctcttttatctcgctcctaggtctcatttacctggcgagggcctccaggcctggggagggggtgtgagatgagggaagttggggcagagtggtgagatgtcttttatccccttgggacctggtcggcttaaaccgcttctttgaaaatggaacgcgactttcagacaaggcgaacgtggacgccgaggcggaggccaggctgcggaaatctgagggctacagaatagggttgggtctggggtactaggtaaggaccgaggctggagctgggagtggctcgggattaacttcttccgctggaggttggcttaaggctcgcgccaggctcctggcggatggaatttcagaacgcaataaatggggtttttctctacgcccaaggcctgtctggttttaccaaagattgtgagccccttgagtggagagcccatcttgtttccagaccctggaacccctgtccctactgccaacagaccaccccctcctctccctggactggaggaaggatgtgaggtggaagattttccagactttaattttaaagcccctcactttgacttcccctagtgggaggcggagccaggcttgtgtttttcttggctttagcccagactcaaggaaaatatagggaacaagacagccaccagccccacctcccccaccccggaccctcatatttcacttacaatcctggtgggtccgaccagcctctagttccaccccatcgtctttgcaatgagtatctctcttcaggtactcaaaaaagcattatgaagatccggagtccagaagcttggcttctaggccaggtagaaccacaccaccttggaccagtcagctcttgtctctgagcctctgtttctccttgtgcataatgaaagccttggacttgagatatatgcgttccctttaatctcacatcattttttctgtaaagaaggttcttgccagatgtggtcatctggaagattccagagaggccataccactgctcttcaggaaagcagcctgaggaggggtagaaatcaatgttggctttaaaagcctccaaatataaaaactgagaaactttggtggtgtctactaaaactgaagcatgcataccctatgacccagcagttccactggcaggcattgtcccaacagaaatgctgtcctatgctcaccaaaggacatgtacaaaaaaatgtttacacagtactcttcacaatagccccaaactgcaaactaccaaatgtccattagctatgaaattagctgtgatatagttacacactggaatactatatagaaaagagaaagaatgagctatgctacatgtaaccacatagatgactctcatgctgagcaaaagaaactggacctggcctggctcaatggctcacaactataatcccagcactttgggaggcagaggcgggcagatcgcttgagcccaggaattcaagacctgtctctacaaaagtacaaaaattagagcatctgtagtcccagccactggggaggctgagatgggaggatcacttgagcccaggaggtcgaggctgcagtgaactgtcatggcacccactgcattccagcctgagcaacagagtgagaccttgtctttaagaaaaagaaagaaagaagagaaaagaagaaggaaaagaaaaagaaatcagacccgaaagtacattctctgtggttccatttatttaaagtacaaaaacaggcaaaataaatctatgtatgctattagaaagcagaatcatggttacttagagaaggcatggctaaaagggattatgaaggaggtttctgggccaatggtggtcttctgattcttgatgtagttacacaagtgtgttcagattatgcaaattcattgagatgggtacctatattaagtgcattttgtgaatttataattattaaagcctgaaattggaaatttcttctccctagtcctcaatctcattcatacgctcacatattctaatgctgcaaactctacagtagcaggaaatcaatcaatgaatcatgtttggccctcttcccctgtgttcaacactgtaaagtatctgtgaatatattttagcccctgccttcaaagatttgcaatcaagtttgggaggcagatagacacccaggaaatcacggaggagatatctaatggaatagaatgagtagtggtttatgcctctgtcaggtgaacctgacagctggggccaaatcccagctccaccacttactatctatgtaatcttggacaagtgacttcacatctctgagcctcagtatccttatctggagtatggagaggaaaatgctaatatttactcacggggatgttgtgaggattacaccagataaatatatttctctataacagcaacaaaaaatggaaaatgaaattgttccttttaaatgctgtattagttcatttgggttgctgtaacaaaataccatagactggatggcttgtaggcagcagaaatttatttcttacagttctagagcctggaaagtccagcatcaagacaccagaagatttggtgtctggtgaggacccactttctcacagacggaaccttctcatgagagtagtgcccataaatgttagccactatttccacctggtatggtggtaagtctggtttgggctgctcagagttcagacaagaggatggtgagtatgagttggggtgagtgtgtatcctataatgcacagagcagcttccacaacaaagaaattttccagcccaaaatgccagtgatgccaaggttaagaacccttgatgtggaggacagaagggattcggtggcaaagggagaacattccccaggaggggagaaagatgtgctctggaatttctgatgtgaactgagggtaggtagcattggaagtgaccagaggagtccctgttctagtcttcatccctcaggctgcaagctcctcattcacctccctgatttcagaatttgtggggggtggtttatttcctgttctcaagagatacttggaaaaagcaaggcagattctcaggagatttacaaggccacagcatcgcgtgtgccttggaaccacaattggaggaaacccctaagttggaggcatctgaccctctcccagaggctcagaaggggaagggacttgtctactgtcatgcagtgcagctgggagtgctgagactctacccttgagctctgttcttggtgtacagaaagttaggggagaagggattgcaaatctggattaaatgatctagaagcggaaaatatgacacatgttaatagtcaaaaaggaaagtcagcaccgaactttggaagtgttcaatagaacaatgtgattgtctaggggtaagtataattcttggttctaaaatcatgcctaatagacatagcattccagaaaaaaggaaatttacattggttaatcacatttttttccagaagcaaattctatttgtcaggcactgttctaaatactagggatacagtaatgaacaacagaggcaaagcgaaccctcatggggcatatatactgggggagaaggatgataaataaaacaatgtaatgccaggcatttaactgagcacctactatgggttgggtgtcccttataaatgtcctcagtttcacaagaacttttaagatagaaatctgcagtttaagatggagaaactgaagttcagagaaggcaagtgacttccctaaagtagaatgactaataagtgtcagattcaggatttgaacttagtaggccattcatgataaacatagtacacttagagggaacttcctcaatctgataaagactatctacaaactcctacagcaataattatgcttaatgatgaaatagtgaaagtttcctcctttctatcaggagaagatacaatatccagtatcaacacttctatttaacattgtattagatatcctagcccggacaataagacaagaaaatgaaataaaagatttaaggattggtagagggaaaggagaaatattattcatagatgatatgattatataaatagaaaattcaaaataatctgcaaactactggaattaatggtgaatttagccaagtcactaaataataagatttttgttgttgttattgttgtttttgtttgtttgcttttttttttgagacagagtcttgctctgttgcccaggctggagtgcaatggcgtgatctcagctcatttcaacctccgcctcctgggttcaagcaattctcccacctcagtctcctgagtagctgggattacatgcatccatcatcatgcctggctaatttttgtatttttgtagagatggggtttcaccttgttggccaggctggccttgaactcctgacctcagatgatctgcccacctcggcctcccaaagtgctgggattgcagacatgagccactgtgcccagcctaaatacaagtttttttaatacaagattgatgcattaagataaattatatttatctataacagcaacaaaaattagaaaatgaaattattctttttaaatgctgtcttagttcatttgggctgctgtaacaaaataccatagactgggtggcttataggcagcaggaatttatttctcatagttctggaggctgggaagtccagcatgaaggcagcagcagatttggtgtctggtgagggcccactttctccaggtggagacttctcactgtgtcctcacttgctagaagaggtaaagtaactctctgggccttttttataagggcactaatcccattcacaagaactctgctatcatgacctaatcgcctcctaaaaggccccacctcctaatgccatcaccttgagggttaggatttcaacatatgaatttagaggggagacgtattcagactgtaacagatgcaataggtgggtaatagctaaagggcatgaggttactttttaaggtgatgaaaatgttttaaaattgacagtggtgatggttacacatacctacaaatattctaaaaaccattgaagtgtatactttaaatgggtgaattgtatggaatatgaattatatctccataagcttggatttctttaaagatgaagggcaggtattgctggggttctccttcctacactaccaatcactagtgcttatgaaaatcccttctaaaaatacaatttacaatagcagcaaagcccatcaaatgcctaggaataaatcaaatgaaaaatgtgcaagacctctacactgaactacaaagcattattgagggaacttaaagacctaaataaatgtagggttataccatgttcacaaatgggaaggctcatattataatgatgtcagttctcaaaacgaatgcatagattcaatacaattccaatcaaaatcccagcaggtttgtttttggaaattgaattcaagtggatctggctctatggctcactggaacatggacattatagaaaaagatccaagggtcatagtgtcccctatgtacagggtttataggcagctatagttgaaagaccatcaagaccacgggaccctgaaaaactcatttgggagtagaatgaggagataaaaaatattctcagttaaaacagactcttaccatgctttcagtagacacaagagaaagaccataattgactaaatatattttcacttaaataagagtggtagaaaggacttgtcacctttcataagtgatatcattagggatatggctacccagctggggatatggctcccttcattgtggatataggtgtgcaggattcctctggcaaggacttggagaggggtcaataaatctcttaggccacatgctcatgggtaccagtttgtgcatgagattgcaggaggcccttgacctgtcccaaggcagcagctaggacttggcctcagccttggcttttgagaagctgtgggagagttgaggcttgaagtcagtcatcggaggagatggctgcttcctccctgacgacaagctgaggagcacccaagaggctgggcaggaggttgtagggggcaggggatcaggggatgcagcactgcctttgtcctcaggctgcacccacagaggcagggctccagcacatgaagaaacagagcttgtttcccagtgagggagagggcagagaccccaggattccctcagtctcccatctcaatcccttgaggtacggggcttccctaaaaagggagaaaattcagatcagatgacaagggactcagaagaagagaaacaagagatgcaggggaagcacttcccacctcaatatcacactcactcactctgcatctttccgaagaatggtcttttctcccacaatgtggactcagagacagatcctatgacgtagcatctcattattttatctaaaaagagaagaggccgggcgcagtggctcatgcctataatcccagcactttgagaggccaaggcaggcagatcacgaggtcaagagatcaagaccatcctggccaacatggtgaaaccccgcctctacaaaaaatacaaaaattagctgggcatggtggctcacgtaaattgtcccagctactcaagaggctgaggcaggagaatcacttgaacccagaaggcagaggttgcagtgagccgagatcctgccactgcactccagcctggtgacagagcaagactccgtttcaaaataaataaataaaataaaataaaaagaggccgggcgtggtggctcacacctataatcccagcactttgggaggcccaggtgggcagatcacctgaggtcaggagttcgagaccagcctgaccaacatggtgaaaccccatctctactaaaattacaaaaattagctgggtgtggtggcacatgcctgtcatcccaactactcaggaggttgaggcaggagaattgcttgaacccaggaggtggaggttgcagtgagccgagatcacaccattgcactccagcctgggcaacagagtgagactctgtctcaagaaataaataaataaaaatttaaaaaagaaaataaaaagagaagagaagtggggaaactgagacatagagaagagcagatgatggctaggaatatcagggagccagaggagtccacagggaaggcaggggaggttgaagagcaaggagacgtctgatttcctcaggctggagaacagagctctccaacatcctttttttccagcacacacctcaagtaggagagctagttagactcactcttctacacagtctgtgctgggaactgacatgtaaggggagggaagagaggacagatgtagctggaaagagagaggacacttttcccacctcttgcagtatctcgttgagttcatgaaagtctacttaatacatattgcctagggctcctgtccctcctatgatgtcacagatgggtgggtgctaataagccccatgggcccctgtgttgagtcacagagttgaggactccaggttctcccaggagcctagaaggtcttgcttctttcttccctggtggtctaccaagagcatgagttccagaaatatgtcaacctgtttctttatactcattcctgtgtgcccagcatggtgagacctgaaataaagaatatggcaccctccctgtcctcacagggcttgcattctaggtggggagaagcacaagcccaacaccagtgtgaataccaccagggcgcctccccacatggtggctggagtgtgttgacaccaagtgctaacaagggccttccctgcagtctggaaagtccagaagcttcctgatggaggagaaagggtagatagaggtcagcttaggaagggagatttgggtggagagaccagacgaaggttattgggaaaaatgcaaagcaggaccagaaaccagggctaaggccattggttcatgtttgtgggaaccaggcagtgtgagggctggaaaggcagtgtggaccagaggagggagggtcatcagcatcagggatttggggcttacgggggagtaattgaaagccctgggagctgagagaagcttgaaaattatagcagtcagggtccccacaggaaacacatggcgtgtccacactcaagtttggagaactggaagaaagcttgataaagggcgtattcgtttcctggagctgctgtaacaaatcaccacaaaccatgtgtcttaaaacaacagcaatttattcctctctgacttcaggaagccagcaatccacaaccaaggtgtcagcagggtcggttccttctgaaaccatcctacacctctctccttgcacctggtggctgccaacaacccttgcccttccttggcttgtagctgcatcactccaacctctgcctccattgtcatatggccctgtgtcttcaggtagcctcttctaatgacacagtcattggatttagggcccaccctaagtcaatatgacctcatcttaactaattacatctgcaaagatgctctttctaaataaggtatcattctgaggttctgggtggacatgaatttttggggggaatgctattaaaagggactatttacaaaggtgtggacaggtgtggggaaactccaaaggatactgtggtgtccagggctataaaagcagagaactggagccaacccctttatcttcagggtgtggagaaggaaccagaaggaggtacagaagtccaccttgagagagctgtgatctttggtggcgcccgaatcaaccctgtggggaaggaatgagagcaccaagcccccttccctcactcactctcctccactcttacgtcttcagccagagtgcagagaggccactggtgcagcccacacagatcaccctcctgaggtagccaaaaaagggcttctggagaggcaagtagatgacagtgacacaatggcagtaggggctgatggcaagacgtgccaagaggagccaggtggagatcttgggtagggtggacatctggacagggctgtagggtgacagtgtctcctctgccctcgggcctgctcttttttagacctcagctatgtgggcaggctccaggggcccatctatgccaggtcagggcatcctgaaggtaacagaatgagccccatctccttggaaaggaggtctgatggggttgctcaaggcatctgagttcacacactggccaggaccaaatttaatcatggtcacgttcgttggcagacacacagatttttggggtttggggtatttttttaacggactttattttttcgagcagctttaggttcacagcaaaactgagcagaaagtacagtgagttcccatttacccccttccccacatacacacagcctccccactgtcaacatcctgcactggagtggcacatttgttgcaatcagctaacctacgtgacacgtcattatcacccagagcccatagtttacgttagggttcattcttggtggtgaatattttacgggtttggacaaatgtataatgccatgttacccaccattatagtatcatatagagtagcttcactgccctaaaaatcctctgtactctgtctattcatccctccaccccaatccctggcaaccactgatctttttattgtctccatgtctttgccttttccagaatgtcatatagttggaatcatacagtatctagcttttccagactggcttctttcacttggtaatatgccttcaagtttcctccgtggctcttcgtggctcaatagttcaattatttttagcactgaataatattccattgtctggatgcatcacagtttatccatttgcctactgaagaacatcttggttgcttccaagttttggcaattatgaataaagctgctataaacatctgagtgcaggtttttgtgtggacatcggttttcaactcatttatattaataccaagaagcatgattactggatggtatggtaagagcatgtttagtgctgtaagaaactaccaagctcttccaaagtggctataccattttgtattcctaccagcaatggatgtgagttcatgttgttccacacctttgccagcatttggtgtcacatccagtttttaaaacatgaatttgacacctttaggtggggacttgccttgttttccttttttttttttttagacacagggtctcgctctatcacctaggctagggtacagtggtgcaatcatagctcactgcattttcaactcctggatttaaggaatcttcctgtcttagcctcctgagtagctgggactacaggcacacaccaccacacctggctatttttttttctttttaaatttttttgcagagacaggatctcactctgttgacaggaggctgcctcagcctcttaaggtgctgggattagagatgtgagccaccacacccagcctaggtgggaccttcatgcccagttcacccacagactcactcatttcccactgacccatcccaggcccattttattcatgtatattacctgcccagccccagtagacatttgaattttcaacccctacttgaggatatagaatggagaagaagaaggtgacttgctagccacttagcatgtggttccccatccctgtgcaccccctcactcccctcacctgggaggaggagggaggcacctttacccactgggcaaggtggggtgagtgactggcccaggggaagggctgaggaaatacttctttaaatggagttgtttcctaggaaggccctgatgctatctgagtgcaggcaagaacaagttttgtgccgaccctctccaaggtttattcatcagatcccaactgccatttggaaacatggaaaaagcatggacttttgtttctgaagatctaggtttctatagttcctgtctgccaggggccttggacagatcttttaatgcttctgagcctcagtttatctttctgtaaatagtaatggctgttttacaaagttgctataccagaaaagtcatttttgctctttgccaactataaaatcaaggacaatagtagttattgtctacttcctcttcgcacctcctcacctcccattctctaatgcatgtcaatcattccactgaaactgggctagttaaagtcaccagtgacctccacatggccaagtccaaggaccagttctcagtcctcattgtaaccaactcacctgaagtgccttaagctttttttcttctcgaaatactttgtccatgttggctccagagcatctgactctcttggttttctttctacctccttggctgtgccttttctgtctcttttgcaggacctgcctcttcttcctgacctctaaaggatggagtttacgagggctgcatccttggcactcatctccccaccatctataccatgggcttggtgactatagcagtttcctaggactactgtaatgaagtaccacattgagtggcttaaaataacagaaatatattctctcacagttccagaggccagaagtctgaaatcaagtcaacatactccctccaaaggccctagggaagaatttcctgttagctcttctagctgctggtggttgctggtaatcgttcgcacttatgtctgtggtagcgtaactccaacctttgcctctatttttacatcttccttctgtgtgtgtctgtgtccaaattctttctcctttttcttcttcttctcctccttcttcttctcctcctcctactccttctcctccttctctttctccatctccttctcttttctgtaatccaggctggagtgcagtgacacagtcatagctcactgtaacctcaaaatcctgagctcaaatgatcctcccccatcagcctcttgagtagctgggactacagcgatatgcaagcaggtctgactaatttattttttaaaaattttgtagaggcagagtattgctatgttgtccaggctggtcttcaactcctgggctcaggcaatcctcccgccctggcctcccaaaatgctgggattacaggtgtgaatcaccatgcccagcctaaatttctttcctcttataagaacaacagtcattggattggggcacattccaatccagcatgacctcaacttgactacacctgcaaaaaccctatttccaaataagacataaattttggaggagacactattcaacccagtacagtgatgttatctggtctcctggttttaaaaaccatccctatattattgactttcaaatgcataccttcaacccaaacatggcttctgtcttcctgtctgttgtctcatgccttctccacacctccattcacatgtcccacatctaccatgttaagaatgaactcttgttctgaaaccttggtccttccctttctccttaaatggcagcactttgcaaccagttgctcagaccaaaaattctggaggtatccttgatttccctttttttctacatcccaaatacaatttatcagcacatcactttggctctactttccaactatattcaaaatctagctacttctaaccacctccatccccacctttctaatccaagccatcatccactgtcaccaactacagagcctctgacctcatcttctaccattctcctcattgcactgtcctctgccaacttaacaatctgaatttaaaattgcaaaggcctggactgcttctgctgacacatttagggacttgctaagggttatgccattcagccccagccttaagataattctaaataaccaaataacttctctcagaggtttcttttcttgatactgctcatgtttttggaattgctttcttctattcattcattatcaattcacatgtattgagggcttcctgtgtgccaaacaccctcctgggctctaggaaaataaggttagataagaagtagtctgtactctgcaggctttcctaatctaatagaaaaacggtcaggtaaacagtgtgtgctctatgcacagggggctttcttcttgagccccagataaggggacacctaaaccagccccataagatattcagaagataactctaaccctgcacaggaggcttaggggtctggttgaggtgtccccttcactggggctcaagaagaaagttcttacagattttgcccccttctcctcttgaatatcacccaatgtaccaaagaaagaaaaaaacagaaatacgactccatcttcagtggagctagaagatgcctaaacccctgaagcacaataagacacagaaaacagatgacacatggtatatgagctagcaaggaggagtaaagtcaaatccctgtggctgcaggtggtatcaaggaaaggaaaacctattggctacagaaaacctgggaaaaaatcactaatgggagacaccagatattgcagaaagcaaaagcaaggcagagggtcttgcgctgggattattgctgtgtgaggagtagtgagaccactctagggacccaccttctccttcctcaataaggccatcatacctccccagtctttcaggggcccaggagtttgttctggagttacagaattatgaaataagtgaaccagggaagctccaaaatgggaccatcaaatggcacaggaaaatcaaacccttccccactcagccccagacaccagcagctgggctccccacaggagatgggagaagccgtctcaggagagaccaaatgaccccagagaaaagaccaacaaatactggcatttggtaatctcaatagaagtagctggctggccactttttcaagataccccagctcacaagcccacccatgcacttccaatgagaaatacccaagaataatcaagtattcaagaaaaacctcaaagataatagggaaaaaaatgaacaaggagagagaaaaagaactcatggagaaaagtagcaattgtagaaagcaaaacaattcaaagaaattacaatgaatagcttcagaaagataacagaagatattacattcatgaaataaaaaaagaatgcaatactttaaaaaataaagaggaacaaagaacaaattttatatgatagtcaaaatgtaaaagtcggtagtagaattggtgctgaagtcaatgaaatctcctagaaagtaaaacaaaaggataaagtgagggataataacagagaatagataagaaaattagaggattagtccagaggatcaaaactgactattaggagaaatataaagaaagaactgaaaggaagaggaaattgtagcaaattgtattttccaaagatggctgtcacaatatcccctatcccacatacttttctagaatcttgccatgcccccatcaagaggtggttgtaatggatagtaggacaatacatttaaaacataggtgagttgcagggttcagtggctcacgcccgtaatcccagcactttgggaggccgaggcgggcagatcacctgaggtcaggagtttgagaccagcctgaccaacatggagaaactccatctctactaaaaatacaaacttagcagggcgtggtggagcatgtctataatcccagctactcaggaggctgaggcaggagaattgcttgaagccaggaggcagaggttgcagtgagtcgagatcacaccattgctctctagcctgggcaataagagcaaaactctgtctcaaaaaaaaaaaaaaaaaataggtgagttaaagctacattactttttaaagtcatatcagtatgaagactgactacatttgtggcctgcacacctcttaatattaaggagaattaagaattcttatctgaatcatccagttttgcaattcctttgcccttgaatcctcagaggcttttgtgactgtatattcaccagcacggtagaagggagactgtatgataggaaggtagccatcaaaggcaacattttttctgccgtgcttgcaggaagaattgccctagagtcctgagtcactacggaagctggctgtcactatggaaaaaggccgccatactgtgaggaagcccaaaagaggccttgtggagagatcacataggatgccctgagaagagagagatgtccaataagaccccagctgctccagtccccacggttccagatccagatgtcatctcactatgatctcatgacagagaaccacctagcaaagattttccaacatccatgagaggttataaagtgacggttatagttttaagtcacttaagttgggggtgatttgctacaatgttagcaatagctaaccagaatattgcctaagagataacagaacttcccagattgaaagatatgagtccccagactaaaaagacccactgagagagcctggcataattcgtggagaaaagacctactctagagcacatgtgaaatttcagaacaaagggagaaagtaaaaatccaaaagaaagaaaaagaaagagagagagagagagggagagagggagggagggagggaaggaaggaaggaagggagggagggagggagggagggaaataaaggaaggaaaagaaaagaaaagacattggtgagagggtgagagttacagaaagcagggaaatgatacagaagattaataattagtatggcactggacttctcaaaactaacagtaggggctgggcacagtggctcatgcctgcaatcccagcgctttgggaagctgataactggcggccaggagttcaaaatcagcatgggcaacatagtgagtcaccatcaccacaaaaaaaaaaaaagaaaaaaaattcaatggatcaatctttgcattcgggaggatatgctcccaagttaacacaacagaagtttatttctgctcacatagtagtcctggatggatgttcatgtaataggcaggcactcctctgtgagacccaagcttcttccaccttgaggcgcagccataccacaggccccctcctaacctttttggggccctggacccctttaactatctggcagaccctttctgataacatttttaaatccataaaacaaaacacatagtagtataaagcaaaacaattatatggacatataactatcaaaataaataaaaaccattgtgatatagtaataaatgtgtttctgtattaattgaataaatagtaagacaaaacatttaaaacataagtgcgtttaagctacgtttattttttaaagatatatcattgtgaagactgactacacttgtggcctgcacacctctcagtattgaagagggctaagaattcttatctgacggcctggtacggtggctcatgcctgtaatcttagcactgtaggaggccaaggcaggtggatcatgaggtcaggagttcgagaccagcctggccaacatggcaaaaccccatctctactaaaaatacaaaaattagccaggcatggtggcgcatacctgtaatctcagctactcgggaggctgaggcaggagaattgcgtgaacccaggaggcagaggttgcagtgagccaagatcgcaccattgcactccagcctgggtgacagagcaagattccatctccgaaaataaataaataaataattcttatttgaatcatccagttttgcaaacctctaacaaacaatgcatctacctccacatattaattgaccaacaattggaggcaaggactatggaaagcaacatagattgcgagcaaatgtgacttccacatttggtggtggaatgcctcccctgctcagcatcggccagttgtgtggcacagctgtctatcaacaggaagactgcaattatgtgcagtctagtggcaggtctaataactgccgcggtttctaagtagtgatgaatgtaatgatattttgagctatctgcaacaactgtaatgtgatatgaaaatatctgtgatttctactggtgacaaagtcacagatactgctaacaccactgtggtttattgtctacatttataatagaaagaaatgctcaactagtttaaggtcaggaaaaataaagatgtacttttcccatccaagttcatagatttccctgaatttagggtctgtggaccacaggttatgatgtttcctctggagtcttcttgtcatatctgcagccagccagtaaaacaggaaagagcacagaaaactgcacagatgaagtctttatggacctgtcctgaaattgacacatatcatttccactcacattccactggggaaagtttagccctgtggctacacctccctgcaaggaaagctgagaaatataaccttactttcatgctgaggaagaagaaataacagatttggatgcccagccagcagtctctcttccacggtcagtggtgtgtgtagccttcttgccacatgtagaagacatccagtccctttccaagggagtcaaagcaaaaccccatctagcctctgcattcagctcagtgtccagaacttctaggtgatgtacagtcctttccaacaagtctgatggaatttctcttggtccacagacttacgaactgtgctctactccccacccctgcacacacccaaaatataggataattgcaattaagattgggagacacaggcagtgccttgtccataacaatgatggaaccctgccagacaagcattgtgaagaccctctgccctggcaatagagggggttactgcattagaccctgtatcctttctctgggaggagtctccttgccttccatggcccctgctctgccctctgggaaattctcccttgtctattatctcctgtggccagatctgaaggagttattagtagtatcccccttttgggagttcccactgcttttgtagcacttttggttcatggaagcttgagggtccacgtgtttttctgaactttttaaagaccatctttgtgatttcttgagaaatgcaatttcttcctgcaaaaagatttctgatctatttgcttcccattggttacatgcaccacttaccacttccaaaattccctatacatggttcttaaatctgtttgagttcttttttgcttttttagctccatgccaatccccatttgttaaatatcagctactgtaaggccatctgtagcaagaggattattagagagacaatatccttaacctgatctttgctgcaggaataagtcctttggtttaactgagaagacttcgttggtctttatggctcaaatacttattcagtgttaccacctcctctgtggggtctggaaactgtttcttcaacccttgatctctgcttacaaatagcccagttctttcttgagctctttttttcctactgacaacctgctaagtgaattaaataactggcaacaaaccccacccacctttctccaacctctttcactataggtagagacccagtaggagattaaatgttctcaggtatctaaatgctttcctcctagctcatcaggcctatctgtttatatctgttttctcaccaccttttcccagccaatgccatttattttaatttttgtaatggcatcaccctacttctagaatcaatttctgtgctagagtacagttaggctgctaacaaatagacctcaaaatttcagtggcttaaaacaacagttgcttatttttagcccacataaattactgggtgggctgttccatgtgtgatcattcaagaactgatgctccttgcatctcatggctctacaaatccctagaacttcatttttattgtctccatttgtattgccagaagggggaaagcatggaggaaaaactcaggaagttttgaatgggctaagtctggagttttaaaatttccattaaacgaaacttgatcacatggctaagttttattgcaaaggaagctgggaagtatagtctgactgtgtgcccaagattttggtggacagctggtaccatctgcatggttattttcaacctagaattttatacccagccaatttatcaatcacatataagcatggtcaaaagacattttcagacatgtaaaatctaaaaaatatatcttccattaaccctttctcagaaagctattagaggatgggctacacccaaaagaggaattgaggcaaaaaagaagacaacatgcagaacagaaaacagggaacaacaatcgtgtaggcccagagagccttcagtccatattagggcagaagtttggagagaagtttggagctttctccgggaaaaaaagaaaagtagaactgataacttacatgacaatataacagagtggaaaattgtaataaggtgtgttttgtataaagttgttgaagaatgagaagattttagtcagaatatcaaagaaaactaatttagtcataaaatgagataattactaaatctagcaaaataaataattttataataaacgagatttaatcataaaatactgtgtagctcagcagtgaacaatctttacatgatcattaaattgaaaacagtgatgatgggcttaaccaaaaattgagatgtaattaaaagaggtttagataaggagtgtaaatagctaaactcttcataataagatatatattagtcaggatgggctaagttattcaatagtaagaagtccaaaatctaaatggcaaaatatgcttttgtcttacacaacactgctcacatggatgctcaggggctttgctccatgtgatcattcagggattcagtcagcagctccaccagcttgtagcaataccctctggaacacatggcatccttggtcccatggcaggacacagagaatggagaaggatgcatgagtttttaccatctctcctcttataatttcacttgccaaaaacagtcatatgttcctgttgaacaggcaggggcttgacagtacagtcttccatgtgctctgaaggggaggaagactggtaatatttgccaagggaagtttataaaatcacctaaaatgaataaatcaagagacagcattatatacacattcttttaaaatatggaagtaagtaccagaacatgttgaaaagctaaaagaaaaaagtgaaaaatgttgaaaatgtttctggtgagcctggcaagtaaccagcatggggagtgaagcaggccagggaacaggagaccactgggttttgctgtaaactcttttagcatcatttcacttttgaaactatctgcatgtattgtttttattaagttttatataacttattttttaagttacttgaaaaataaaaactggaagtaggaagactatcacaaacatacccccagtaaccccatctgggatcataattgaggtcaaccttagacgaccagtcagcagtttccagaattcccaccctccctgggctacttggtcaagctctttcccagggtctctcactgctcattattccagagacttgaatttgcttagagcaactaggcgttgtcttacagcctcttgcccttctcgattctctcatactaatgtttaccttacatgcctcaatgcaaagagtcttctccttgtgaagacaaatgcaaaacaccagttgaaaacttccgttctccctattagctattcgtaaaaccccatcggtctgaggcttttcaactcgttctgacactttcttctctttaacttttttttgaaaactttagttaaggtagggatctgacctgcgggcacttggtttcctcctttgtgtccttgttacgcactcttctcaccaaggtttataaatgtcctttgaacatcagagaattctgggaatcttgctatgccagtcttcctcctgcccctcttccacacacaatggccagagagagtttcaatgatgtgcctgtcatcatggtgtccttgataactctcctttgtctccttagcaaaataagctaggccctttacaacccctccctacccactttccacccacctggctgcctgccccaggctccctgtgcgccagccaccaggaatctcgggcctctattttggctcctgcggggctccctgcctggaatgcccgtcctctccctgctggatgcgtctctcagatccagaagcctccccaaactcccagcagctgtggggtaagggaaaggggtccattaaaatggacagtgagttcaacactctcttagtgattctaacattgggaaatttactccgcttctcagaacctcaatttttcagctgatgcattaggattggtctgaattatctttaacatctctttcaggtctcatactgctccctcccacccccaccacaaaattacactgaattggaatgaatgtttgtttgtttgtttgagacagggacttactctgtcacccaggctggagtccagtgatgcgatcatggctcattgcagccccaacctcctgggctcaatcaatccccccatgtcagcctcccaagtagctgggactacaggcatgcaccaccacactcagctaatttttgtatttttttgtagagacggggtttcacagtattgcccaagctggtcttgaactcctgggctcaagtgatccactcaccttagcctcccaaagtgctgggattacaggtgtgagccactacacccagctggaatttaatttttaagagcacagattctgaagctagagctgaattgcctgggttcaaatcccatctcaaccgcttactagctacctgaccttgagcaagttactaagcctccctatttaatgggaaatagtaatggtcattgtctcataagattattgtgagaattaagtgatatctacacatatgttgtgatgcatatgaagtgcttagagtagctctgataagctgttattattatcattattctacactgccaaactgagcaattggaggaacaaggccatatcccctttctttctaaacccccagtgcctaggactttgcccagcatggaaaacaaaaatctccactttttccctagtgaaagaaggagagaactgggagaagcctgcattgcatcctatgagtcaggcttcaagagctctgcccagcctcctagactgtcttccctttcagaatgtcactccatcaagtcatatctggccttctgctcaacatttagaagacttgagggtagagctgagagggactgcattggtggggggtaggggacagagcttgttttaagcttgctcaggcctagtccttagctctgaaacctctacaggcataaaaatctgtgaatttaagagaccgaaaaaagacatctctggggctgggagtggtagcacaccgaggagctctcggaaggccaagccatgtacccctctttggggagactcggggaggactgctcctccccataaaatatacaaaaagctggtggcttcttcactccaggtcttcctcagagatgaaggacaccaggatgggcgaggtggggaggagagagtccctgcacccaccatggtcagcctgaaaagcattacccactcatggggtgataaaagctgcagctgctaagaaccacagaagtctgggttagaaccaaggagaaggagcaataaggggaaaaatagtagggctggggaattggttagcaaagaccccaaagacaggagaagggacaggtctcgggaaaagctgggtcaggagagcactccaaactaagacactgctgcccatttgtatctatcacagattatttaataaagagctgccaaagttactgcaatttcattgctaatgtactgatgcctcgcagttctgcatcttaacctcattgctggggctccagaggccccctacccaccccgcctcccagcccaatgtccccctgcagccactggggcggagcgtctcattttgctagaatgtcatccatttatcaaaggacaggattagccccctcctccacattcagcaggcagagccttcctctttctaatttcaacttggcaacagcttaggttattaacctactgaaatatcctccagggtctccctctcacaccacactgcttccccccatgttttcccagcattcactccctgactctttttctctagggctatggtacttaaactttttccatctttagatctttgtatatggataaaagatatctctctcctcactcatgtctgatgctagaggggctagagggggatgtcattaatggtattaatggtgagctgagctgaggggatgctctccaggacaagggggaagactgtgatgccacttttgacaagaggtcggaaggcaagctgataaggtgaaaggagctttgaactaggatcaggagacctgggttcaggacccaactctgtcactcactcaactttcgaccttgggcaagtcaacttctcttctgtgggcctcagtttccctatgtctgaaatgagagcaaggataagaaccaggggttcgaggactcaggaacccccaggggtcaggtggatcactcaaacgagcaaattggccagtataagacaatagggagtgatagggaaattggagcgtacgtgtccaaactgaaagcaatcaaattttttaaattaagatttcaccaaacaaaagagatctgctggacaaattaaacccatgatcaccagtttgtggcccctggaaagccctctgaggtccctttccattgtagcgttctacaatataatcatttatgtgaacagggcccatcttaaaagtactataagtagatatggtgtgaattcaggacataggtctcttgcccaccccacccccagcccctaacctatgcctgatttactatctgaaatgtctttaaaaggtgtggtagtgttcagatatgtccaggaattattcagtactcctttcttcaaaacataagacctgattcccctccccttgtgtgtgggttggacttagtgacttgcctttaacagataaattatgttggaagtcacaagtatgtgacttgtaagaccaagtcataaaaggcattgtggctgcctccaccgcctcctcctcctcctcctcctcctcctcctcctcttcttcttcctcctcctcctcctcttcctcctctctctttctctctttctcactcactcgctcgctcacagaaaccagctgccacgaggtgaggacttaaagtaaccctgtggaaaggcccacatgggagaaacggaggcctcctgccaacactccctgtgagggagccatcttggaaatggatcctccagcctctaccaagcctatagccctaaccaacatcttgcttgcaacctagtgagaaactctcaaccagaatgacccagctaagtcattctcaaattcctgacccactgaaactgtgatataataactatttgttattttaagctgctaaatttgggagtaatttgttacacagcaatagataataaatacattaagaaacaaacttcccattccacaataacagataagacttaaatccacattccccagggaaagaaaaagatctcaagtgggcaccgaaagttaggagaaactgggaaggaggtggttgttacatgggctgaagacaagctttgctggctttataatttgcaacaaaccaacactgaaattataataagtaaattaattgttagaaactaggtgctgagctatattaaaaatcataactcaggtgcacctaattcagcctttctgctggacaccttaactcagatgctccaatgtcgctgcaaccttaatccatccaattctcagcccagcttttcccccaaaagtctccatgcctcagaaagacaccaccatccacctagggcatacacaacctccatctccaacttcaaaaactgcagatttggagcgtacgtgtccaaactgaaagcaatcaaattttttaaatttgatttaaaaaatcagacaagaactgaactgcagatttcactccccaattttttttttcttttttgagatggagtcttgctctgttgcccaggctggagtgcaatggtgcgatctcactcactgcaacctccgcctcccaggttcaagcaattctcctgtctcagcccctcaagtagctgcaattacaggcacatgccgccacacccagattttttttttttttttttttgtattttagtagagacaggggtttcaccatgttgcccaggctagtctcgaacttctgagctcagtcaatccacccgcctcggcctcccaaaattctaggattacaggcgtgagccaccacacccagcccacctcaaatattttaccagttcaatggcagcaaagaaaacagggagagaaatggttctctaaattttcaagagtacttctatttctttctttttgagacagggtctcattctgtcacccaggctgtagtgaaatggcacaatcatggctcactgcaaccttgacctcccaggcccaagcaatcctcccacctcagccccccaagtagctgggaccacaggcacgtgcagccacacctggataattctgtttattttttgtggagatggggtctcactatattgctcaggctggtctggaactcctaggctcaagcaatcctcccaccttggcctcccaaattgatgggattataggcatgagccaccacaccttgccaagagtactttcatttcttcaaggacgttcatacctgtctttccacatcctatagctagctattgctgagtaacaaactaccctaaaacttagcagcttaaaacaacaataatcatctgttttgctcatgaccctgcaatttaggtgaggttcaacaagaacaactcctctctgcttcacaatatctggggtttcagctaggatgtttcatatggctggacactgggaagccatggtgcattaagctggcttgtaccagcttgcaaaagccaattgttaaatattcagaaattttttacaagcagttgttatactattggtaactttaaattggccctggtgagactaattacagtcagaaatcaacaaacactataaatcagggcagttttcattcacagagtaggtttaccagcacaccactgttggccaggcatctctctctctctccatcacatggctaacttgggcttccttacaacatggcagtttcagggtagttaggcttcttacagggtggctggaactttcccagaccgagtgtcccaaagaatctaatcagaaactacttcacttattacctattcccagatgtcccagaatgtcacttctctcacattctattggctaagcaaatcactaaaaccaacccgattcaaagaaaatgattagacttcacctttcgatgggaggaggggcagagaacatgtggccatctttaatcgaccatagcataggacaagagtctagggtgtagcagacggttactggtctagatagcagaagactcaagtcatatccctcctctacttcttactagatgtgtgccttcagcatgtcatttaacttacttaaatgtccttttcttcattgttaaacaaacagacaaacaaagtaaaagaaagaaaagaggagtgccaagaaccttcattttgcctatttctcaggattatcgtttggagcaagtaagatcattttaatgtacctagatgtaatttggcaccatatagagtcaaggctctgctgcaatagtttttcatatatgtgctgtaattacgttgaccatataattcatcattcaaaccaggacactttgtagagtgaaaggggatgctattaataattacataacaggtataatcaggactgaacccagtaaatctgcttgcatggtcaccagctataataaatatgccagttttcagaaaagaaactgagtgatgtgaactgggttatgtttcccaatggtgagcatctagtggggaaaaaataagtaaacattcaaggaagaattcagcaagtcaaagagatccagctgaaaatttccaatggaataaggcagactacaaatagacatacaaagtaaaaatgaaaaacaatctcttttttgtctaattcaaatcatttcttctttcccaacatcaagtaacccactcaggttccccatttagctcacgaccggtgtgcttgcctctcctctgacctctatccagtcatttctccactgtgctcccctcccacagagaattctatccacaatgcaaaatgtcttggatcattccctggcataaacccctttaatggcccttcatcacttgcaggagataccttcagccccaagcatggtacaggcacactatggtctggccctccccctacctttccccagcctcctctcctaccccctctgacctcacactttatttatattctagaaattcccaaacacttgtatctcctgatgtgcagtgctaaggtctgtatggtgacaccttgctctgagccattgtctcagcctgcaatgttctcccccattgcctctgcctctccaggtctcactcgtgattgtagtcgccactcaggggtcatccctgaaggaacgactagacatcccaggccagggacaatgccctccccgatgctcaccgagcatcctgaatactggaatggttaagggcacagacttggggcacagaatgcctaggttcagatcccagctgaacttgggcaagttgcttaatcaagctatgcctcagtttccccacctgtaaaatatattaaataggactcatctagtgaggttgtagtgaggattaactgtgttaacattaatataatacatatataatttgatacggtgcctggcacacagaccattccccgtaagtagtagttgtcgtcctcagatgtcgtctgtatctggctcttgcaagggcaaaggctggatctaattcacatgggtatccctggaggctcctaataagtgttggttgaaatgaactgagttggccaggcacaggggctgacgcttgtagtcccagcactttgggaggccgaggcaggtggatcaccagaggtcgggagttcgacaccagcctggccaacatggtgaaaccccatctctactaaaaatgcaaaaattagctgagtgtggtggcacacgtctataatcccagctacttgggaggctgaggcaggagaattgcttcaacccgggaggtagaggttgcagtgagccgatatcatgccactgtactccagcctgggcgacagagcgagactacatctcaaaaaaaagagaaaaagaaaaagaaaaaagaaatgaactgagtttaggagttcttgggcaacttcagggagactctccgttcccctgttacattaggggactcattaatgtaataaggaggcactgaaactttgatttcagctgctgatgggatgactttgccatgaggaaaatggcctacccattataccagccgtgctcctgctccttccaaatccctagggaaactcacctcgctggctctgcctgcccttggtgtttctttcagtttgtttctcccactccctgccctgatccccaggcagctcctttcctagaggagggcagcttctgacacccaaactccagaatcacgcatgtgcctaaccacatgaggagaccaaaaaaataaataaatacatacgtaataaatacagcaccttgtatttgttttctcgctctaagtccaggggttggagattttccctcaaatttcaacttccctttctctggcctcacatttctaaatatactcaaatgaggattttatgagcaaaccaagttatacataaaacatttttacattcctacactgacaaagtgatttaactgtgtaaagggcacttgaagtctaagtatgacacatgcttcaaaatttccttaaatttccacttttaaaaaaagggattttgaagaactccagaattcccagacattttcctactctagcctgactctcaagtggcaatgtgtgaccatgcagcagcctgttccatgaaaagcactcctgagtggagaaggctagggcctcaccgagtcttttgtgtccaggcacaagcccttccatcaccatcaccgcctcccacaccacactgaacttcccaagaagaagatgccataaacagctggagttgcctctgcagagcaaagctcccaggaggccaaacatctgggcagctgccaagagctccagttcctccagcccttctccgttttagggaccttaacatccctttttccccagatctcttagcaaatgcctaactgcattctggggtgatcacacccactaaagtgcttcgttgggtcaaggaagcacaggagagaagccagttgccctaccagtgtcctagcataacagctgttaaatccagaggggtgcatcctgcccaagacagggtgaagcactggtctttgtctcagaacagaaaacagaaaagggtcagaactacgtcagcaggaatttgggcttaaagtttctgataatcagttagtgggcatcttagttcatcctggctgctataacaaaatactttagactgggtaatttatgaacaaaaatgtattgctcgcagttctggaagctggaaagtctaagatcaaggcaccagcagattcggtatctatggggaggggggacttgttctctcctccaaagatgctgccttcttgctgcattctcacatggctgaaggagtgggaggggcaggcagtctcccacaagtcactttataagggcactaatctcatttaggagagccccaccctcatgaccctaatcacctcctaaaggccccaattgtggattaaattccaacatacaaatttggggggcactcccacattcacaccatagcactgggtgaaatgaggaccaagagcttagggacagatgtttatagagtgggcacctgctgcagtcttggcaggagaggcagtatgacctggaggcacagagccctagagcccctcagccctagtttgaattccggctctcctagttgccagctgcatctttgggtaagatatctacactctctaagccttggcatcctcatttgtaaaatgagatgatggtaacaatagtgcccatgccatggtttttctatggggattaaatataaaagggctcaatatagagtgttacatacgaggctgctcagtaagtgctacaattgttatttttattcctaaggtttgggatttccctggactcataagaagaccaatttctaaaccagcacctgcctctccaccacatgacctcatcttcaccatagaggtagatgtccagttcacaccacctgaaaaactgagggcctcagagaaactgaggcctcagagaaacagagaaactgagggcctcagagaactcctgcaggccctccagctggccactgccagccctgcccaggaccccatatctcaccagttacttgtgtccaccctgtctccttgctccatcctaccccagtttagagagtgagaatgctggctgggaccccaaagacctatctgcaactccccaactccaagaaagggggggctccaacaaggcagggctgtaatgagatggaagatttgggctaatccggagccaaatgagggcctaattcctgctgtaaaaatctgtcagctgctagttaacagttcctctggccctgggcttgagggtgggggtggggggtggcctctgtttgcaggagcagttgggcttgtacctagggtgttgtttttctcccttttccttgtttttacgtttttggaatgtgaatataaactttatggaggggcctggtctctgttcacaccgggtgctaataacccacagctgaaagcagaggctcagaggaaacccgggaggtgcagcgcgcagaaggctacaggaaccggaggggcgggcacgcggctggaggagggggccgggacgatatttaatatttaatttgctgggttttttttttttttaatgtggaaacttttagacacaaactggcccctgtgtttaagtcattaaaacatctttaagcattttctggtttgagtttgctctgcagccgtcctggttcctggaatgtattttatttttcttttaagtcggtgaaagcagaagcagaaggaggttgggggtagggggctggtatgggggaaaagtgcgtttccaacagatttttctttttcttgttcctggggtggggaagagggcggagaaggagagaacagggctccctgtgtctgatctttaatccccaggaatcccgctcggccttttagggcccatgcacttgctgacacgacatacattcgccgcctatgtcgggggcgtctctcgccctctaggccgagcagggaatcgttacaaactgggttaaagtcgccctaggcttgggggcgggcgaggagcggcgctgggacgtggcgcgccaaccgagcgcaccagagcgcggcgcggcgcggcgggaaacaggcttgggcctcggttgtcccgcggcccaaccaaggggcccgggcctcctctctgccagggctcacagcgacgccctcacggcggaatctcaagcacttccgcttggcacccaggtccagtgtctgcctcggccgtcttggccgggcgccacacgtggcaaggacagtgcctaacgcagttgctccagggggacagggacggaacgcgcacgtggcaacccagggcctaaggggacgcctgcaacgcttctgcccccagcgcttcgtgcccgctttcttgacctcaggacgaagccctaataaaccagcagcacagccctggcgtcttaaagaaggaggcctagaattcggattcctgggccgcaaggtctgaacccagactcagaagagccgcggtcagagataggagccggatatccgcgcagaaactgtgctttctttgcggtggagacgcccaggccaggagtggggctgaaagttaaatgggatccccaggccacctctcgaaagtggggtagttaccccggtactgctctgactaggcgggaggattggcatccccaggacggagccctaccaggcaggcagagttggagttatcccatcagtggcgcagaactttatggcctcagcgaatcccagccccagtttcagctcctctgggaactccctcccctactgagtctgtcttttcatttgaataatggggaggcctgaacaccttttaggggagggagggaggaatgagcagttttccaaaaagcgttctttttcacaagcttggaaaataggatggaggcgcgtctgagagatgaggatttggcgggccgtctggagtgggtaatgggaagctcaaggcgtgtgtgtgtgtgtgtgtgtgtgtgtgtgtgtgtgtgtgtgtgcagagacacagtcgagttagggaaactcttcgtctaggagagcctcttgtaaggtgatccgtctcctccttcctgccaggctcagaggccaccagcacagatggctagtctaccagctccccaggggagcctcctcactgcagtcctctgcgactccacactgcaccagtgtcagggactgtctaggagcaaagaggaggcctgagaggccgccaggcgaggaggtctcacagagcccagggcacggccacttcagagccttttggccttgctcctctcaaacgccctgggacttggggtggaggtggtgggtaggtcatggtaaaccaaggacttggtggttgcatgaaagcaagggacttgaaccagttcctgagctggttccattcctccttcacccacccagcaggctttcagggtgcctggcattatgctaggggtagaaggacaaactggatcctccgggagtttgcagccttggcagaggagctgggctgaagtttagtgaagggagcggccaagcacctggttatctcactgcctaaagaccttggttccaatcctgcctatgccggacctggacttactcatgaccttatcaggactgctttagtgatttttgccctaaaattagaaggccttgcaggtcaggaagctacggctccatgggtccctgagctgtcctgtgccatatcatgaaggtaggcccagtccatcctcacacttccacccttcaggctcggtgtcttggcggccgccgcctccagcccgagagtctctagctgagtgaataactagcgctcctgcgcgcagcaaacacacattgctgaattcccaaagagaagaaagcgtccagagagggctgtctttcatttggagagagcttttcatctggcaagatccctcctgctggcctctcacgctactggggttggaggaggaagagtgagacctcgcacgtgctgagcggatggagtgaacctgggcttcccagcagcaatgcgccatgggtcccccgagcggggcccggggacccgctgggcgccttccacagatccacagagcctggcccgctgtgcaccctcagccctcccgggaaggacctttccagccgtccctgcgcgctcttcgctgcagattccgggaactctggaggcgcaaacggctctgcctttgggacgcagttccattctgcaaacaagcaggccctggcagtaatttggctctgaaaattggtgccacaggaacagctgagagctggcaaggccggcgcccccgtgggtcagcgtctgtcagtccgcattaagatatgcaaagccgaggcgcccgcgcagccgccttcgcctctcggcccggcgcgtaattggtgtcaactgtttgattgcgataattgctactgtctggggaggtggcttccaggccccggtgggacagggcccgccactcgcccccgagggcctcctagaccctgccctctcctgccgactgctcgcggagacccacaggcccgggactccggtgggactccccgttcctccctccctttccctgcgagcaagggtggagtggggaggagagagagggtctatccgccccaatccccaccccccacaccaacacaaactacatcttcttttggagggaagaggaacgggagtgtttaggcctgcatgcttcaacccgagtcccacatttctgatcccataatagtcaagaccacaattaccctcgtggccattaccttggctggacctcactagagcctgtggaatcagtattattacctcctcccttagagataggaaactgagctgcagggagttagagcatggacctggtgagaagcaaggccaggcaggaaagataagctctccctagaaccctaccctctttcccattccacagaagaggaggcctggcagccagcttcatttggggatttgtagtgaattcactaatcaccctgattttggggtgcttgggcccgtggaggcaggaccatttgggggtagccatgcaatgcctcctgtcatgtcttaaggacttggaaaagcaaagtgggcatccagggtatctcatgaccaagctggcttctagagcaggatttctcaagcttggcctggatacatctttattgtaggggccgtcctgtgcgttataggatgtttagcagcattcttggcctctacccattatatactggtggcacacccacccaccccttccccagttgttataaccaaaaatgcctccagaaattgccaagtgtccctggtgaggagggaaacaaactgctcccagttgagaactgctggtctcaactgggtccctgtaagatccagagccaggtgtctccagtctggcaagtaagtctaattcaaagaaaaatttccatatcaactcgtatgctagacacagaaataagtaagtcagggccactgccttcaaaagaaaacaatgacaggcttagagacagagatgtagatgccatgtcagaagcagcacagaatgttaggggagctctgagcagaactcctaaagcaggctgggagtagtctaggagagcttctcagaggaggcagtgcttgaactagaaggatgactaatagatgtcctttacatttagtaagtaacaacaacaatcctgactagaatgcattgctatttgcctctgttctgttttcttaacttgcctggaataggaagggcttggaatgaaagtttctggaatatggggctgcaaatacgcaaaccccagtggagaacaggggtgtagggggggtgtctgcaggagcaggcaatgaaaaagtttgttgtctgtagggaattttaaaacaataataaaatctactaaaagtcatgtgctttttctgttatcaccatgcgccagccattttgtgtcagtaataaaatactcctccctgaagtaaaaaaaaaaaaaaaactcgtctgttgtgctatgttctaagcaattactgtggtgactgttgagtttcaaattagcacatttctattacttatcctttagtaaagattgtacactacctgatagttaatttgaaggactctcatgtatatagtcagcccagaatacacaggactcagctacactcttcattttgagattaagtttaaattcaaattcattagagctggcttcagccacagtttgtgtctcaaatcctatagttctgcacatccctgcctttaaacagtagattcaaaatcaacaatgatgcacagtgattgcaaagacaaagtaacagactcaagctacttcaattctgttattctccatgcaaatcattctctgaaacttgcagtttactcttttgggaggctttcctttttgttgttattcttttgttttgttttgtttttgtttttgtttttgagacagggtctggctctgtcacccaggctggaatgcagtgacacaatcttggctcacggcaaacttgggagtctttcttcatgtgtttcttccccctactccccaccccccaaaattaatataattttcaagtatcagttgcttttgtctttttgtactgtagtatttgtttatttcctgatacaattatacagagttgaataaaagaacagttacactgtctgacttttctggccattattatttacttgttattcatcatcatggtgataatttgataatatgggaggtgttaaaaatgatttactaagggtgcctaacacattaggtaccccactggtctggaaaaaaatgccagatccagtgagtgccccacaaggccaccactccctggaccctcgtggctgcctgctgggggctggcaggcggcccgatgggcaatgtggaccaatgtttccctctcacctgccttccctaggctctttccctgctaagtccctccacagcagccctaccccatccacccctcatccttctcttccctgtcctctcagcccagtctcagttgtgactgggtagggaagtctctcagaggagctaaggtatgacctcagggctggcacagttcaatgtaggccacagcctcagcaggacctgagaatgcatcctgttcaagagcctcagcatattggggaaactgaggccaaagagaggcaatacccagcctaagatcccctagccggttagtgggtcagggcagagctggaactcattacttctggcctgcctgtctgtgtcctttcatgacaccactcagccgtaacctaacaagatgggctaatgggagaactttagtcatcagcggcaggcctccctgggtgttctttctggccaggagggctgtcctcgcgcccttttctggctccagagtagccaaactcccagccttgggctgctaatggtgctcctcttggcacaaaggaagaggctgatggcaattgactcatcaaagacattttggcccctactattgcctagacttgtgctataccccagagacacagaaataaataagtcactgccactgacttcaagagaataatcaaggcataaagactgggttttcgatgtcacatcagactcagcacagaatgttcagggtgcccagaacagaactcctaaagcaggctgggggcagtatgagagggcttcccagaggaggcagtgcttgggcttgaaggatgcctaataaaaggctggcaaaaagaggtgggagtgtgggtagcttcagaagaggacactactcagggtgccagctccccctggaacctgtggagacctaatcatgcaaggcaccttctgccaagccctaccccctgtctcagtccacctcagaactcacctccaagcaacccattcgggcttctctgatgccattggcctccttgtgcatccgtcagtaggactgggctcctctgcagctggctgtcctctgttccctctcttaagcccctggggtcccgacccttgtgtctcttcctgcccatcccccagcttggtgcaggttggagccttgagctcaggtggcctttccctctttccattctctctttcctcttcctctttttcttctcattccttcatcctcggctttgtcattttctctctctccttgttcccctgtgtaaactgagggcagggccaggtgtgtgatggaattctctagactaggttccaggtgacctatacccacaggcatcggcctttccctggggagctggggttagcacccagccagactcttggcctagagctgaggttggaggcagggagttgggggagaaagacagtgtgacccagcatggtagggctgcccctttttttcaagaaaaggagatccgaggactcttcaaggcaaagacctcggctctcagcacctgtgagttctacttccaggaagcccccttccctctccactccccccttcccagttctgctgctgctgaggtggctcctgctcccatttcaaacagcaccagatccattaatagcatcaattttatttgcaccagccccagctccctccccgctccccaggggcacccgatccagaatgccaggccctgcttccttttctcctggaacacgctgactccctcccttgggcgccgggggagttggcaggataataacctgcgagaggaaaactctcttctccctgccttctaatcttcagcgctcaccaaattagaaaaggcatcagaagcccatcgggcagactgccgcagggatgtcatgccattaaccccgggccgcctcctgctggtgtaggcagctgggggaggatgtttcaggcccccacaaccctttcctgccccctgcctctaagcagaaatggaacccacccccagctcaatttctccatcaccctacccctgcccccatcaataggcatggactcccctaccccatcctcctaagcttccccataccccatccccaaccctgtgagttgcagggattttgagaatagccagaaggtccctggactcctatctaagccctcattttatacatgagaagactgagacccatggaagtgatgtttgtcatcctgttcctcctttaggacctcgctcagctggttcatttgtccattcagcaaaagttgactgaactcctactctgaacaccagatcccattgtaggcactggaagtgcagctgggaacaaaacaaattcccaccctcatgaagcccacaagctgctccttccaggaggctgtccctcatcccctgaaggtgggctaggtgtctcccacatgggaccacaattaggagcttacttgcctcccccctgggctgagcacatactgacagcagggagcctgccttgttcaactctgtatcctcagcccctgctgcagggcctgggacatttacatgttcactacatctttactaaatagtcatgacttacactcatgtagcacttactatgtatcagctgccaagtgctaagagacattattattattcctattttagaggagaaaatggaatcacagaaaggtgaagtgacttgtccacggtgtcgtcactccctgcctccaacctcagctctagtccaagagtctggctgggtgctaaccccagctccccagggaaaggccgatgcctgtgggtataggtcacctcgaacctagtctagagaattccatcacacacctggccctgccctcagtttacacaggggaacaaggagagagagaaaatgacaaagccgaggatgaaggaatgagaagaaaaagaggaaaaggaaagaggtgattggaacccaggtggtctggctccagagccgaagaccttattgcctcactgtgaagaaacgaatgtcaccaatgacccagatgctgggcttctctggtcatctcttctcagtcctcagggttagaaacttcttccccctacctttcatgactctctgcaactgcaaataccacctcatgctttgttttcccagttccaaggagatggagcctacagacagttcctggcctctgtcagatcatctcgctcagtccaggatatgctgcatgccctcaaacccagaaatggggctggtgtccccggtggccctcagacactcacttctatctccctgtctaagtgtcctgctagcccaaatcccccactccacccacttcagaaagccttgctatgcccacagtaccatttggatcagaaacaggtctctgccaccctgggtaacatccagtgtggcatagcctggttgctctctctaatggcttagggctgggcacatagtaattgctgagtccatggctggcttctgggctgaatctccctgggtgatgcatgcaaagccagggcggaattccacttccagccctgctataacttgctgtgtggcccagggcaagtcagcccctctctgagcctttctctcttcatgtactttgagggtttggactggatggcccctgggttactttcctctgtaaaattctagctttaattgcaaattgtaaactccaaccttcacaggtcagtgtcaagcagaatatccttccctgatcctgggtaaggcttgactgctgagataggtaataaagtgagaagtgtctgtaaaatggcccagagagggtacagcatcttgtgggggaggagggaccgggcaacctccagaaaggatctttccatggagcgtgggaggtaggaacaaggaaccggaatgacactgagttgccaccctgtgccaggccctgctgtgggtagcctatatgttgtcttgtattcagtgctcacagcctccctgaagtgagtgctcttatcccattttacagatgaggaaagtaagacttctctccaaggtcacaaagcaagcgagtctctgagagagaatcagggcacatgtgcctgatcccaaatattagactctgcccatggtacagagctgtatctcctggcttccctggaccacatgtgcctgggtgcctggacctgtgtcctgtgtcctgtccctgtgctgaacacccgggtgtgcacgtggaggtagggaaggtgtgtgcaggggaattgtatatactcacactatatcaatatctggacatatctcacactggatctggaaagccacatcagagtgtgtgtgtgtgtgtgtgtgtgtgtgtgagagagagagagagagagagagaatatacaagtgagatgaggggaagactgggaaaccacgggggagaaaaaagaaagaatagttgaaagggcagagagggacagagttaatacgcagaataatgagagtgacaatcataacaataataataacaagaataacacaaaccttgcctttttttttttttccaagctgaatgtgagctggagcagggctgaggggattaatctcttaaaaaataagtgccgagtgaggagacaggcagtgattaaggttttaactgatcagtctgcatctgacagtgaaccagctattatcttaacggaatcaaacgaacattcaaagctgtgctcagccccaaacatgaaaggagatgtcatctgctggcagctggcaagccgcagggggagctgaaggggagagaggaatggagggagcggaggagagacagagggggaaagaagagagtcacggtgaaggacacaggaaggtggaggaaaggagggcatgacaggctcctgcggccccgttccctccacccaccagacacacacaccatgtcccagtccccccagtaccccacccgaccagatcataggtgctaaagcacaggtctgagattcagtcactcccctgctcagaaaccttcattggctccccacttcctgaaggataaagacaggacatgatgaaggcaggggcccaagggaggaggctgtgaggctgtgaggctcaggctggagtcttgtttcctgcggtgcctcaaccaggacccctgctcctctcctccggctccagcacaacgaagcctccttcattaagtaagcagttccttaatgaataaaggaaatgggataaggaaaaagaaacaagaagaaaaacagacagaggtgcttttgccaggcatttagactgattttcccgtttaattctcccaacctccagaaatgaaggttattccagtctttgtcagagaggtggagcatcttgctgcagatcccacagcttgaaagaggcagaactgggatttgaaccccggcttctctgactccagtttctctgctcttctcacctaaaaaaaagtgggacggaagagcagacaacaggaagagaaggggcaaaccagaaaagagcaccgagggagctcgttcttctggtactttatccctgaacattaagccaaagatgtcccttcctgtcccactcttccaaagcaaaggcactgggtaagggggactctagaataagcttgtccctgggcctggaccagcacctagagcattcagtatttgttggaagagggaaggaggggagggtgtggtcccagggcaagtcccagcaggggtggaacagagaaagttacctgctctgtggccatcccacccctctccaggaccctcagacagaggaatacccagccctgaggctgtgtgtgagtgtgtgagctcaggggagagagaaaggaaaaagaagtggaaaaggaaagatttagaaagggagggaaaaaaaggaacatatctggaaaattagaaaagttgactcacatacaagggccctgtgacaatgtatttgtgaatgtggagctgaccctctaaccccacttcccctctcttactgactctctcacccacttgaggagacagctgttcctcaaagaaaataggcatatggtcctccgtctttcctctttgtcacacactctcagcctctcagcctctctctctctttctctctctctctctctctcactcacacacacacacacacacacacacacacacacacacagagtcagtgctgggtccctgctcacaatctgccactccaggcccatagcccggcttgggccacagccaagcttccagaattgctccttttggtccaggtaagaccaggcaggatccagtccaggctctggctgtggagctggccctgtgcttccctggtgccttgcccctccctgaatacagacttcaaggctggcccagaagggaggaagccagggcagaagccagcagccagccatggtgggtcagatgggcaggaggcaagggctcccctagagcttgcggtaattccctctccaggctgccagtccctgtactttccctctgcctccattctggttcaggacatccccatttcatggctgaattgtgacaacagcctcctaaactgtctccctctctttaacccacttgcacaccactaccaggagtctctttctaagacatagcccagatggcatccttcccttgtcagaaaccatcaatagcttccctttgcctggaaggatcaagtccagattgctaaagctggactcaaagtctcccgcagtctgcccctcactctcctctctaccttcgctcctgctacccctaccatcctcaccaccatcacccctgccaccctctagaaacatctcctcctgtgcaaagcggctctctgtccctgagcatgacacgtccgtcttcctactttacacatgcagtcactgtttttatccatctggaggcctctgtttcttccctccacctaatctctcctctctttaggggttttgaggttaactcaactttgttgagtacttaacacatgtccagcattgttctagtccctttataagaaataaatcatttactcttcacttgagccctataagatggatagactttacagaaaggaaactgaggcaaagagatgcaaagcgacttgctaaaatcacataggcacatccagaaagtggcaaagctaagatgtgaaaacttatcaaaccttaggaggttggcttcagaatctacacttttaactattacactactctgcctctcaagggcaccctcttcctccttaaagccttcactggccacccagcccccatatccaatctctttgtcctccaccttcctcaagtatatgttatctgtacctctcatgggttccttaattacacaatgccttgaattagtactttgatctctctgtgtgttaattttatctcatgaactagattatttattatcaagagtataaacgtataaactgtgtttgccattactcttgtaaccccaccatcaccaccagttacctagcacactgctaggcatacgggttagaaataaaaatagcaccagttaacatgtgagtgcttactaggtgccaggtactgttctaagcactttccatggattgatgtacttattcctcatagatgggaaaattagaaaggttaagtaattttcttgttcatggtcacacagactgtggtaagttaaaaattactacaaatttttggtcattctcccactgagaggtaaagtttatttccttttcccttgactacttcactaatagaatgttgcagatgtgaggctatgccactttgggcctaagccctaagtcaacctggaagcttccacttttgtgcatcttggagctctgagatgctatgtacaaagtctggttagccaactggaaagaccatgtggagaagagaggccctgaggatgcctggagagcaacaggtccagccatcccagcatctcaatcagtcctccgctgactgcagccccagcctccatcaggctgaaactctaagaaagacctgcagaagaatcacccagctgagcccagccagcccacagtcctaggaaagatagtacgatggttgttttaagccactgtgttttggggtgtttttttttacatagcaatagaacactaaaaacgggcaggtcctgttattttccccatttttcagaggaggaggaaatagatggagggctataaatgttatgtgattactttcccaaggttgtgtagctttttaattagcaagtggcagctgaggctagggcctaggtctgggaaactcagagcctgaggaaaatgagttgttgcaacagttaaccctcagttagttgctgaaggcaacaggttgtcatcgactaggtgtctggaaatagcccttgaccagtagcgcaactcattttattcctgaacctcagtgccctgctgtacactatgagaggaagcggagagcagctgcttcccaattgtacactgggagtccagggcaggggggttgcagtggatgaggtgggaccaagaaggcaggagtctagtagctgcctcccaccccccacaacacccgccaccaccactgttgatctgatttctctatggaacatttacagaagattttctttgaaaaatgcattgtggttgcaaaactactggaccagataatttctaaggcccctgctagccctgacatttcaggattccatgaatgaatgatgggaatgaatggatgggtggatgatcaaactgctatggttcccgtctctggatgaataatgtggaagtacagagagagggaatgaatccatgaagcacggagtggcttggaatgtgggggagttctggaacttggcaacagaagggccgggaggaggctgctagcaatggctacggggatgagaagggatggagaagggtaggcttgggaggtagagctggggaggcagcctggggtgcctgcactcaccatgagaagccagtgtggcatcaagggttaagcacacatgctttggggctagcaggcatgtgtttaaatgtcagctctattggccgggcacagtggctcatgcctgtaatcccagcattttgggaggccaaggcgggcagatcacgaggtcaggagatagagaccatcctggccaaaatggtgaaaccccgtctctactaaaactacaaaaattagctgggtgtggtggcgcatgcccataatcccagctactcaggaggctgaggcaggagaatcgcttgaaccagggagttggaggttgcagtgagctgagactgcgccactgcactccagcctggtgacagagcaagactccatctcaaaaaaaaaaaaaaaaaaaaattcagctctgccctttactaggtattgacctgtgaaccgtattaaacctctctgagcctcagctttctcacctgtaagatagaaatcatgaaacacctagctcataagactggcatgggataaatgagatagatcaggtgaaaagcataacccagtgcttggcacctagtgagtacttcataaatggtagctgtgcctccttttggaagatcttgatggcctgggttagccgaagccccagtagcatagctaacctcaagaagcccagaaaggtgccctccacttgtctcctggtaaaggtgcaacatggtatgtgtttggggaaggcaggtgggagggataaagcagagcctgaggcaggtggggtttagggtgtcatgcagagagatactaggaacatatggcaggtacccagatactgccaggcctcccaagagctggaaactgagcaatcggctggaagtgggagagagctgaccaagctaattgggcaatgtgaatgagctctctcagtgggctgtttctcttgaaaaggctgaggataaatctgggaggcttgggtgccatcccaccctaagctataccatgagagagtcatccctttggcttgtgatgtttcccaatgcaaggcaaatacagtctaggaaggatttaacagctcatagaaattgcgattagacctacaaatgacacaggacagggctctcgggtcagagagacagtgttctgcagtagctgcaaactttgaagccagtcaactggggttcaaaccctgattctgccattaaccagttgcatggctattgagcctgtctgtgctaagtgctgcggaagtagtcatggttcctgatttcacggcatcagcagtctagctggagagtcagagactcagaaaaggttggcagaccccttgggtggcgggtaacacacccattcacatcagagagtcagtacttgagctggagccaaggaggatgttagtgcaggttctcagagaggtctccattgaccaggacatgccaggctgggtttggagagattaaggggaaagcatttagagagaggagagtctggagacaggaacacaaatagcctgtctcaccagagcagggagtggggttatggggtgggagttaaggtagaggggccttagggagccaagaaccttgaataaagatggagaagtttgaagctcccagctacatccactccctctgggcagaggcaggagtaaaggacacaaagatcactaaggaggacaatgggactcacaggtgcctctgctgaggctgcgtccactctgataacccctgccagctgccccagcatccctgggtccccagggtcaggccattacagggcgagatttatcacaggcaggtgtgctccaagacggtatattatccaggattatgaactgtaacaggataatctctctaatgtaattcaagctctcgacatggcttatggctccttaatgtacctcagactgaagaattacaagaacattctcccccccagctccccatgtcccctccctcccttccctgtcaacccctaaatgatttaggcaattgcctgaagccagatcttggcatttagtcataattcagtgcagttcagtaaacatgaccggcaaggagctttgcctgcctgtccctctcctacaaaggcctctccttcctcttccacccaaatccagcccccagggacaggctgagtgcaggacaatccatgacactcagtaccctgggacccccccccaagagacactctaggtaccaaggcttgagctgccaggtttggccttggctttcccaataatccagcacgatactgccctgatggcatcaccgtctagatggagaggataaccccagagcaacagaataatgtcacagccctgagcatctgaggctcctaagatcctaagatgctccaattctgtgaatccatcttgtaaactcatgcccctttgggaaaacagtgaaatcttctgcaagctgcaccaacagaatgttttaccaagttttactttctatagtttttcccttcctgcaaaacaaaacaaaatcttctccagggagctgtgcccctgcaactaaaaaactgatctaacccaatctctttcaccatacaggtaatgatcttgtaacccagacagaagggtctttcctaacaataacatttactgagcagttactatgtgccaggcattttcctacatactttatgtgattcattcatttaatgcatccaaaaatcctttgagtaggtactatgattccccattttactgataagaaaactgaggctccaagaggtgcagtcaaggtcacagatatattaagtgggaagctggcacatgagcccaggtagcctggctccagagcctgtgttcccaaccactgctctacaacaactgcagggtcacacttgaagttaagcacttgaacctaagcaccagaacccagttccaggatttcctccacctactgagcaccctgctgatatatcaaggggataggacaataagatttactcctggctcctagacaacatcagcgtattttcatagtggtcccaagctccccagggtgatcagaagaccaggcctcccatcagccagccagtggaggctatttggaagcccctcagctcaactgaggcaagtagtctcttcccctgcccaccccatcattgcaccctcttctgctgctacattctttgtggtcatgcccgacttccccgcttgccttaaatagagagccagaggcccctccaggctgccaggatccaaggaaggcaggatgaatctcccgcacagtgggaagcaacctcagattgggaagagttcctcccaaagtcaactcaataaaacaaagaagtcttatggataggtgattgagtacatattgagtgccttctgtatgcactacattggtctttccctaatattctttctgatcttgagcaaatcacttggtcctttggtagctcattgttgtcatctctgaaatggctaatactagcagtgaggagtaaattataagatgcaggtgaaaaaaagaaactttataaggcactcttacttgcaattgtaacaccacatacacacacacacacacacacacacacacacacacgcatccctctgattgagttggtcattttggatctctaagtaggactggatttagttgtgtgcccaccctcacccctgcacccataccccagtaagaagagaaaaatccaggtgaattgtctatctttaacctctgcctctgaaataggttagatctgaagttataccagcctctccggatgctgtctttgacatttgggaatcttcgtcctgggagaaaatactgcatagtcagaggccctcaggggatgctgccagatgtagagggaatttgtcatctatactgtttgctcattgacttgtataaatgcctatggtacttggggtaaagaaaccagcacaggagtgtgtagattcctgagttacagtcctgcctctaacctccctttccctgaacctcagcttctcatctgtaaaacggggtgtgaggaggcagtcccaggtccctcccagtctagcatttctttgcaggtttgctctgcccctttcctaagtcttcagactctctctcttctggcctcttcctgcttcctttctgtgctgtttagctgaccatctctaggctcagtaggtgcagagacctgttattccaggaaatgccacgagggggagccttcatttggatgcctggggtcagaaaggaagccaatttcaagtataaggctggggaaaaataaaattcagtcagtcccaagggaccccatcaacagccaggcgaaaataggagggagagggctctaagctacaaagaccatactctaagttctcaaaggactgtgatcttgatgtatatgttcattcttgtttctcagtcatacactttaagtatgtatggtgggattatctcatttgacactcagtctaattcgtgagtcctgtagggcaggtgaaattatctatgacctttacaggtgagacagcctagtctctgagagatcctaggctcacctagggacacacagccaacatggggcagagctgttgatggcccaggtcttactctacatgtccccgccccccgccccccatggatttgccccaggctgagcacaccagggatcttgagggacacttcttgaatgagtgaagaatgaatgaatgtatgaatgaatgaacgaatgaatatgtgggccctctgggcctccctggagtaagccttctctgccatgcattgctccactccaacacagagctaactgacagctttgtgccattgtctacctctccctctcaccttctcacaatgttcatcccttaccatgagactcaaagctgagggggactttcaatgggtccaattcacttgcacaggtgaggaaagtaaggctcaggaagggaaagtgactagctcattcctacaacaaatacttactgagtgcctatttgtgtgaagccctgttctaagggctgagactttttgtaagcctctgtcttcacagcacctccaatctaacagaaggagatacacaaatcatcaggtaaatatgcagcaggttagatgatgacaagcgcaactaagaaaaacagagcagggcaagggaggtggagagcctggtgtgtgcattggggtgggacattggtcagagaaagcctcagcagagaggagaccattgtaggaatctggagggaacagcaagtgcaaaggtcctgaggcaggagtgtgctgtcctgcccagggaacatctaggaggcaggtatggctggagtagagtgatgaggaggaggtgaagggtgacaagaaggggcagaggggtgatcagatcactagggttttgtaaggaacattttctctgagtgagatatactgctattggaggttttgagcagaatagggacatgatctgactttagttttaaagggacaaccctggctactctgttgagaacagactaagagggagaagggaggcagagagacaagctaggaggtgttgcactactctagcaggagacgatggtggcttggaacagtgagctcagtgaggaggtggtgaagagtagcaaattctggacatattttgaagacaaaataaacaagatttgctaaggcatttggatgaatgatgacagaaaaagagaggagttgagaataactccaagattttcttccccagcaactgggaagatgaagctgcccttttctgagatggagaagactgacaggtgggggaccggggtggagatcaggatttccaagtagaacaagttgagtttgagatgcctgctagatatccaggtgaagtaggaaactggatttatggatctgcaggtcaggagcaagattaatagtagagctaagagaacaaaaccaaaatctcacatctctcgactcccaacagagttcttttcacagtacgtagagtactctcccgtgggctggagaatttaaatacctgcgctcaaaacctaaaacgcaaagaggaaatacggtaaccctgagcgcactaccctagccctagctctagctctagctctagctctaccagcgccagagctggaggaggtcagaggagaggggccgtactggagggggctggctatcttggggaagttgggtgaggcccgagggggccaagggctcagcatgcaactgggccggagtgggggctgctgggcttaggagcggatctccaccgaggtctgggtttcttctctcgcaacggtcttgactgtttccttgagccaccgtcagatatttatttaacctcgcagttcagcctcctgggggcctgcagggaagggatggaggcagggcggagaaagctgggggagaaggggagcgaaagaggaaacattttcctttccatgcgcaggccgagctcacgcatagagtcccacccagggcccccagtcttctgggggccagcagccccttggattccaagtgtcaacgtgagaattcaggaaccacgacagtctacccatctctatttaagaacggagaaaccgaggggagaggtaactcgcccaaggtcccacggcgagtccagggcggcgctagactcccagtctctggggtctctcctccattctagcccgtcagatgagcaccggagaccctgtagtgtcggggctggagtcagaggacctgaattttgtgcgaagccacaacatttaccaggcttgtcattgggctagacactttgcctctctgtgcctcagtttccttgtctgtaaagggcatcgctcttgcccctaccttccttggcttgttgctggacaaataatgttttttaaaaaagcaataccacctgccaattgctgagccccagtgagcctggcactgtcctgggcgcatcgtccaagacctccgtgttctcccggctttgtaaatcccgccgcttctccagccagtgagaatgggggctaaagggaggggtggggggtgaggccagaacctggctgtctagccagaaagaagcccctcagcgcaaagcgggggcgcctacccccaggcctaggggtcggtgtcgggggcactgggagaggggaagctggggggtacgggagcggaagtccctgctgggaggcccaacttccccttcgcccctccccccggcctgccccggggcaggtgaagaggggaccgggctccgctccaggtggcggggcagcgacgggggtggggaaaggcccggcaacaatagcacttttatttgggactgtttggttctgagcgggtgggcggaggaggaggcggccgacccggctgccagggagggggctggtcagcggcatctggctacacacctgctcccgcttaaccctgtgcgcgctggggcagggtgcgcagcgcaggggcagggggagcgggggcgttggcagccagcgccgggagcgacgcaggctgcgtgcggccagcctcgggggccccgggccaggtctggcggtctcggagagagcaagaatggggctccctagtggagatctgtcgaggggcaccaccagggctagcactgtaccgctaccgctggtggtggctctcgacctgcgctggccccttagggctccctggtcggcctccagcgcgccagggcggctcgggcgggagagggaaggcgaggggtggctccggggcctcggcgctgactccccgccgccttcggggcgttccgggaagccggccttccggaggcggcgcggcggccacggccatgccaagggcgcggggcgcgggccaggcccagcgggcggccgccaggcgggggagctaacgctgggcgcgccctcgcgcactaaacgcttcctggctggccctgcaggtgagccgggatgcccagcacaccggaccctgggcctgggcctcgccgacgctccttgccagtccggcgcccgggaggcctagccctcagctgcacctgcccgcggagggacccccgccccctctaccccacacccccaccccagggctggcgcgcttgcctgccgcacaatcggagcttgtttgtgggcggaggagccgcgccgggtgcggcggccccgcgccagcccactgatc

SEQ ID NO: 60094 - DNA, 4707 bp, Homo Sapiens
gatcaccatcaccgagaccacctcacacagtactcccagctacactacctcaatcaccaccaccgagaccccctcacacagtactcccagctacactacctcaatcaccaccaccgagaccccatcacacagtactcccagcttcacttcttcaatcaccaccaccgagaccacatcccacagtactcccagcttcacttcttcaatcaggaccaccgagaccacatcctacagtactcccagcttcacttcttcaaataccatcactgagaccacctcacacagtactcccagctacattacctcaatcaccaccaccgagaccccctcaagcagtactcccagcttcagttcttcgatcaccaccactgagaccacatcccacagtactcccggcttcacttcttcaatcaccaccactgagactacatcccacagtactcccagcttcacttcttcgatcaccaccactgagaccacctcacatgatactcccagcttcacttcttcaatcaccaccagtgagaccccctcacacagtactcccagctccacttctttaatcaccaccaccaagaccacctcacacagtactcccagcttcacttcttcgatcaccaccaccgagaccacctcacacagtgctcgcagcttcacttcttcgatcaccaccaccgagaccacctcacacaatactcggagcttcacttcttcgatcaccaccaccgagaccaactctcacagtactaccagcttcacttcttcgatcaccaccaccgagaccacctcacacagtactcccagcttcagttcttcaatcaccaccactgagacccccttacacagtactcctggcctaccttcgtgggtcaccaccaccaagaccacctcacacattactcctggcctcacttcttcaatcaccaccactgagactacctcacacagtactcccggcttcacttcttcaatcaccaccactgagaccacctcagagagtactcccagcctcagttcttcaaccatctactccacagtcagcacatccacaactgccatcacctcacattttactacctcagagactgcggtgactcccacacctgtaaccccatcttctctgagtacagacatcccgaccacaagcctacgaactctcaccccttcgtctgtgggcaccagcacttcattgactacaaccacagactttccctctatacccactgatatcagtaccttaccaactcgaacacacatcatttcatcttctccctccatccaaagtacagaaacctcatcccttgtgggcaccacctctcccaccatgtccactgtgagaatgaccctcagaattactgagaacaccccaatcagttcctttagcacaagtattgttgttatacctgaaaccccaacacagacccctcctgtactgacgtcagccactgggacccaaacatctcctgcacctactactgtcacctttggaagtacggattcctccacgtccactcttcatactcttactccatcaacagccttgagcacgatcgtgtcaacatcacaggttcctattcctagcacacattcctccacccttcaaacaactccttctactccctcattgcaaacttcactcacatctacaagtgagttcactacagaatctttcactaggggaagtacgtctacaaatgcaatcttgacttcttttagtaccatcatctggtcctcaacacccactattatcatgtcctcttctccatcttctgccagcataactccagtgttctccactaccattcattctgttccttcttcaccatacattttcagtacagaaaatgtgggctccgcttctatcacaggctttcctagtctctcttcctctgcaactaccagcacttcttcaaccagctcctctctgaccacagctctcactgaaataacccccttttcttatatttcccttccctccaccacaccctgtccaggaactataacaattaccatagtccctgcctctcccactgatccatgtgttgaaatggatcccagcactgaagctacttctcctcccaccaccccattaacagtctttccctttactaccgaaatggtcacctgtcctacctccatcagtatccaaactactcttactacatatatggacacttcttccatgatgccagaaagtgagtccagcatctcacccaatgcttccagttccactggcactgggactgtacccacaaacacagttttcacaagtactcgactgcccaccagtgagacctggctgagcaacagttctgtgatccccctacctcttcctggcgtctctaccatcccgctcaccatgaaaccaagcagtagcctcccgaccatcctgaggacttcaagcaagtcaacacacccatccccacccaccactaggacttcagagacaccagtggccactacccagactcctaccacccttacatcacgcaggacaactcgcatcacttctcagatgaccacacagtccacgttgaccaccactgcaggcacctgtgacaatggtggcacctgggaacagggccagtgtgcttgccttccggggttttctggggaccgctgtcagctccagaccagatgccagaatgggggtcagtgggatggcctcaaatgccagtgccccagcaccttctatggttccagttgtgagtttgctgtggaacaggtggatctagatgcagaagatttttgcagacatgcagggcttcaccttcaagggtgtggagatcctgtccctgaggaatggcagcatcgtggtggactacctggtcctgctggagatgcccttcagcccccagctggagagcgagtatgagcaggtgaagaccacgctgaaggaggggctgcagaacgccagccaggatgtgaacagctgccaggactcccagaccctgtgttttaagcctgactccatcaaggtgaacaacaacagcaagacagagctgaccccggcagccatctgccgcgcgccgctcccacgggctatgaagagttctacttccccttggtggaggccacccggctccgctgtgtcaccaaatgcacgtctggggtggacaacgccatcgactgtcaccagggccagtgcgttctggagacgagcggtcccacgtgtcgctgctactccaccgacacgcactggttctctggcccgcgctgcgaggtggccgtccactggagggcgctggtcggggcctgacggccggcgcgcgctgctggtgctgctgctcgtggcgctgggcgtccgggcggtgcgctccggatggtggggcggccagcgccgaggccggtcctgggaccaggacaggaaatggttcgagacctgggatgaggaagtcgtgggcactttttcaaactggggtttcgaggacgacggaacagacaaggatacaaatttctatgtggccttggagaacgtgacaccactatgaaggtgcacatcaagagacccgagatgacctcgtcctcagtgtgagcctgcggggccccttcaccaccccctccgccctgccccggacacaagggtctgcattgcgtccatttcaagaggtgaccccaggacgcgggcagcccaggctcctgctgttcttgggcaagatgagactgttcccccaaatcccatccttctccttccaacttggctgaaacccacctggagacgcagttcacgtccaggctcttccactgtggaatcttgggcaagtcagtaacgagcctcagtttcctcacctgcaaaacgggtacagcattcctgtatgatacgtcacgccgttgttgtgaaaaccacatagacttggtcaattctcggtcctactctgccctcccgtctcagccctcgtgttgccattgcctctctcggatcctccaatcctcacgtccttcacctggtctctggccctggttcttattttctctcaattccctactgcctgtttcttactttgaacctggaggcagcctgcagccccatcccatctcctgccctctcctgatctaactccctgctgcatctcttgctcccattccttagacgtcctccccttttgaccccgttccttcatccatcctgcaccccagtcccccagccctaaatcctccctcctctcctcacatcctggcccctagcaaggtatagatagcctctgtgtcttaggataccccgggtgctgttccctcggtcatcctgttgcccagttccccgtttctcttgctctcattcctgtatcctttccccttttgagcccgtccattcatcggttctgcccccgactcccccagccctaaataccccagctgctgttccccccatcaccctgctgcccaattctttattctccacccctttctctcacccctggagccctgcgggtgggggcagggcatgagttccccagtccccaaggaaaggcagccccctcagtctccctcctcctcattcccttccatctccctcccctctgccttttaaacccatcccctccgattcccctcctcccccctctctccctggtgtcacctggattcctgcagtaattctgagcccttgaaatcctcagtcgccttggcggggaagattggctttggggacaggaggtcggcacatctccaggtcttcatgtgcgcaatatagagtttattgtaaaaagc

SEQ ID NO: 60095 - DNA, 634 bp, Homo Sapiens
atctggctccacgaagcaggagactctccggccccagaggtcttacaatttcttccatttgttgggttatgatcattcgtcccatgaatctgtataagtctgcttctggttgctggcattctattacagctactagagtgtccaaattggcaactgtttgtaataatgctgtttctggaactgccacatgtgtcttcaggttagtttctccgtccaaactagcagttgtaacgtgacaggaaccatccagtcgatctgaggacagaagcaccaagtctgcaggaaaaatttcatctttggctattcgaacaatatcacccacccgaatgttttgtgatctagtttttacaaaggccaccacttcgagcaacgtaaacaggagctccatttacttcattatctgagttatgccgtaaccaatcttcatatccctgctttatggcagttacggttatcacaaagaataatggaagtccactggtaactggactggtaggtgtatcaatcataagctgaaccaaaagtataatagagagaataagagtttgccacgcttctgaactgttcaaataaaatttttgggaacaaaattccacacagtgtacttagatgaaatgatccggttagcgggaaa

SEQ ID NO: 60096 - DNA, 515 bp, Homo Sapiens
ttttttttttcctgtagagatgggtttttgccatgttgcccaggcttgtctcgaactcctgggatcaagtgatccacccaccttgatccctgaagtgctgggattacaggtggaagccaccatgctggccagttgattttttttttcccaaccaccaacaaaccaaattttttctataaatcttctttgataattcattccagttaacagttgttttgcagataaatactatccattgcaagtgggacagatatatgtggagaaaactaaatacaaaaacatcacctctactcagaaacaaagcatttcttcattatcagggagcaaatgtctaccttcaagaatgttatcagctattaacattaacagtcaaagtgagatattaaatatatggattggccaggtacggaggctcatgtttgtaatctcagcactttgggaggctgaggtgagaggatcgcttgaggtcaggagttcaagaccagcctgggcaatacggcaagattctgcctcta

SEQ ID NO: 60097 - DNA, 453 bp, Homo Sapiens
cggccgcgcgacattttttttcaggaaggtgagtctttcctctctgaaaaaaaatctgcaaatcttccaaatatgattggtattcccataggcatgtaatgacattctgtccataaataccctttattctgtagcccagtcagactcagactcttagtggctactttccttccttactgtcttccatctttttattaagcagattggcttggctggtcatactctactgctggttttgcccgactctataaccaccgcctgtcccgtgtgagtgaaggcacatccttatggaaattgctactgttctttccagtgacaatctatttttcatggtggaagactagcatttggatgttttaggaatgactgaactaattctaaaaagaatgtttgagggaaaagttctctgcctgagatgaatgatttaaagaaataagatgggctgtagtctca

SEQ ID NO: 60098 - DNA, 716 bp, Homo Sapiens
  misc_feature (239)..(239): n is a, c, g, or t
  misc_feature (655)..(655): n is a, c, g, or t
agtgtttttttttttttttttttcatttgatttctgtttttatttcatcttgagcatgtgaaaaatcagtggctttttaaattttcaaagttgactgcctagactgataagtttaagaacacacaagtaaatgtcaacagtctcttgtgttgctgacacactcaaaccagtgctaaaacaatttttgtcttaactctgaattatacatgttcagacctgctattgaaacaaatgcattntgatatttggatttttctaaactaaacacacagctgtgctaggctctttgctctgttagccttctgaccattttatagctctaagcatgtgatattttctcctagaagactccgaagtgctagaatattttcagagggcaaagccttataataattcttactggaagcaaactaaacaaaaaccaagttccagaaaacattgcttctgagaaattctcaaatatcatcaagaagaataagtggttaacttaaaaacaaaactatggcaatatgttaaagtacaatactgcagtaagggtagaaaacacatctaaggtttcacccttagtgttaagctttttaaaagcaaaaaggtcatgtgtatcaatttgcagtgtactaaaattgtgttcaaagtttattttcagtcacagaanatatacaaactaagacaataaaatgaagtgatttgttctgagagaagtgatgggagtcctc

SEQ ID NO: 60099 - DNA, 397 bp, Homo Sapiens
tttaaataaaactgtagtttggcttcatacctttaattcctctttcagcatgactacttcttctctaagatcatcccgttcactccttacggaatcaaagaactctttctgcctctctaatgcctgagtgtgcagcagagccaagagaaagaagaagatttgcacagatgagcaagttacttcagaagcaggaaccagaaggaggcttctaccatctaaaacactagtggactctagacattaaagagactctgcctaaagatactaacaaaatccaagtattaagcttttcgcttagtatatataatccaagaaatgttactgttcatactccatgaaagacatgcgcatcttgaagcacacggacacagcacggggccccagaggttactatatt

SEQ ID NO: 60100 - DNA, 246 bp, Homo Sapiens
tctagaggatcccggtcattttctacacctccctagctgggaccatcccacacgggttgctcaatatgcatgcctcatgaaagcatagactgtccatttaaaaaaaaatcaggtactcatggtattacaatatgccagtggttggacaaatggattttttacccttttttaaagggttatgtaaaaaaaaaaaaaaaaaaaaaagggcccgggtacctttagatcagtgtaaaatttgaccgggtt

SEQ ID NO: 60101 - DNA, 564 bp, Homo Sapiens
tttttttttttttttttaaataattaagggaatgactagcttgtcattcctaccagaacaactggtacctgtactcatttctctaccatattgtttctctttagcatagctacagacctcctcagggcatgctatcccattttctgaaagtcaaataagacaaaatcaaacatccaagtgagagacacattagacagttctcattccccagagcatctccatggcacagatgcatgaaaaaaatgggaacagattcctcatttgcatagaagctaaatagctatattaaatcttattttaagagtttccttttacctttgcttcgtaaccattaacaacttctgctttatctgtcctccagccccagaatccggatttagttctgataaaaagtgaacaccacaaatttctacatgtacaatatgccattcagatttatatctgtagcctttatagtttttttcccccccagcttaagttagtgaaggacacttggaaatcatggtcctattgtccacaggaggcggttagcaatgacagatgggttatgcaccctccaacctc

SEQ ID NO: 60102 - DNA, 508 bp, Homo Sapiens
ctaattgcaatgggaagccactcaaagggctttaagcagggaagtgacattatctgattttcgttttataaagatccctgcggctgccgtcagtgattgtaggagggcaggagtggatgcaaggacagcagacattagtgcaggagttcaggtgaaagatgataatagcttggacagagtggtagcagtggacatggagggaggtagacagatttaagatgtctcggagacagctgatggaatttgctgataactggaatgggagtgacaatgacaaataaaggaacctagaataagccccagaattttgcttaagcaactgagagttcagccatggcagatctgttaagcacaaaagttaaaacaaatacaaattcatactgcattggactcttttaagcagtgtcttatagaaaaaacattttatctagggaaaaatgcaacaacaaaaaccactgaaaacaaaagcctatgaataaaagcagacccgttttagactggatgcaca

SEQ ID NO: 60103 - DNA, 138443 bp, Homo Sapiens
gatcagatagcaaatactttgttttgtaagccaaatgaactttgctgaaattactaaatttcaacattgtagtgctaaagcagccatagataatgcataacaaataagtgtggctatgttttaataaagatcatcatggtgtgtaatttcatcatactgatctctttttggcttcactaagatgacatactctcttacttcttcatgtgtttgctcctgtatttttttcaagacttaattcaggaattatctctttcaagactctttcccaaaccttttattcctcacaggcaagatggaattccatttttatgatccagtaggaacttatgcctcctggttttatctctgacttgatttgtgaactttggaagttatttaatatccctaagtttcagttttctgacctataagataataatagtacctacattacacggctgttgtgataatgcatctgaattacttaacacagaacttgacccacagaaaacattcaaaacatgtaaatgatatctaataatattgtgatgatgattattattcctctttcatactactttctgatgcacaatattggtcaacataaaatatgcttggttcttggttagatattatgtaaagttataacaatgtgattaggaatatttggatttgtattttaatagcagtaaaatgtactaaatcagaagaacatgtcttggtcagtaatatatatgaatatgcaggtaagataagagagaataaatattatgatacctgtaattttttgaacaccaaagcaaagtaagccaagaacacagctgtaaggggatcaagtagaccggaggcaaaattagctgttgagctataatccctgaccgtgctggacacagggctctgttcacacagagagggaaagcaattagcagtggaacagcatatggtttggctaatagcacctcaagaaaaaaactagattaaaatatagaagggatattgagtagaggagatggcaggtgggtggtgaataaaaatgaacaacaaaatgcatgcttgggaatatcgtgggtgtgcatgtgcctgtttttcctttcattggtatgtttaggatttgcataaataaaatgaatatgggggtacatgttgcctcatcttttagttgctctgctttgaaagaaaagtaaattcctggatcaaaagatggcagttagggaaacttaaataagttggtttggataaaattaaaggaggcagccctctgatcgtttctttccccaaagaggatttaagtctgcccctaggacacaggacacagagtcattattttaaatattatattgaattatataatgtcttaatttttaatcaaataattcatgcacataattattaatagtatcagaggattcttttgaaatcagtgtcctctgcattgctcttctctaaattgcttagaaggagtattaatacttttagttgtatcttccggcattagccataatttcttcacttttcaaaacctaagtaacatggctgtatttctttcccttgatttattaattataaatatatagtaaatttattattttgaaaaagaaggtaaactcgttcatgccaactcttatcttcaaatacatagtatatcttatattgtatgtactttatcataattattagttgatgatgtagtttcattacagtgaatatataaatattgtttgctaaataagaaagcagtgtaatatgttgcatttcctgttttttgaaacctcattgttttctctagagttaattattgtcttagttttttcacttatataatttcttctatttacaaatgttaacaaatattctatcagatctttcattatcttgtagtaccaaatgttgctgtggaaaaatatgatgttattctgattgctccttcctatgaagtgtttttctctctagaagttagtgaatcctctctctatcactggtattatgatattgcataataatgtgcattggtgtggtaactttcggtatttcctgtgccagtagaaactagaaattatttgctgatttgtttaagttacctatagattctggttattaagcctttgttggatgcatagtttgcaaatgtcttctcttgttctgcaggttgtctgtttactctgtcgatagtgtcttttttttctgtgcagaagcttcttagtttagttaggtcccacatgtctatttgtgtttttgttacaactgcttttggggacttagccaaaaattctttgccaaggccaatatcaagaagggtatttcctaatttgtcttctagaattttacagtttgaggtgttacatttaaatcttttatccattttgagttaatgtttggctgtttccgtgccgagcgcagccatggctcctggtcccaagaagcatctgaaatgggtggcagctccaaagtactagatgctggatacattgaccagtgtgtttgctcttcatcaatccaccagtcctcacaagcttagagagtgtctccccctcatcattttcctaaggaacagacttaagtatgccctgagaagaaatgaaaaagatttgcatgcagcagttcattaagatagatggcaaggtccaaactgatataacctaccctgctagatttatggatgtcatcagcattgacaagggacacaatttctgtctgatctatgacaccaagggttgctttggtgtacattgtattacacctgaggaggtcaagtacaagttatgcaaagtgagaaaaatcttagtgggcacaaaaggaatccctcatctggtgactcatgatgcttgtaccatctgctaccctgatcccctcatcaaggttaatgaaaccgttcagattgactcggagactggcaagatactgatttcatcaagcttgatgctggtaaccagcatatggtgactggaggtgctaacttgggaataatttgtgtgatcaccaacagagagaggcaccctggatattttgccatggttcacgtgaaagacgccaacggcaacagcattgccacctggctttccaacattttttgttattggcaagggcaacaaaccatggcacaaaccatggcaacaagccaagggcaacaaaccttccccgaggaaagggtgtccacctcacctttgctaaagacggagacaagagactggtggctaaacagaacagtgtgtaaaatggtctctgggtgacatgttacatctttgtacataatttaaaataattcagcatgattaaaaaaatacttgtgtacggtgaaaagtaggggtccagcttcagtcttcagcatatgactagccagttatcccagcaccatttattggatagggcatactttccccattgctcgtttttgtcagccttgttgaagatcagatggttgtaaaataaccccatttaaaaatgagagaaagggacaaacagctattctcaaaaaaagacatataagcagccaacaaatatgaaaaaatgctcatcaccaccaatcattagagaaatgcaaatcaaaactacaatgagatatcatctcacatcagtcagaatggctattactaaaaagtcaaaaaacaacagatgctggtgagctgtggaagaaagagaatgcttatacactattggcgggaatgtgaattggtccagccaccatagaaagcagtctggagattactcaaagaccttaacacagaactaccattagacccagaaatcccattactgggtatatacccaagggaaaataaatcattctgccccaaagacacaagcatttgtatgttcattgccaggctattcacaatagcaaagacatggaatcaacacaggtgcccatcaatggtagattaatttaaaaaaaaaatgtggtacgtatacaccatggaatactacgcagccattaaaagaataaagtcatgtcctttgcagcaacatagatgcggttgcaagacataatcctaagtgaattaatgcaggaacagaaatatcacatgttctcacttgtatttaggagctaaacattaagcacacattgacataaatatgggatcaatagacactgtggactactagaagggggagggagggaagagggcgtgggatgaaaaactacctattgggtactatgcttactacctgggtgatgggatctttacgccaaacctcagcattatgcaatatccccatgtaacaaacctgcatatataccccctgtatctaaaataaaagctgaaatttaaaataaaatattaaaaaatgaaactagaaatcaggcatttgaaattaaattatgactctcttcacaaattggatcttcatcctatatatttaatgatttttttacttatattttctctttttttctttctagagtaactaataatctgatggttgacatctgaattgatttttctgaatattttatcatttttattctattccaattacattgttttgtttcctgaaatatttacttggttttattttttaacatttctgctaaaatttcaaattataattgtctatcatatttgcaatttcatcattttcctctttcttagatgtttatagatgtattatattaccttgttactccctaaggctgatttatatacttttttgtttgttaaagttcttttttctgcattagttctggttctactaggttttaattttcagtttgtctctctctttcacgttatagatcttttttctttctttgtttttctttcattctttctctctctctctcccttcctttcccttcccttcccctcccttcccctcccttcccctcttctactactcccctcccctcccctcccctcccttcccctcccttcccctcccttcccctcccttcccctccctttctactactgcaactggtgctttcttgaaagtgccacatcctggctagaggctgaccaactcagaccattagagcaactcaagacagaataacactgctcccaggaagaagaaaacaatagctaattccactgcctgcaacatcctggctaactgaaggtcctgagtctatccatgtgataacttcactgctagcataaccagcattcaagaaagacagcacactaaacatatctacaaccaaggactctcaaagagtctacttcactcccctgccacctccaccagagtaggtgctggtatccatggctggaagacctgaagacgaatcacatcacaggactctttgcagatactcctcagcaccagagcctggtagccccactgggtggctaggcccagaagagcaatagcaatcactgcagtctctctctcagcctcttccctaggggaaggtgaagagcaccacatcaagggatcaacccatgggacaaaagaatctggacagcaggccttgagttccagatctttccaatgaaatagcctacccaaatgagaagaaactagaaaagtaattctgttaacatgacaacatggggttctataacacaccaaaaaaaaaaaaaatcatagtagctttccagcaatggagccaaaccaagaagaaatatctgaattgccagaaaaagaatttagaaacttgactattaagctactcaaggagataccagagaaatgtgaaaaacaacttaaagaaattaaaacaatacagtatttggatgaaaaattctccagagaaatagatatcataaagaaaaaacagtcacaacttctggaaatgaaagacacacttagagaaatacaaaatgcagtggaaagtttcaacaatagactagaacaagtagaagaaagaacttcagagctcaaagacacggctttggaattaatctagtcagacaaagacaatgaaaaaagaattttttaaaaatgagcaaaacctctaagaaatttgggattgtgttaaatggccaaacataagaatgattggtgttcctgagaaagaagagaaatctaaaagttttgaaaacttatttgaggaaataattgaggaaaacttccctggccttgccagagatctagacatccaaatataagaagcttttagaacatctgggaaattcatcacaaaaagatcatcacctaggcacatagtcatcaggttatctaaagtcaagacgaatgaaagaatcttaaaagctatgagacaaaagcatcaggtaacctatatagttatctaaagtcaagaccaaagaaagaatcttaagaactatgagacaaaagtgtcaggtaacccatatgttaatctaacttattagattaaaggacatttttcagcagaaatctcacagatcagaagggattagggtcctatctttagctgccttaaacaaaataattgtcaggcaagaaatttgaatccagcaatcctaaggttcataaatgaaggagagataaattatttttcagacaaatgctgacagaatttaccacttccaagccagcactacaagaaatgctataggagttctaaatcttgaaacaaaacctcgaagtacaccaaaataaaaccttcttaaagcataaatctcacagggaaagcaataactgacaatggggggaaaaaacaaggtattcaagcaacaactagcatgatgcatataacagtgcttcacatcttaatactaatgaacgtaaatggcctaaatgttccacttaaaagatacagaatggcaggatcgataaaaatccaccaaccaagtatctgctgtattcaagagactcacctaatacataaggactcacatcaacttaaggtaaaggagtgggaaaagatattccatgcaaatggaaaccaaaagtgagcaggagtagctcttcttatatcagacaaaacagactttaaagaaacaacagaaaaaaaaagacaaagagcgattttatataatgataaaaggattggtccaacaggaaaatatcacaatcctaaatatatatatgcatctgacactggagctcccaaatttataaaaaactattactacatgctgatgagatagcaacaaaataatagtagggaacttcaatataccctggaacagatggacttaacagatatttacagaacattctacccaacaactgcagaatatatattcttctcatcagcacatggaacattctccaagatagaccatataataggccacaaaacaagtctcaataaatttcaaaaaaattgaaattgtatcctgtatcctctcagaccacagtggaataaaactgaaaatcaactccaaaaggaaccctcaaaactataaaaatacacaaaattaaataatattttcttgaatgatctttgagtcaatgatgaaatccagattgaaattaaaaaattatttgaactgaatgataatagtgacacaacctaacaaaacctctgggatacagtgaaagcagtgctaagaggaaagttcacaatattaaatgcctacatcaaaaaatatgaaagagcacaaatagacaatctaaggtcacacctcaaggaactagagaaacaagaccaaacctaaacccagcagaagaaaagaaattacaaagatcagagcagaactaaatgaaagtaaaacaacaacaacaaaaaatacaaagggtaaatgaaacaaaagctgggtctttgaaaatataaacaaaattgatagaccattagtaagattaatttaaaaaagaagaggaacaatccaaataagctcaattagaaatgaaatgggagatattgcaaccaataccacagaaatacaaaagataattcaaggctactatgaacatctttatatgcacaaaagaaaatctagaggtgatagataaattcctggaaatatacaaccctcatagattaaattaggaagaaatagaaactgtgaacatacctattacaagtagccaggttaaaacagtaactaaaaaattgccggctgggcgtggtggctcatgcccgtaattctagcactttgggaggccaaggtgggtggatcatgaggtcaagagtttgagaccagcctggccaacatggtgtaacctgtctctactaaaaatacaaaaattagctgggcatggtggtgggcacccatagtcccaggtactagggaggctgaagcaagagaatcacttgaacccaggaggcagaggttgcagtgagccgagatcacactattgcactccagcctgggtgacaagagcaaaactctgtctcaaaaaaaaaaaaaaaaatgccaataacaaaaaaagtccaggacctgatggattcacagctgaattctattagatattcaaagaataattgataccaatcaattattactgaaattattccaaaagatagagaaaaagaaaatcctccctaaatcattctatgaagctaatatcactgcaataccaaaaccaagaaaggacctaacaaaataagaaaactgcaattcaatatccctgatgaacatagatgtaaaaatcctcaacaaaatactagctagccaaatccaacagcatattgaaaaaattatgcaccatgattaagtgggtttcatactagggatacaggggttgtttaacatacacaagtcaataaatgtgatacatcacatactcagaattaaaaacaaaaatcataaaatcatctcaacagacacacaaaaaaagcatttgacaaaatccagcatcccattatgattaaaaccctcagcaaagttgacatagaagggacatatctcaaagtaataagagccatctatgacaaacccacagccaacgttatactgaacatggaaaagttgaaaacattcccccttagaactggaaaaagacaaggatgtccactttcacgactgctattcaacatactactggaagtcctagccagagcaatcagacaaaggaaaacaataaagggcatccaaattggtaaagaggaagtcgaactgttgctattcattgattatatgattgtatgcctagaaaaccctaaagaatcattgaaaaagctcctagatctgatgaatgagttcagtaaagtttcaggatacaaaatcaatgtacacaaattagcagcactgttatacaccaacaatgacgaagctgagaatcaaatcaagaactcaatctcttttacaacagtacaaaaaataaaatacttaggaacatacctaaccaagaagttgaaagagctggataaggaaaactacaaaacactgctgaaagaaatcatggatgatatgctaagtaaccaaaaaaatgtggtgcacaaaaagaaaacctaaatggtcaataaacactaaaaaaaatctgccttgctagaaatcaagcaaatgaacattaaaaccataatgaatgattagtttactcacatgagactgcagttctgaaaatgccaagtgatggtgaaaatgtggagaaaataagaactcgtatccttactggtggaaggtcaaagtgatgtaacatctttgaaaagcaatttggtgatacttgcatatgtattctctaaaactcagacattctaatcttagatatacaccttgagagactttaacatagattacaaacagatatgttcaagaatgttaattgcagcatagtttgtaataatgaaaataaaaataacctaaaaccatcaaaaagaaaataattatgttgcaatcattgaacagaatcttataataacgaaaatgaattaacatagtgactgaatttatcatcaaagtattaagataaaaacctagctattgaagaattcagatggtgtaataccatttataataaaggttatgaatagaagaagtggcatgcctgatagcctgaggagctcagcagtgcattccccagagaatctggtgaaaattatgaaaaagtaaaatcaacactttataacttcttaaaatggtcctacaaatgaagaaacatctatgcaagaaatctcaaaagtgatgtaagaaaagtagaaatctgttgtacttgaagattgttccttcccttccgtacccacgctcagagaaatagaaactgcactgtagacaggtggagacaagaatacaggtctctctccttccagttcccaattagaggactttccttcttggagggaaagacatcggtatatttcatcttgcccgcaactatctgctattgaggctaaatttcaggtcagtgaagccaagatgtgcagtgtagtgcagtagagtacataatacttgataatgatactaaatgactatgtcatttgtttatatatttcctataatatacttcttatcattatcttagagtgcaccctttctacttaacatacatcaaaggcaaagagaaaaccttgaaagcagcaagcaaaaatggcttactacttattaataaaagcaaattctaataagattaacagtttgacttttcatcacaaaaaaatggaggatagaggacaatgggataatatattgaaaatgtacaaagaagaaactatcaatcaagaattctatactcagcaaagctatctttcaaaaattaaactaaatcaagacatttccagataaagaaaaactgagacaatttgttcctagccaacttgtcttacaagacatactaaagaaagttcttcaggctgaaagtaagtgaccctacaggataattgcaatccacacaaaaagaaagaacaccagtaaaagtaattatgtaattatagaagacaggataaaggcaaatgcacaatatcttaactgatttaaaagtgattgtgtaaaataatatgtatataacgtattgctagtcctatagaacatagaaatgcagtatgtttctgcacagaggaggtgggtaggattaaatctgtattagaattaacaatgtattattgaatttgtaacatgaatcaatatacaatattaatagatgtaataataataccacaaaagaaggggagaaaatagtgttgtatgggagtaatatatttctatgtctctctgggatcaagctgagatcaatatgtactgggatcaagtacatattggaagctgattctgtaaattaagatatacatggtaagccctagagtaacccctaaaaacaacaacaacaacaacaacaaacctcaaaaaacatagtgagataaataatttaaattcttcattaggaaatatttacttaatgcagaagaaagcagtaagggaggaatagaagaacagaaaaatacatgagacacagtaaaccaaaagtaaaaatgacagctataaatccaactatatcaaacataacattaaatgtgaatggattaagaaatctgatcaaaatgcagagattgtcagatggattaaaataaaacaataagatccaactatacactgtctataggacacacatgttagacgtgaatgtttatagaagaattattcacaacagccaagttgtagaaacaacccgaacactcattgactgactaaatgggtaggcaaaatgtgctatgcagatgtaatgttcagcataagatggaataaagtactgatctgtgctgcaacatggataagacttaaagacattgtgctaagtgaaagaagccagtcacaaaacactacatactctatgttcatttacatgaaatatccagaataacaaaatctataaaaatggaaagtaaattggtggttgcttaggaaagagggttggatggagagataaagggaaggtaatgtagacagcagattttccttaggatgtgatggacacattctaaaattgaccatgctgatggctgtgcatatctgtgaatatagtaaaaaaaaaaaaaagaaacattgaattgtacactttagtgaattgtatataaatcatatcttaattaagctattaaaatttttttaaaggaatagagggccatatagagaagtgaatgagctaaaattgggaaattcaaaaagagcacaccactcagccacaattcacaatactattttagccaaaactaagaaatctttagtacttgttttgtgagaagtaacaataattaatatcagaactccattgtataaaataacaatccattttgtgcctttctatttaagtttaaagttacagattttttaaagaaatgcacttaaaggcacaaagacaatacataatacctcacaggcatatttacatatggaatataaatagaaaaacattactggtccaagttaatgctggggaggaattttcttccttgggctttatgtttttaagtctaaggacctccagaggtcaactgcttgcttttctctccccacccactcatttctcctaaagggaacaggagttcattatctgattgatttgagaagaaagagttttcctttgtctgcttagcctctccctttgttttctttgcaggtctcagaaagaatgcccatgtgctgtccttcacatggtaagtttggtggagcatgttctgttgtcagaagttcaaatcaggggagagctagcaagccaactggcaaggtgcaaggcaggtcactttttcatctgctgtctaacttctttgtcttccacttggttctcaactcagctggggaagaggaggtttcttcctgggccccttcagaacctggtagttaaaaaaaaagttacctgctattcagcaacatgagcctgatagtttagtatctgcagagggttagaattttttccacattccatcacattaacaccagaaggacatgagatcaccttctttattaaaactaacaaagaaatggacaaaaccagcattcacctctacgtaaaggaaataagagataacatgatcagggcaaagtcttcaattctgtttgtaatgtttacttgattaagctcaatgttgcataagttaatgttgattatgttattcctaatatattttcacttgtctgacatatggtttaacaggttttttaaaaagatgaggtgtaactgaacttttaatatggaatgctgttacagaaggggaaaattggagaaggactttaaattttttaaagctcaacatttctgctcccaagattttctgaaaggaagatttctgaatctatattatagcaaaccgccatttgcaaatgcttgaaaagtggtctacgtctatgtaaacatttacagaaacaatcgagcagaaaagagctttgaacccacgtggtgacagtgctctagctttatgcattgaaaccaaaccaaaaacctctgtatttattctacttgaggtttcatatattgtcacacatcacaaattagaaaactctttaaaataattcccagttggtatgtttaagattatttttccattgtgcaaaagcttgcagggggtatttgtgtgtatttgctttaaaacaagtagaattatccaaccacaagagatggggagaagccatgaaaccatgcactgctgccaatacattgtctaaggcagtacttctcagactgcctttgttgaatgcagttattaaacctttaaacctttttacatttttcattttattttttatctttttaattaataattttactttataaaaatataacttagttaccaaataatcaaattaaactgtacaggcacaagcccaaatctatcttcattattttcaatggacacaaaattattttatcaaattttataaacatttctcactgcttactctcaagttctgtgcttatcttattatgaacaggtaaaaactgtttttgggccagcactggtctactgaccacacctaaagaatgattgatctaaggaattctttagtttactatttttctacattcagctttatctttatggtaatacacaaatatgccttgtattatcagtgtaattttgttgttgcattgctataacaaaatgactgagactgggtaatttacagaaaaaagaggtttaattggctcacagttctgcagacagtacaagaagtgtgatgccagcatttgcttccagtgaggacctcaaggagcttataatcatggctaaagacgaagggggagcaggcatctcacatggcgggaacaggagcaagagagagagtggaggggagaggggccacagattttttaacgaccagatttcatgagaattcactctcatgctcactcactatccaatagaatagcaccaagccaaaagaaacctgtccccatgacctaagcacctccaaccaggccccacctccaacgctggggattacaattcaacatgagatttttggggacatatatccaaactattaatatatcatgcctacccttgtgtttaacctgctttgagcttcattttttttcctttaaaacatttcagcatgggtttctttttcccagttttatgttatgccctgaatctttttttcctctcttgtcttaatacatagccttccacatcagattttatgagaaaatggcatttctttcctttccttctcttgatggatgattgagcatccctgagatcagactgatttaatagcaatattcaaaggtgatatcatggtcactctattcttctctctcttctttgtctttcctccatcctttcctttctcccgtcctttctcttcctcatcaaattgtagctgagtgtctactttataccaggaagtagggatcctctgaaaagtaaagccactgtccttataggactcaatgtctactaggaaagtactcatcaaacacataattaccaagaagagggatacattttacaaaggagaaatagtagctacttcgacagggttaacatgcatggtgagacctgctaacctacctaattctagaggacaaggttacagcatttttttaaagaaacaaattatatttggtatgtactgtctttaaaatgaaaatgtatcttttcaaaatggtattgttaatttttaaagtctgaaataaatgatttattaaaagtaatttcatttggttgaatttaaggagctgaaaacagtaatctaattatcaaaaaagatctcttggcccaaatgattttaaaaaccagattatagactggatttaaattaaaagtacccctacccttcttgatcatttcaatgattatactgtcaacatttactattttttggcttcattcatcaatttagctttctagtctgaaatttttggcagttctttctttaaaatcattctctaattgacaaatatataagctctaaacttttactcatatatgatgataggaaaaacaagggtgactgtatccatatataaagaaagtatcttgtattattagctaattattcttacatgaactatttcataaatgtggcccattttcaatttctataaaattattcctgtgctttctttctgaataagtagtaaaatgtcaaaaaaaaaaaaggttattattatagactaaatgtttgtgtttcccacaaattcatatgttgaagccctaaccccaagtgtggtagtgttaggaggtatggccttgggggaagtaatcaggcttagatgatgttgtgagcgtaaagtccccatgatgagattagtgcctttataggaagaggaagaaacccaccagaacttcctgtttccacaatgtgtggacacagcaagaagacagccttctgcaagccaggaagagagctctcaccaggaactaaagtggccagcaccttgattttggaattcccagcctctagaactatgaaaaataaaattttgtcatttaagtcacctagtccatgatattttgttacagtaccccaagttgactgagacagtgattgataggaagagaagaatattatctgtatctactgtaatattacttattacataggaagagtcctcagatgaaataccaaaaagagcttatttcttctgtattataagatcagcttgtatttattttaagatattgtatcattagctcttatacaaacaagatgtgttaaaaatggcagaaatatatgaaacactcatattggcaataaggatctagattttagagttaaatggtttaaatcaatttatatactacaatacagatgtgttatattatttaatagttctattctcactatatccacttttcttatccttgagatttcacatcttactctcacctctccctcatgtgtctcatatggtttcctttttcaattttttcatccatctctcttgtctcttttttctcaagtgtataacctgtgacaaatacagatatattttttaattttttgagctacatcaccttaagcctatctgcagagctagtgagatccctatgctcacaactttggttgacatagtcagctgggtctacaaatactaaaaagcaccactccaggccttgctccacatttctacagcagaacaaaaggccacacagctatgtattccacagaggagtggggttggctctactaggaacagtacatcagagtctatacaaatcatagcttaaaggagatgcaattatacagagcccccaaagaatcgagaccagagcaatcatgatgccatggttacgcaactccataggcacatctggcaagcaattgcagtccatgaaccctgtaaaattgtaaatgtggcctgttgagcataagggctctttatatctgacattatattgaccaggctattgctatcccttctagagaggcccttcaccctcctctgtaaacagagaaggaagtcagagacttgctcttgcatgcaggcagttggcagctcaccctgaacttgctttagccagagcacgctcaggcgtcatggtcagtggatatcttgaagcttcaaaggtgagtccactgctcaaagggagacatttcaatgacccaggattcctggcagattttatttcagttgctggatggttgtcagaaaaactaaaaagccctccagctgcctggagtgtctgtgaaatgcatgcagtgggtctcccagacaaagctttagaaagctgctagcaccacagatccaacccagactctgcatcttgatttcactagaacagatgttatctgcaagcaattaacatacttgtcatcgccagtgaaacagatacagaattcttcaggttgatttttttaaatgtaccctaaagaaaagtgtttgtgcacaaagaaaattttctcattagtattaaaataatattcagtaaagaagttgcatgtgtcaattttttagttttttttcaattttggggaaaagatactataaaaacttttagagtaaatgtcaccagcaacataaatattagtgttagctccctttcagttaaagcagtatctatttgtgattattgtgtattttcatataatgactgacagaatttgctatttgatatattttaaatgttacaaatgacttgattgtacaggtttttatataaaataatgatatcttatttatagtagttatacaaatatcaagtaatagcatattgattaaatatgtcccttaagattagtacaagtgaaaagtttggtaaaattcaatatgtaaatatcgtagattataataactaaacagcgaagttttaagctcttaagctgttcaaacaaaagtatccaactaacataatacctttatattatatcgctatacttgtgacataaaattattttcttataagctaactcttataacatgaatgttctgaattatttgtcctcattacattcatggtttttacttaacattcataccttcacacttattttaattagtgaaaactgaaagttctggtttctaccatttcaacttcgatacaaacatttctacagaggttaaataagtttttttaaattcttcttttaaattacgacaattggtataattttaaggcaatatttttgctacaatggcagctttaactggtttgaaaatacatacttaaatcatgtgatactatgactaatagattcattctaaagagtggtacttgtatttgaagtgacataaatatttgtggctactgggaggcagagatgggacaataaaaaaagcgctgtacaagagtctaatattcaataacactctcatacatctataatttactaactgttgaccttgaaaaatgacaagtttttttacctacaaaatgacgaccttcttaaatgatttattatgagagttagttaagataacttatttgaaaactcttcataaattatggcacattatacaaatgaaataactttaatcatagaatattgcacatggcatatactcagtaaaatacccgatgtggggcactgtcaactctactatgtgatcctagctaatgtgtcctattggtttttgatgcttcctctctaacaggaagtgctttatcagtgtagcttaagtgctagatagattggtggttaatttctttactagcacacaggtgccccagtgtgctcacactcttctcccaaccttttctctacgtccttgtatgaagtcttatatcatatcttgtatcttatcttttctatgtccttgtatgaagtcctgctcaagtctgtcatcaactcagtgttggtgcaaaagccaaatcctttactttgtaagctccttaacactccttaggtactttactgcctaagagaagattatagtttaacaccttttaacgattttttaaataagtaattttcttttcatttatatcagagtcctctgtggtttctcactcatcttcatagtctcagcaactactatactaccctataatagataattctaagtgtttgattatattaatgatttgacctccaaaatcagaaccttcatgttgtgggtgagtttttgtccaagtgagggcagaagtaccaatacccttgtttaatccacttgattacttcttgaccaattctttagcaagaaaatcagtactttgagattgttctacctatttgtgtacttttttttttgaattctattcttttaaaaatattttcctaacctttattctaattgcaatgtctgatttctttgtgcatttttgggtcatttggtaaattttttttaaagcacttctaccttcaaggcattgctctaataagactggatattagatacagcaatggacaaaccagggcggatactctctgccccttggagtctaattctactgggccagccatgcaataagttaagcaaacccacatattaacaaaataatttcagatagttaaacattcaatgaaaggaacaaaaagggtactatgagagagacaagcagctgtaagagggacttttaaaacaagtctgaaaatgacaatttaaggctgagatgtgacagatgagaagcctgtcaggccaagggagaattagaaaaaaaggttcaaaatccataagcagacaagaacttgatgtattctaagagttttcaggggccaatgtgggtgaaggaaaatgagagaaaatgaaaaaagcatgagataatgcagaagagataacaacagcaatattattgactagtgtttattgtggactttctattgccagatacagtgcaaattaagtgctttgcaaactatctcacttaattcccacaacaattatatgaagtaaatgttattataagcactttacagacaaagaaactgatgattagaggttaaataggtaggatcccaatcacaaagtgacttataggacatgataaggtaattcaacttttcttttagtataataagaagccatcaaaagattttagacagcagagtgataagatttgtttctattaatataaaaatgtaccctgaatgacagatgaacatcatgttgcttaatttcctactcttctctttatatctggttcgttttgtgcccactaggttatgaacccatctgggacagcagaccatattgatattgtttatcactctacatccagtgcttagtatagtgtttaacatattgtggctgcccaattaatacatattgaatggctgtacttgatacttgctaatttccacttacttgtattctgatttgagttactaaccttaaacatgacattggtctctgttttttgagtaccataacactattccagattccttttatctttccagagatttttataggaaggaaattgtatacagtaacaggtgtgcattgttctttttgggctttattacaatgattgtggcaaaatccatagtagccgggtatcttagtctgtttgggctgctataacaaaatactgtaggctggtggcttataaataacagaaatatatttctctgagtctggaggctggaaaagtccaagatcaaggtgctggcagatttggtgtctggtgagggctggtttccttgttcatagatggtacctttaaactgaatccttacatctagagagggtaaggcagctctctagagactccattataagggcagtaattccattcatgagggcagagccatgataatcaccacccaaatactctacctcctgataccatcacactggtgattaggttttagcaaatgaattttgggaggacacaagtagtcagacctggggaagaagtggagatgaaggctgcagacagaggtgtcaggttggaggccacagaggttaaaaggataggaaccatcagggcagaatccagggtagctagcaaagaaaaataatgtctcgcagtttctctgagcactgcaagggctcattccacccaaggacccctattctgtcttgacttgatcatcaggctatgtagctgagtcttttgcgccccactgagttaataatacttaaataataattgtatctattttgctgaatataacaaactgagtaagtgctggttgaagtaaagctcataaattagaattcagtccctttatttattgtagaattacatccaccttgaaaaaaaagaattaaaggcaaaaaattcaagtatttttctcattatgggctacatcacaaattttgaaaaaaataatttattaaatataataacattgcatccagcagttgctcagtgttaatcagaatgctagattttgctattataacaaattaatcttaaacttcatttccttatcatatgctcacacagactgaactctagtctgcatagtttcagtccatattcctggatgatagcatctccaccattttagcgcagcaccctctgaaacatgcagcatctttgatagttgggaaagagatataagagaatcgtgggtgtaatttctacctcctcaatctggaaatgatcttattttaccagccaaaactagtaacatgctagtgttgaactgcaaggaggctaacaaatatgggcaagcagatggaattcagttgagcatcacacatattctacagtgctctccaaacataccattttcagaagggtagcaagtctaagacttttagttgatagtagagggatcatattccaccttgtagtctgtactttcagtttcacttctgcttttctttagagtcaggatacattgattattatacagtcactggaagcaccagatgtatttccaaaattcctgttcatgcagaatattaaataaacagatgccattcctcattaggaatttatatgccttcttgactaatataaaatgtatcaactcatttccaaattaaggattattaaaatcgatatttctcatggtcttattgtagtgttctctaagaagggttaagcctaaagcttttttggtcccaagtgtattgttcatatgctgattgatttggaacataactttaagaattgtgaaacatcttccaattttttaatgagaatcagttgtgctgtttcttaaatgatatactgtgttggcacaatatctatatggtgtcatcattattgtaatatcgaagattcaggcaaatgttcagttgtgttttcacttattttggaaaattggattacatcaataaatttaccaggaaaaataacatgacttaaatattttctaaaagtatctttcaaatacggttctagggttcaaattgaacatcattatagagtgtttttgaagatgttggaaagccatctgtagcaagctgtcaaaggaatttttgtatcaattgggaggtcaaactggaggacttctggattttcttagaaagttccattcatctccacagttcttttgtttatatgaaaaaaaagatattaacccaatgttcatcataaaaaaatagagaaataaattgtgaacgattcacacttagtatattacacaatagtaaaagtagagtacagctactcgcaataatatggataaacttttacatataatgtgaatgaaaatcaacttctagaacactacatagaatgtataatttttatgaagttcaaaacaagggcttcattagtctatacacgtgacaaaacaataaaatacaaaaatagagaaatatattcagaatcttggttagttatgctagtttggggaaagtcaggagattcaatagtgaaggtgcatattagtatgcttaatggtattggaattttctatgtcttacgtggagtatgttcacaagtgattattttataatatactttataactcttacattccctacattctttcgtatctaattgtacataataaaaatgtaaaattaaggaaaaattatttcctttttttttttgagatagagagatttgccgtattgtccaggctggaatgcagtggcaccgtcatggctaactgcagcctcctcctcctggtttcaagcgattctagtgcctcagccacctgagtagctgagattacaggcatgtgccaccacactgggctaattttttgtatttgtagtatagatggggtttcactatgttggccaggctggtctcgaactcctggcctcaagtgatctgcctgcctctgcctcccaaagtgctgtgattactggcttgagccaccatgcctggccattttctatttttgaataataatgtcaatcaacagtctggtttgttaattgacattatacctttttggatattgtagtgacagatgatggttcaagcctactaagcagaatttattgggccataggtctttaataaatatcctgacataattgattttgtatttgcaaatactttcataactcctacatattttccctatttccattagcttctctatttttttcccgttagttctaatctccaatttccaactaagctctgactcctaggatgggctttacctagatttagtgtcagaaattgcttgactctaacatagttaggataaaacctcaggttattccaaaatgttttggttgggaagcaagcaacaaaacaaccacttctctttgtctaccagctatgtgttctttggttttccatcaattgttgaacgtgttgatcctgctttccttactgcttcttctaatatctttcaatccttatcctaacaaccattgtgtcaattaaaaaaaaatgataaaaatgccactttaaagatttgaagggggaagtagatgctcccacctctttctccatggctacttagggtctgaagttattgatgagtattgtattttggccttagttattgatgaatgttgtattttggcctttctgggactccagtattaacccatgtgctgggaacttatgctgccagtgctctcagctggcttcatttttgctctttttatttctatcttggtactgagaatacaaaggggcataacttgtagttctcaagataggaaatgacaaatatgcagaaaggattagaaatttggaatctatgtgattacttttatactttcttagttttgcaatttgtggtacaaattatttactattataaacatcaattgaaattgttctaattaatgtagatagaaaagagaaataaataaaaggtagactcatataactaaatttcaaaaatctgtttctattatctatcctctttctggtgatttatattttgttttaattcaaaatataaaatgcaggtttttttgtgtttttttttttgagatagagttttgcttttgtcacccaggctggagtgcaatggcacgatctcaactcactacaacctctgcctcccaggttcaagcgattctcttgcctcaacctcctgagtagctgggattacaggcgcccgccacctcgcctggctaattttttttttctttttttttaatttttagtagagacggggttttaccacattggccaggctggtctcgaactcctgacctcaggtgatccgcccacctcggcctcccaaagtgctgggattacaggcgtgagccactgcacctggcaaaatgcagtttttttaatactctttttttctgacccaggcacttctcttcctatagagggcaattgtagaattgacaggacaacaggttgtgagctcttctaactgaacctgctggagttgggggagtgtgtatttccagctattgcccagaatcctgaattctgagctggttctgaattctaatgtgaccattacagacagaacatggcggctagaagagattaagagctcatgagaacagacccagtaaaaaagacgatgggaagagagtgttgttgttttgtatggtctttatttctttggcatatgtggtaaataaaaataagaactaagcagtatatattggagaaaatgagtattttttgtcactgaaaacatttaatagacaactaacagagatgagcagagatgagttaaattataaaattaagagagtaaaaaatgattacgtatatttcaaagttttaatccttttgtatatttattgtttcccacgttgaaaactatatatagcaagttatggcccttctaaatttttccaccacgaagaagtataatgagcagaaatgaagaagactgaggagataacctattttttagtctaattcactagttactgtttttcaatttaccctatttttctccttcaacctttttaaggctacagtttctgttacttttctgttttatttcactaatttttttaaatttttttcttatttaagaaagcacttaaccactttttctatctcagatattctaaaatgtaatttcattaattttattaatcatagaatttctgtaactaatatttaatattgtgtttgacaagaggttatagggtatttttatttttgtagctattaatttattgacattttgccttgtgggccatatattttgtttgctttcttcagataattggcagcctgaaaggtataatataatccaatacaaacctaactagctaatagaatttgataattcaaagaataaagacgatgaataatttagaaattagaggtgaggaaaaatgagaaaaaattggagatgacataatgtttccaaaatttggtcaaaattatggcaagagaagaaaaatgagtccaaatgggagaagaggtacttgaaagaagaaagaagaaaaagtaggaacttgatgttctagtggtcaaaatgctttcttgggtaattcctagaaaatatgcctaggagcaaaatggacactaattacctacttactggttctataccagtgcaaaacattcattcctcaccaaacccaaaagaccaataatcaaaactaccataatggtcctagtcctgtctacatctgaaggtgaaaagaagtgtattctcctcatttttcagatgagtcaaccataacctttgaagagtgcctgggacataatgattgcttcagaatagatttataaatgaatgagtagttaaaccaaggtcaaacagctggtatcaggagaagaattaggggtaagtgatccttgtctcctgcctctttatgccttagtcttttcaatacaccatattcacctatgattttcattatttcaggaaatatgacagacttaaactttcactttattgagtaggttattgttttgtttttgcgtctcctagtttaagaaagagaaatagaaacagccaaacaaaacactggtaggcattgacaacaacaaccttaaggaaacatgcactaagaaggattgcagaggcatgaggtggtgaagtccagggagtacaaataatctcatatgcatctgactactgcactccaacaatacacacaagagttgaatatcactcaggtagaataatttcatatggtacaaagatataatataggttatatatacaataccatctctagtggtttgatggaaactttatggaacactcagttgaaaaaaaattcaatagtcatgcatgaggtccacaggaaatgtatcagattgattaagaatgtctgttgtggttatggatagtgatacagcattatgaatatcataaatattcaactctttcttattatattttttattatcacttttacattattcagtgaattaacttgcctgacagaagactagggcatagttaactctctctctctctctctctctctctctatatatatatatattcaacatatatatatatatgcaacatatatattcaacaaatatatggatattcaacaaatatatggatatatttttgttaaaataagcacttcactaatagaaagggctatatagatatttgatgaattatatataatgattaaagattcttgatgtatactgacaggaagatatattagaaaaaataagagaatgtcattccatggcatcactcactgcatagtctatcacctggaagtgaaaaggaagaaagagagatttctttaccaagggaaagatgattgacattgtcttccataccaatagtcaggtgaaaaatgccttttaattgcaatattttagaaaagttcaattcagtctacattttgaaaatttgggggatgaagtcaattaaaaagtacaagagaactagcttaaacttgtggttgatgcggttgcaccactcagtgacatgtgggacagattcctggatgaaagaaaccatcacccaagtttagaattcactggatcctgtggcttttgagatttgaacctaacctgaactttttggtgtgttgtattttccttttgtttcctggcaagagaacgtgtgtgtgtgtgtgtgtgtgtgtttgtgtatttgtactcattctacagttggtaaaaattattgtaaagccaactgggaaataggtttttgaatacactttgatgagttaaccataaataaattaatatcaagaggattaaatttccattaaaatatataaatatttaaaaattgaagggaaagatacctagaaaaacataatttaggttttacccaaaccagaacatttgtaaaaatagctaaaaatactagatgatctcaaattgtggtctagctcaaaaccttaagttacattgttttccaatattcagattccctatgatccccaagcaatattaggtaaaactattgctcctcagggaagagaatttcaaatctctgattttggtctcccactcattcatcaggcctcattgggacctgtccttggttggataacatatagggccaccatgcaagttctaagagccacctgggagaaataattaaaatcatgtggctaagctcttcaaaacatatagaaaaattgatatgcctgtccctgtgggaggaaaagaaatccacaagaataatgatcttaatggtgccttggtgttgcttgactttcagtgtatactctgtagtgcagccaaatctcctgatccgaaggattgtagtgttggctagcagaaaagtaaaataaatgtatgagatatgagacattgtttgcatgtgattttgtgagaatatcatctttttaagtagtatgtcttttgttaatctactcagtctattgtgtcactttatattttttaaaagatagcattttagtttaacatgctagagtagaaaggacatgggatttggaattagacagatctgactctgtccttgaatagctgagtgaattggggcaagcatcgtacctggcacactgtaaggggatgttaattctacctcgtaatgttacagttgtgagagtttgagattttatataatctggtataatgtaggtggtcaataaatgctagttattactttttatttttttatcttatagcttcagaacttttatgtgagagaaaaatatattttaaaagaaataaaatttcctcatgactgtcagcatttctttaattttcatacagtgggccagatcactaggcatttgatacaaaggacatcagaatagaacctctcctccctactgaaggatcttaaaaaactgtgacaaattagaaagcaaattaagcttcatcgtaaaagaaatagaaactaggatctcatatttagaatgattccttgccagtgtttgggttatgccagcattcaacactgttctttggttctgttgtaacatccagctgttatgataactctgaaataagtagtgaatttccatttttgcagtttaacttttgaactttataaccattaaatgggaagcaatattctggaatctatagtttggtttagcaaagaagaaatgttttctgttctctgcaggcctcacttagacctggatattgctgattgtcctgaaatatgtatattcattcaagaagcctagggtaatactcctacaggcttagaggatgcctgatattacagagctttcaggaagtcatcatatctatatatattattagtcagttttatactaacttgggcacttggaaggtacatatttgcttgcctattttcttttctggtatttcgggtcctaacaaaagagcaccagtgactacttatctttactgtaaatttatcttttacaccatattgtgtgtacatccttactgtgaagccattaaacaatagatttgtctaattctgcttgctcatatccatgctcaccaagcaagtgtgtctaataaaggtgtgcaaaatgttatactgccattaaaggagcattgattcacatgaccacaaggtgaggtcccaaaataggccatctgcaagctgaggagcaaggaaggcagtccgagtgccaaagctaaagaacttggagttcgatgtttgagggcaggaagcacccagcacagaacaaagatgtaggccagaagactaaaccagtctagtctttccatgttcttctgctggcttttattctagccatgctggcagccgattagattgtgcctatcctgattgagagtgggtctgccttccccagtccactgactaaaatgttaatctcctttggcaacaccctcacagacacacccaggaacaatacttggcatccttcaatccaatcaagttgacactcaatactaaccatgacacctctcatcagattatagcctgatttatacgagacttctacctgacttttctcttttctcactcatcttatcaatttgtgtctgccataatcataactataataattcctgtaagtgcctacaatagttccttattgtctactactataaaactttgggatttaattaaaagatctccaagagtttggaattaaatttttagaaatgcatctgagttaaactataaaatcaggtgaatataggtgaggtgtgtcagctgaaatgagttcctggtaacccatttgaaaatgctcatgtatcttgtcaaagactgagactctcagaaagaggaatttgtcactcctagacacacagagaagagatgagtatcaaatgtatctgttggcaacatctatccaaagataatccaaggaaagggaaattgttcgtccaacctggaatatttcaatttctaatgacagagatattgctagagtgcaaataaatatgggaagttgtaatcagtgggtttcagatcacactgccaataccatccttattgtgaagccattaaacaatagatttgtctaattctgcttgcttatgtccatgctcaccaagcaagtgtgtctaataaaggtgtgcaagaatgttatactgccattaaacctttcttgtccctgtaacaaaagttgcttctggaaattcagtaaaactgtgtctgattactatttagcttcctggtttagttatttttgtttgattacattcctaagagtaccccagatttactcaggcatctattctctttcttgtgatcataggcttcttagaggctggaagcagcctccaagcaggggtgaatccttatttgtctacactgatcaatgattcccattttctgtgccagcaacttgtctaggccagaaacagttctaacctgtgagatataaaggcagttaactggtggatcgcaggaaagattcctcatcccttcatttggtgcaaatgaaagcatgccttctacttcttaaaggctttgtcttctgtatgatacttcagagttctgcaatgaccccacaaggggagctagctgagtatcaggcagagagagacagagagagagagagagagagagagaagagagagaaagaaactgtggccttgatgacactatcatcccctgaattaattagctctggacttgctctacctctatgctaaagcataaaacatgaattaagacttaggtttgaactatctcagtttaaggcagtatagtattgagttaagagcatgggctcaagaaccaactgtcttattgtgaatcctggctttgccaaatcctcaatgcatgaatgtgggggaatttaatattgttgtgcctcattttccttatgtttgtcatataaactaaaagtgttaatacaaagtaaagaactaagaatttttataaattgtaagcttttcataaatattagggaaaaaatcttatggcggaaagcaatgtgattgatacacttccaagtagttgaaccacagggagaaaatataagattcctgccaacatggatattccaattcttctatgtatttcttattttaaaagaataagttggcattttgatatcagccacagttttatgtgtattaaagctaacatgggtcattctctcaaggtctgttaaccccttggcattggaaataatgagttttgaaccttagaagtagtggaccagatgatccaacagagctgccatcatattgttgtttccaaatacctctctgcagacctgtgcagcctgtgatgagatgttctccagcctccagtaaaatgaaaatgtaaggagtgagtttttcacaagccaaatttctactttaaaggaacatcctttattttgagatcatttgcatactccattttttgttccagattttcttaaatttgctttaatttattaaaagttaaactccaaagtctttccatggtcattcctgaacaattactatccagtgtgtttcctgaactccttttagacaggattcccaactttcccctgacctaattgagcagaaccttcacatcctatcaaagtcccacccctcaagtatttcttggaggccctgggatgtatttaacgatgccatccccattgaatctttggtgctgcacaccaagcctgagaattattgtccaggttccactcccactaccatgagagggctgctcctgtctgttctcacagatgctgcagtttcctgctggcccctcattggcatccaccaatgtcaagttgggaaaactgccctctcttcttcttgtttctttccaagatggcccaaagcagccttatttcaggctcatgtctttcatttgggttcaaatacagcctctgtggtagactcacatgtttactctcctactgtggttgaaatgagtaactgtgtcaagttcaccaggcttagcctgctctccccaaggggaaatcctttccagggaacttattcagtacctcgtgtttaaagactttggtaaaaccactcaccagtactacctgccagtgtgtctgaactagagcaatagatggaatatgaattttttcccagagggtacaaatatatttccatcaggcctgtatcatcagcttgacaaatataccttaagcccagccattggtagaagtccatgcacagctcaagcagaatcatggctctcatcatttaggaagttttggaaatggaaatagtacctaaagagctagcctccggttcttgtcaattatccttaggcaaattacttaatttatcgagaccttagtgactttatgtgtaaaatggggataaaaatagtacttacctcccatgtaaagtagataggttagtatcttataagggtacataatagagcatatacaataaatctttacatatatgtcagatattattattatgagtattaactctgtaacactgcctcctaaggtggaagcatatgaatattcttaattgacttgggctagtgcattctgacaacacttcttttaaagacatacataatgccttggaaaagaaaattaattaatgatgttatattactatatttactttaaaccttattctgaaaggtttttaaatactcacagaagatatcttggaatataatatacacatatatatcaattaactactataatgtcttattactagatgcataaaattgataatagcattacatcagactgtggaatatataagctaatagaaaggaaaattttcttaatactacagattatccttacccttcttgcttatttccctagcaagtggcagggaagttcaaatgactgctcacattgtatctttagttcaagtcacggctcaacctcacagaggtacagctgacaattgcagatgttcattagtcatggaaccatggagacagaccccactgatcagtttgtaagctgtgggcagatcatgaaattgtcttgccgccatacagataaacaaaacatatgtgctattagtttagagctgaagatagaatttgcatgtgaacttaaaaatcaaatgagaagctacataaactgtaaaattttagagagagagaaaaatataatacaaactttgaggacataaataaaggtaagtcgtaatgtagaagagagcctcatgctggctgaaattatgtctagcattttacactagtggattggactggccaaaggcttgaaaccttgtggatttgtggctcttcagatatgcttctgtattggaatgtgtttgtgtttgcctttatttgtttttaattaaaaaaaaaatcttgaagaaagagtttctgccttggtagattttctttggaaactcagaaagggctcttgagggctctgtggctcttttgtgatgataaaccaaagctttgagcttgtcccagttggaattccagacactaaagaagcaaactttaattattattattgttttctacagagctgagcccctttctgattattcaggttgatactaatagtcttctaaacatattgctttttttttttccagctaaactaggactacaaagcaaagcaggagaaacttcacaataaggtttcagaggtgccaactttttgagtctccatggaatatacctgtggtgtgggaaatgttattgggagggaaatattaataaaagcagggcctgcagtgaaaaacaaatttctcaaacttgtagaagagattgttacctgggaaagatggtagctgagataaacttggattctgtgaatgaataagtttaccgcaatatctgaatctctaaaccaatacattaattgataatcatagaatcttagagttttaaggaaacttacagattttcaaatcgaatcttaatcttctgcaagaactagctgcactatgtctccaatagattactcagtttctacttaatcatacaatctagcagaaatgtcactatcatacaagacagccctttccaattttgagcaactctgaaaggaagtctagcctcacactgggccaaaagctatttcctttttaactttgatccactattcatagttctatcctctgaagttactttttctttcatgtaatacctgtcaattattgaatgtagttattatttcgcttattccctaaattcttcccatgtcaagacttctaacctcctgcaaccatttctctcctttaaattaaattcagtcaaattaacattaattgaatgtaaccatgggccacactctgtggaagaatctcagaatacaaaaatgatctacagtctgtagtcttgagaagtcacaactgggacagggagactgagagacatacaatcttatcactgcaatacattctaacaaatgtgaaaaagaggcttgcataagctggaggtggcctggagtgattagatctgccgagggaagctgggaaatccatgtctaaacaatagcattttctcacatgaaaaattaaggaaaggcatttcaggtaaatcaaagtatgtgtgtaagacattgctgtgtgtaaagcaagttgtgttaggagaatggggcacacatacagtattttaaaattttcaatatgaagcttcactggacccagacattttatttacataatcaactaggggcttttttcccaatcttctaacctgtcttgaatttctatttcctttttaaaatgcttatttttccttttctagtgtaagaataaccttattttacaggggagagagagtgacataaaaattaaggatttgggtgatctcacaatattcttgaacaccagaccctcctatgcaaatcaactggtctgtttctctcttgtcttgattcttgcaccccaaataactttaaagtactttcattcttcagattcttagctcatcacaggctttatccttaccaacacgattccagtcccactcttccatttgtcagtgaccgtttaccctccctgtgtttcttatttttattaatttaaaatattccctgagagagttatcagtgctttttaagtgcattacaatagttaattatttaacaattattaatcgttgtttcaagagctttagatacattatttcgttcaatctttacaataggcttataaaatgattattactatttttcacaatttacagatgaagaaataaattctgagaagatacacaatttagctacaaaacttcattttagtactggctttttaaaatctacattgtacctgcaaaactgtgacttttaaatccttcccattttttacatcttggccttattcataattgaaagtgagaaaatgtcatttttatttcctgctaatgtttttttctatcctagagtatataaccatatgagcaatcttctttttgaacattttgaaatcccatttttgttttagccaagcactcattgaacacccccagaatgacctcatgtgcagatgctctactgaggttcatagctgagcccaataattaagaaattaaactggggctcctttggacgattactgcaattcaaatgacttatttcttggaattcatggttctcatttatacataattgcttattttaagtcatatggccaaatcaagaatgatagagtaagtaccagaatttaaacttaaaattacaaaattagaaaattacaggaataaacatgaagcaccttcattaattcctgaaatctggtattttttgtaccttttgctgatctcccaactttccagactcccaggccctcatccaacccagggatgcccattgggtagccacagatattaccatctgttaagcttttaaatacctctgccattactttagacctaaaaataactcgggcttgggatcatcgcaaacatttgttggcagatgctaaaaatacaaatgggaaattctgctatattagcttttataagatgtaaaaaatgtgttttgtcaaaccaaaagacatacttaggagacttgtgggtaagaaggatggcaacttattggaagacaacaaggggaaattgagctggaagaggaacaaacagaagtgaagttggggactttgttaaaggaaagtacacttgttattagtctgcacgatataattctttttgaaggaaagtaagcttacaaaagcagggcagtgtctgtcctgcttttgttcctgagaacatgagaaaaaaaatgagaacatacacattctatcaaatgatcagtatatgaagcaaattatatcctgttaacaggcaaaactggtaccatagagatggtgatgggtctgaaagaacacacaagatgtattagaacagatatgtacttttaaaatgatctcctatataactgatttccttttataaaaggaatcactgagaactgtttctgatcttgttcctaattttatttcttctaatgtgaaaatgcctatcaggcatttcttattgaaaactaaaataatgtccttgccaatcccagaagaggagaaaggaataactcctggggagaaagaagggggaagaagaaggtgtgaagagtgttgaagtaaaggaatgctgttttggcatctcatccatgtcggtgacagcaggtgccacagaggaaaagacaaccaaataaagggcaaggaaaccaggagagcagacacaaagggggaaacagatccctctgccctgtgcctcattaatcttgtcaaaaatacttgctgctgagaaatgctaatcttctcactccccagagtagcctccctcacaagaatgttttaaaggcctggtatatctaatgactgagccatttaataaattacttacttacgttactataaaagctagtccagcagctgtaacctacatgtaaagcactaaatccttttacctgatttctaaaggtttctctaaatcatatttagtgacagggtgaggtacacaggaatcaggatttagtggcagggcatacctcatgctgtttcgagtaggtcaggaggtctgacttggatatcttcccagtaacctgatctaggtgaatcagcaggttataaatgaaagtcagtttctaagatctcctgactttcttcaactatcaggaactttataggaacctggtgagaaacaggaaaagaccaagagataataaataacattgaccaatattatggtattgcaatttctctttcctaatacaatgtaaaatgtagtgccatttttggacaagctaattatttgtatagattcctgagtttgttatttttgttagcctgaataaatatctaaatgattggaaaatgtttaagagctgaaagccttttctaggtcacaaagtataacattagatagtggttcttccaagggcaggttctaatactttcatatgtttctatcactcattatatgaaaattcctcattttaaaccctcactttaaatcacaggaaggaagacaagttagaaaaggagaacaaaggaaacaaaatgtattggaagacttgtcacattcaaagtattgacattcattgcctagcttcattctcacggcaacttttggacgaattaaacttctgctcaaagacagtcacaatagctataataaaattagtgtttgattctagctttgtctaattgcaaagcctgaactggaggtaaatgtctggtgtaagcaaacttccactgccccttaaaccatacctcactgataattgtctcttgtcctacccatagcctggttctgcaccactttctgcaccaatttatgtcgtatttctaaaggttatttttcccttctttattactattttcagttaaaagatttctcagttagcatggcttagtaaatcaagaacttacatctgtacaatctcagagaaacccaagggcatcacaagcaccactagtgacatgtttccttcattgtaaatgggcaatagcacttgctgtttttgaatgccatgaacacattgggaatattcagctactttgtgggtcaatatagaaaaattatattaaatatgaagaaacggtcccaattttctcatcatattgaaatgccaataattataatagctcacagatatgttatgaggattgacaaagtaccacatggaaagcgcaaaaggcagctcacagcttaggaaaagtgttaagtcaatactagcttttattaatgatgtttttatacttatgagtaagattattgggttcctattctctaagagttcactagctccagaaccacacagtaaaatgcttcctctctttatgtcccttccaatgtcaatttcactgcttctgttctatattccagaagtgtgattggtgattaatgaagtaaatataagaataagctctagatgataagaaactggttatatttgcaaatacagccctcagtaacctgtatacttataaataacctgagatttctgcccccatatgtaccaaaacagtaactgaaatatagtttctacacactcacctcccaaccctttcttatcctgtaaaataactaaacaggagactgtatgatcatagctgaataataaggctctgcctgtatcggttacctttttctgaaggtcctaaggtcctaatgtgtttcaggaatgtctacctttgaccttgctagtccatactctgaaacgtctaattttatttttatgctttttgtgtactagggtgagggcaggcaggtaaaggttaggttgtgtgatattcagaggctggaaactgaaaccccctgtttctcacagcacagatgtggtgcagacagcccgggcctctacatttcctcgctgtgccctaaaaatgaccttaaccctgacatagaaagagaagcaacatcactgtgaaaggctgttgctggctggctgtgtgagagggagcagttttctgagtgtggggctgtgtcccattggcctctcctgtgtcataacacttccagtctctccaagttgacctggatcctctgaagccaaagaaaggtcaaagttaattctttgtgcccatcaaactcattttatgagttgtttttttccatgaaccagtgggaaaatgattcaaatcaatactttctcttcaatcttaaaatatattggaaataattgttttcttttggggtacttttcccaaacaacctctgcctttctaccttttgctttattctaataaataaataaaaatatatgcatatatatgtatacatgttcatatatacaaaataatcaaaccaaaacaacaatcacctcgacaaactgtgtttcctttgaattgcttatttttatatatttcatatcttaacaattgtaaatctaaatgataataaaaaatatatttttagcttctttaaagatttcaaattcttgtttttcttctccatttaagacagatgtttatttttatatgatgtctaggttttataaagtccaggtaagaggatgctttcattttttctttctatatttctcatgatagaataatggaaagtgatcaaaccgggaaatggaagagtttaagcaaacggaatttttttaccaaattattaaaacaacatggacaggttttcttttttaaaaaaaaatgactgacaaagttagttttgtaaagtatttcttgcaactatttaattaaactcaagtctcatgtagtataattcaattcttatgtagtgtagcctcttctttgcaagaaagcatcattttagggtaagagccatttctcagatgttcaccttactttctgtagtaaggcttcaacatgcttgtgactgcctataaccctatcttcatctttcaaggcctgtggatactgaaaacaaaacaatgaaagaacaagacctctgatagatttcatgggcttcttggaggaccaacgtcagtcaatggaagtgtgatgacttatcagaggtaaagtggtcctctattgttctttgctcagaaagatatttaagaagaaaatccatttctattgcaaatttattcctaagccattgctctgttaagcatttgtatatggaaagggatactgatgaattgtttttgaatattctaaataataagaacttatgtaagctgatgactaatcacagattttagggcagtatgagttacattcaagtatacttaaaaggtgacctttcagttcattctcaaaatcttggcctgtgctctatgaatggcaggccactaactttagacatgctgttgtggttcattttaggcttccttggttgcagtacagaagatgcaatgccagcagtgctttttcaggagctccctctgaagaagatcatggctcagttaccatggacaccaagaagctatgcagctttttattctttttacttccttcattatgtgccctcccaggaaatatattttcattagtaactaggttttgaaacttttgccaagacaccagcctaacctattgctctctaaacaaataccttcagtatctaatacataggtatatgccagtctgagccaactgtgctattaggaaactaataaatactcctttgcttcctatttaatgagaaaaagcacgacaatattgctcatgccagatcaggttttgattggtatgtgcttatccttcataaacaaatgtattttatatgaaaaaccacaggggaaatatttttatttattttattagttgtacaaaagccatgttggcaactgaagaaccaataaaataaaattgtctcatgtggttcttattatggaatcaaatagtaatgtaaaaggcaagcacacaccaatcataattccatctggctgaaagaacaggaaaatgtggctccattttcattaggaaaaggaggcatatatttcataatgtgttcaaatgtggctctaaaggtactcccagtacactactgcattttgtaccactcatggggtgccatatctactgatgcaggttaatgtaatcaaagtgacttgaaaggagaggactgctgttagccttgcatctgcattaatagagcaccaacagaagctagagcaacatttcttggcattctggaaagaaatgcatgttgaaccagtaagcaatatgtatagcccttgcaatatacacttggcatatttgcagcaagtaagttgccattcatgtaaccaccaaaaatacattccagaatgtttactcttttcagtaagcagataataccattcaagctctggacttaaaagattgcatgcataaatattttctaaattcctttagtgctgtttttggtttatcttcaaggaaatataagggtagctattatcaatagaaggtaggtattcatttgtaagaggttgggtcagcaagacactgctctattgaatcatatctgggacaacatggagtggtcatttgggcctctgggaagtgtggcatggaagagtagttctttattaagaacaagaaagtagctagccctgagaataaaggttgatttgctttgctgaaactggttttccagcctctgttggtgatttgtttttgaagtcttgcttttttttctttctcttaatctgcttgtgagtagatgactaagtgatcacgtcacctagaaatatgtgtgagtctcctgatttttgactcatgtgtgccacaactaggatggaatgatttccctatcctgaacttgtttgggagtgcagaaaaaatgatgtaagtttttgacatattttgttaaataggtatgagacttatgtatgacacatttacttggcagaaaagtaagtgcaggaggggattcaagtcacacaaaagctctggatttataatcctacttaaacatctatacattttgtaaattcacttaaaatatagagtcagcagacaaaaattgaaacttatgactaaagtaaatgtttttgaaaagttaatatggtgttttcattaacagcatccataattactaaatgtatccagaatctatactactggatgtgtttatttggtaaccaaatgtctgatcaaatatattattggacctgaaatagcctctccactggacactagtcaaccatagaatatgacgtttggctagtattcctaagaatctaacagtagatgctaagtgggaggaaaatttgtttgccttcttagggtttaattatacctggaacaattggaggccgtatataaaagggactgaccagcttctgacactatttttcttcttctttactgagaaaggctgacaaagaaacactagtgaggtcctggctttggcatcaggaagtcctgaatttgaatacttgatctgccacctaataactgatttattaaccagatgcttttcctttggaaatccaatgaaaggatagatcttgaatatttttgcttaccattttatctccaaacgatcatcctgtgtaaggcacaaattagatgttcaatatatagtattagggaaaaaaagtgaaggtaaaaatatctctaaacttaatttttcttattttcctaatttataaaatactaacagttttttttgacacagggtttttctgtgttgcccaggctagagtgcagtggcacaatcacggctctgtagccttgacctcccaggctccgactatcctcccacctcagcctcccaagtagctgggactatagatgcatgccaccacacccagctaatttttgtatttttttctaaagacagggtctcgccttgttgtccaggctggtctcaaactcctgggctcaagcgagccacctgcctaggcctcccaaagtgccaggataataggagtgagccaccatgtctggccactaatacttattttacagggttattttaaggattaaatgtgatattttatgtataaaacctagaatatttcttaacataacacaggtgaatgcttaaaaggtgtgatggtaattatttatttgataggctatacacctatatatgaaatactttaattttttctctatctgatgccttccttgactgtacttaacaattaatttgccccttgaaggtgaagacgaggtacattttgaagaaagaagaaaaaggatggggacttagaaataatatcatatacatttgaaagacacacacaaaccaaaatatttttcttttacaaaatgcccaaaccctaaccaatgttaatatatctccatcaaatgcctagaaggcttttttatatacaattcaaatatgtgtagattatattgtaaaaaaaaattttcaattctattgatttgaattcaataggaatgaagagagggataaacaatggcaatttttttttttttcatgaagacaacctttttgtcttgagcccttttagccatgtaatgtagatcagcatgagtaagaaaacagaccaggatggaaaaggaagtattggtcattttaatgttgtattacagggtgactagcaacagagtgaggaagggaacagagaagtagtttggtgaggtcaatagcactgcagatatgggaggtaaaaacgaagcaaacttaaccctacagggtatgcctgccaagaaccgccgccttcacggaattgcaagacagcaaggatggaaggcacaggttttctgtaccaacttttagggctttgtacatgagtggccccaggcctcctgtgtatgggccactgattaatcctttgaacagcattgcttctgttttccgaaagctgggctggagctcagcgcagccgccgtgccaagccactagaaaggaaaaccagaaccggcgctgatctttcagcactgtgttcccatctacaatgtttatttctctaaatcttttaacaattaaaatactctcaattagtatacaaccatctttatgatttgctatattctttcaactttcagtgtaacattatttattttaacttcaatttacttttgatgtggtgcatgtatacaatttaccacagaacccgttttaacatttaacagcacgcttcctttttccttcctcaaactattttaaatcacatgttttaaattttcattggattcagatatgttttcagcagatagacagtaaaacaaacagaaacaaattgattttggtaaacagcagagatgtaacacgaagcaaaagttcaatttatacttttcatgttttgcttacccatttttttttgacaaagggtacaattttttattttaacagataagatcatctcaactagaggcaataaccatactattacagtcttgtttttccttcgtttgagccgatggtcttatctttgaattatcacaccatgttaagatttctttaacagttagtacatggttgggtgggtaatggttgtactacaaaatctcgtgtttatttaaaatacaaagagcataactaccaccatcagcatcaacaccaaaaaattccttgttaaaacaagtgaactaaaaaacaaaataaaacaaacaaaaaaaagaatgtctgcaattgcatttctttttcaaaaaaaaccttttatttactttttaatgaatacatctagttagtgaatactatcatgacattcccttcaggtcaaatcaaaatcagataacatttctaactgcctaccaaacatggagcccttcccccaggagctcagtcttatcactagatatttcaaagagcccattgggaaacttccttcctgtcattccaaggtattttaagcaagtagactcttggagaatatcaatagaggacgatgccatggcaatgatgatgcttcctgcgtggattgagaatcttagtcttcccatgagtctctgctgtgttaaatgatgtacagttaaaacttctacagaatgactcttagtagattaatttgaatgcttattatacattacctcattcattttctctggacacacattgaaagagaggctttctccattacactgggagctcagagattaagtaactcgattgcaatctcgtgggagagcaatcatttgagtccaggcctgaatgaaccaaccccatggatatcctgctcagtatagcccacctgtgcacagagaccacatcctgaagaaatttacctgtacgcagaataaaggaggagaaaggggcagggaaggagagtcagtagttcagtgtgagttctgctttgtcctatatcacctccttgactaatcctgatttccttgctcacttaaaactctccttccctgactgagtatattagcttctattgcttcataacaaccacaaacttaactcaaaagagcatcatctatttgctctcagttgtgtaggttctacctctattcagggtataacaagttagaaatcaaggtgtttccaaggtgttttcacctggaggcagtggaggaagttcctcttctatattcttcttgttggaagaattcagttcctttcagtggtgggactgatggcttcatttccttgctggctgtcagctgctcctgggtcctagagtttcttctccaatccttgccatgtggcttccatagacagttcaccacaagggtatttgctttcttccaggccagccagagcttatctctttcctcttcttccagcagatggagaaaatcctgtttttaaaggctcacgtgatccaataaggcttacctggataatcgccctttcttacatttagctgtaccatgtaacataacctaatgacaggcccagaaattagagcagaaatcttggggaacatcacacactttagcctgccatagtgagatgtcatctatagttattcaaatatttaatatgtcaaatgacattagagtaggaaataatttatccagaggggatatattcaactttttaggtgtattgttaagcacataattatataattaatagaatctataagaaagacattttaggggtagcacaacaagacatttttggctgacagtgaatatgtgaagttataattaaagaatacacagtcagcggttccaagatggccgaataggaacagctgtagtctatagctcccagcgtgagtgacacagaagacgggtgatttctgcatttccaactgaggtaccaggttcatctcactggggcttgtcggacagtgggtgcagtgcaccaagcatgagccgaagcagggtgaggcatcacctcacccgggaagtgcaaggggtcagagaattccctttcctagccaagcaaagctataacagactgcacctggaaaattgggtcactcccactctaatactgcccttttccaatggtcttagcaagcagcacaccaggagattatatcccatgcctggctcggagggtgccacgcccatggaccctcgctcattgctagcacagcagtctgagatggaactgcaaggcagcagcgaggttgggggataggcacccgccattgctgaggtttgagtaggtaaacaaagcagccaggaagctcaaactgggtggagcccaccgcagctcaaggaggcctgcctgtctctgtagactccacttctgggggcagggcatagccaaacaaaaggcagcagaaacctctgcagacttaaatgtccctatctgacagctttgaagagagtagtggttctcccagcacagagtttgagatctgagaacggacagactgcctcctcaagtgggtccctgaccctgagtagcctatctgggaggcaccccccagtaggggcagactgacacttcacacggccatgtacccctccgagacgaaacctcctgaggaatgatcagacaacaaaatttgctgttcagcaatattcactgttctgcagcctctactgctgatacccaggcaaacagggtctggagtggacatccagcaaactccaacagacctgcagctgagggtcctgactgttaaaaggaaaactaacaaacagaaaggacatccgcaccaaaaccccatctgtatatcaccatcatcaaagaccaaaggtaaataaaaccacaaagatggggaaaaaacagaacagaaaaattgaaaattctaaaaatcagagcacctctcctcctccaaaggaacacagcccctcgccagcaacggaacaaagctggatggagaatgactttgatgagttcagagaagaaagcttcagatgatcaaacttctccgagctaaaggaggaagttcgaacccatcgcaaagaagttaaaaaccttgaaaaaagattagatgaatggctaaccagaataaccagtgcagagaagtccttaaaggacctgatggagctgaaaaccatggcatgagaacgtgatgaatgcacaagcttcagtagctgattcaatcaactggaagaaagggaatcagtgactgaagatcaaatgaatgaaatgaagtgagaagagaagtttagagaaaaaagaataaaaagaaatgaacaaagcctctgagaaatatgggactatgtgaaaagaccaaatctacatctgactggtgtatctgaaagtgatggggagaatggaaccaagttggaaaacactctgcaggatattatcaaggagaactgccccaacctagcaaggcaggccaacattcaaattcaggaaatagagagaacaccacaaagatactcctcgagaagaacaactccaagacacataattgtcagattcaccaaagttgaaatgaaggaaaaaatgttaagggcagccagagagaaaggtcaggttacccacaaagggaagcccatcagactaatagctgatctctcggcagatgctctacaagccagaaaatagtgggggccaatattcaacattcttaaatgaaagaattttcaacccagaatttcatatccagccaaactaagcttcataagtgaaggagaaataaaatccttatagacaagcaaatgctgagagattttgtcaccaccaggcctgccctaaaagagctcctgaaggaagcactaaacatggaaaggaacaactggtaccagacactgcaaaaacatgccaaattgtaaagaccatccatgctaggaagaaactgcatcaactaatgagcaaaataaccagctaacatcataatgacaggatcaaattcacacataacaatattaaccttaaatgtaaatgggctaaatgctccaattaaaagacacagactccaaattggataaagagtcaagacccatcagtgtgctgtattcaggaaacccatctgacctgcagagacccatataggcccaaaataaagggatggaggaagatctaccaagcaaatggaaaacaaaaaaagccaggggttgcaatcctagtctctgataaaatagactttaaaccaacaaagatcaaaagagacaaagaaggccattacataatggtaaaggaatcaattcaacaagaaaagctaactatcctaaatttatatgcacccaatacaggagtactcagattcataaagcaagtccttagagacctacaaggagacttagactcccacacaataatagtgggagactttaacacccaactgtcaacattagacagatcaacaagacagaaagttaacaaggatacccaggaactgaactcagctctgcaccaagtggacctaatagacatctacagaactctccaccccaaatcaatagaatatacattcttctcagcaccacactgcacctattccaaaattgaccacatagttggaagtaaagcactcctcagcaaatgtaaaaaacagaaattataacaaactgtctctcagaccacagtgcaatcaaactagaactcaggattaagaaactcactcaaaaccactcaactacatggaaactgaacaacctgctcctgagtgactactgggtacataacaaaatgaaggcagaaataaagatgttctttgaaaccaacgagaacaaagacacaacataccagaatctctggaacacattcaaagcagtgtgtagagggaaatttatagcactaaatgcccacaagagaaagcaggaaagatctaaaattgacaccctaacatcacaattaaaagaactagagacacaagaggaaacacattcaaaatctagcagaaggcaataaataactaagatcagagcagaactgaaggaaatagagacacaaaaaacccttccaaaaattaatgaatccaggagctggttttttgaaaagatcaacaaaattgatggactactagcaagactaataaagaagaaaagagagaagaatcaaatagacgcaataaaaaatgataaacgggatatcaccacaggtcccacagaaatacaaactaccatcagagaatactataaacacctctatgcaaataaactagaaaatctagaagaaatggataagttcctcgacacatacaccctcccaaggctaaaccaggaagaagttgaatctctgaatagaccaataacaggctttgaaattgaggcaataatagcttaccaaccaaaaaaggtccagaaccagatggattcacagccgaattctaccagaggtacaaggaggagctggtaccattccttctgaaactattccaatcaatagaaaaaaagagaatcctccctaactcattttatgaggccagcatcatcctgataccaaagtctggcagagacacaacaaaaaaaaagaattttagaccaatatccctgatgaacatcgatgcaaaaatcctcaaaaaaaaatactggcagactgaatccagcagcaaatcaaaaagcttatccaccacgattaagtgggcttcatccctggcatgcaaggctggttcaacatacacaaatcaataaacgttatccagcatataaacagaaccaaagacaaaaaccacatgattatctcaataggtgcagaaaaggccttcgacaaaattcaacagcccttcatgctaaaaactctcaataaattagttattgatgggatgtatctaaaaataataacagctatttatgacaaacccacagccaatatcatactgaatgggcaaaaactggaagcattccctttgaaaactggcacaagacagggatgccctctctcaccactcctattcaacatagtgttggaatttctggccagggcaatcaggcaggagaaagaaataaagggtattcagttaggaaaagaggaagtcatattgtccctgtttgcagatgacatgattgtatatctagaaaaccccatcgtctcagcccaaaatctccttcagctgataagcaacttcagcaaagtctcaggatacaaaatcaatgtgcaaaaatcacaagcattcttatacaccaataacagacaaacagacagccaaatcatgagtgaactcccattcacaattgctttaaagataataaaatacctaggaatccaacttacaagggatatgaaggacctcttcaaggagaactacaaaccactgctcaacgaaataaaagaggacacaaacaaatggaagaacattccatgatcatggatagggagaatcaatatcgtgaaaatggccatattgcccaaggtaatttatagattcaacgccatcctcatcaaggtaccagtgattttcttcacagaattggaaaaaactactttaaagttcgtatggaaccaaaaaagagactgcattgccaagtcaatcctaagccaaaagaacaaagctggaggcatcacgctacctgacttcaaactatattacaaggctacagtaaccaaaacagcatagtactagtaccaaaacagaaatacagacccatggaacagaacagagccctcagaaataataccacacatctacaactatctgatctttgacaaacctgacagaaacaagaaatggggaaaggattccctatttaataaatggtgctgggaaaactggctagccatatgtagaaagttgaaactggatcccttccttacaccttatacaaaaattaattcaagatggattaaagacttaaatgttagacctaaaaccataaaaaccctagaagaaaacctaggcattaccattcaggacataggcatgggcgagcacttcatgtctgaaacaccaaagcactggcaacaaaagccaaaattgacaaatgggatctaattaaactaaagagcttctgcacagcaaaagaaactaccatcagagtgaacagacaacctacagaatgggagaaaatttttgcaatctactcatctgacaaagggctaatatccagaatctacaaagaactcaaacaaatttacaagaaaaaaacaaacaaccccatcaaaaggtgggcaaaggatatgaacagacacttctcaaaagaagacatttatggagccaacagacacatgaaaaaatgctcatcatcactggcaatcagagaaatgcaaatcaaaaccactatgagatatcatctcacaccagttagaatgatgatcattaaaaagtcaggaaacaacaggtgctggagaggatgtggagaaataggaacacttttacactgttggtgggactgtaaactagttcaaccattgtggatgacagtgtggtgattcctcagggatctagaactagaaataccatttgacccagccatcccattactgggtatatacccaaaggaatataaatcatggtgctataaagatacatgcacacatatgtttattgcggcactactcacaatagcaaagacttggaaccaacccaaatgttcaacaatggtagactggattaagaaaatgtggcacatatacatcaaggaatactacgcagccataaaaaaggatgagttcatgtcctttgtagggacatggatgaagttggaaaccatcattctcagcaaactatcgcaaggacaaaaaaccaaacactgcgtgttctcactcataggtgggaattggacaatgagaacacttggacacaggaaggggaacatcacacactggggcctgttgtggggtggggggaggggggagggatatcattaggagatatagctaatgtaaatgatgagttagtgggtgcagcacaccaacatggcacatgtacacatatgtaacaaacctgcatgttgtgcacatgtaccctggaacttaaagtataataaaatatatatatatgtataaataaaaaaatacaaatcattgactgtatttaatttctggtttatgtgataaatatgccagtttttaagttaaaatgtttatataatgctggtctattatcaaaattggcaatatagtatttatacagatgaaattgttggaaagaggttaaataaatgcaatttatatagacctgtgactgctgtgtgcctcctggcttccccctttttaaatggaagtgtgtaaaaaacttatcctattcttgttcaatcattgaatatagaatatttggggagcaagtagctcatctctttagatattatgtctttagatcaaaatgaatgtttctgaagaagttgtacttgaggaactacaattcatctgaatcttgactgatttagatgaggaaaccgtagagtacatgcaacagtgtgagaagacttgaaagtcttagggaagagaatgagtacatcttgcatgtggaagggtagaaaggatgtgaatttttgtagccagagagtagaccgtgacacattgtattttccaaagatggcctgcattctttcttcacaatgcattttttttttttttttgctgtcaaataaaagtcagatcacatttttaactgccctcaaaaccttgatactcctcccactgagtggcaaagtccatgtcccctctccctgcagtgggccgactttagcgactgcctcaattaatacagtatgagaaaagtgacactacttgagtttgagacgaaatcataaaaatgtcatgtacctctcccttgctctcttgggacacttgcttttggaacacagagccatgttgtgaggaagctcacactagcccataggaaagactatatgaggaggctacaggcaagtgttctgattgagagccaagctgaggttccaaccgatagccagcaacaatcaccagacatgtgagtgaagacagcatgttaatgaaactgcagcaaggtgattttagccccaaccattgaatgaccctcatcctgaaagtcttcccagctgagacctcacaactgcggagcaaagaacagccattcctgcttttcccagtctgaattcctaacccaaaagattcatgagcataatataataaattttcaccaagttttgggggtagttttcaccaagtttttgggtcattgggggtagctgtatagcaactgagcactggaaaattagaataaattacatagtcaactgtatttcagtccttgactttatttagataatactaggatagtatcctctcagctaaagctatgaatcatgaatgttataaatattatgaaaactatcattgacatcaacaaaagttatcacagggttaaactgacacacgtttcatgatatgcgtagtcattgctaagtaagtaggcataagaacaaggtaatttaaataagtgattataattggtacaatattttgaagtttttaatcttactggttagtttttggtttttttgtgtgtgttgcttataatttatggtagatttctatgatacactgatgtaaatataatctggactctgtgaacactgctaagtttctttgcactatagaatcaggtgaaatagcccatcccatcaaaaaaagagcatatgtgcctctataactactttaagttttgtcatagctaagtgcaggaaacaagaagctggaggctctgtatgaggcaagtgtatgcaagtctccaggggaagctgttaaaaagcctatgttacattggtggctggagtggctagaaaaagaggtgacactcaggtgtctttaaagtaatcagatgggcacaaaaggaactgagactgtacttagaatcctcatgttaggaagcttcgttggataggaattagctaagaacagagttatttgttgggtaaactcacaggcatgggtgggaagtttatttagtgaaagtgagtgaattaacacaagagcctcagatgtataattttcaatctaccttaatggtattttgtttttcttaaagcagaaatttaaagatatttacaaaatccccagcattgtggtgcaatagaaaaagtattggtagccaggcgtggtggctcacgcctataatcccagccctttgggaggctgaggtgggcggatcacgaggtcaggagttcgagaccaacctggccaatatggtgaaaccctgtctctactataaatacaaaaattagccgggcgtggtggtgcgtgcctgtggtcctagctactgaggaggctgaggcaggagaatcgcttgaacccaggaggcggaggttgcagtgagccgagatcgtgccactgtactctagccggggcaacagagtgagatgctgtctcaaaaaaaaaaaaaaagaaaagaaaaagaaaaaagaaaaagtattggtagaaaagaggttggtatatattctctgaccaatttttcccttttcaagttaatctgttttttcttgaacattaaacgtttaagaaaatgtttattacactaaaacaccttggttaaactgcctaaattgtgagctcttagaaagattatcagaaaagctgtatttattggtgaccatgtagttttattcttaaattatctcacagagcccttagataccttggaagataatctcttaaatttacttttggggataatttactgctttctccattggtagtttggcctgagtttgttttgagctataaaatgaatgatctttagcaagcactcttcattttttttccttgtctactgatgtagagattaaaagcttcttttttagggctagcattagagatctgcaaggtgacttagcaaaggcttctaccaaacaagaggaaagacaagtatcttttctctgacccttggagaaagggtggtctcctcctgactactttctctttccatcttaaggtggaagagaaaggtgggatgcaatccaataaagtaagcgtgcagaaaactcgaaataaacaacaaaactggaaacaacaagccatgaagcaacaacacagaaatcttaactaggaaaatctttcaaaatatcaatgggttttgaaaaatttagaaaaataaagagataaaagtccaccaaaatcaactacccaacaagaaacaaataagcaacacagaattcctgcctgccaggttttgcatcctgtatgaggagtagactatcaggaaggtccaaataactcttcttcagagatgctgctctcatgcctctgttatgtaaggggtagagctggacaatcagcttttgtaccatacaaggaattattttcactgtagtgaaactgcctttgcaaaaatatgacagtaagagaaacctgacatggctgactccatcttggctctagccttgtgtctattaaactctttctttactgcaaggccatagtctctgtgagctgattttgtttattcagtggggaggaagacccttctgggcagttacagtaggtcataatgaattaactttccttatctcatcagcaccttatcagcccctaaacactgcattcccaacattttgatgtttccctttcagaaacaagtaattcaaagtagacatttctcctgaggttatgtacttggtgagaacaaacctccaggtatagaacacacactctcatactcccacaccactgtggggcgtagtcttggaggcaataggtactttttcttattacaatataatataaaattaggccatcaaaattcattgcctgctctctgctcctaccctgatatataaaattaggccatcaaaattcattgcctgctctctgctcctaccctgagacccccatcaactcttctgtcatctcctatgcgtcttctattcttaaactccaatataacctccaatataagagaactactgcatccatagcctcattttaggctggtgccttaagttccagagatttttagcagcaggaatttggggtgagaagtgaaagccaacaccctacagggaggagtacctgaagcccaaaagtgagctcagagaggggatagagcatcaggagagaggatttgactgtgtacagagaggaagtgtttggctagaagattaaaagacttcaaaactaaaggacagagatgtgaagaggaaggaaggaattaacacctcccatctatgtctgaagtcccttttaaattcagccttcacaccatccaaaaggctgaagcagaactatctgtaatttaactttaaagtaactgatgctttcaaatggagattaaacgccaaataagtaagggaggtaacacattagagttataccaccaactcctgagaggtaacacatcagtgtgaatcaaccccaatcaaaatgcaaattatatctgatcatttcctgcttttttataggaaaggagtggggatgtaactaggaacaaatagagatggaaaaggaaagactggtgccatatatatgtaaattttacatattatatataatttttaggttaataaagggaatttgtatatggcatacatatataaataaattaatataatatatatatatacaaatgccctttcttaacctaaatgttttgccttatccaaagaccagaaaatgagtaaacaaattaaattgaatatactaagtaattatagtgccttatttttttgttacaaacttatggcttcaaacaccttttctcatataaccttcccaataaacttatgctctcatattatcattcccaatttcaggatgatgaaactagggtacaaacagtttaagcaacttgcctgtaataaagcaaccaaggaactaatagagcctgtattgagactcaagcattttattttagttcccctgttctctccattccacaagagctccttaccatttgtggtgcctggcttcagaggatcagtgcacagtggctttgatatccttcaccttctgagtattataccatcaagtaaactctgtgccccatcttccatattataaaaatagttgcctggacaactgaggaagcattctgatgtatgttgccttttgtttgtttttgtttttgagaaaataatactatatggagtacttatgatctagggctgataactataccaaagggaatcataaagaaaagccagcatttcgatacttttaaacttttgctatttatcccttagattaggacagtatgattgaaaaactattattcacatattttgaagctagaaaaatatgatgcaaccaattataaagtaagtataataatttcagtggataaattacagctctgtaacttcataataatggcaaacttttatccagtgctgattatgttccagccactgccatgtgagctaggtactactattaatcagcattttgccaaggaggaaactgaggttagaattgttaagtaagttgcataagagttcatagttagtgagcagtagagctaaaattgggaaccaggtggtctggttccagaattcgcactctgaaccatgatgccaaacacataccgcatccctactttgaaaagtgggaatcctaactgtacctcattttaggataagtcaactctgccattacctaactgtgtagttactgtgcattgtccatatacgctgcattcttcctgaattcatgggcctccttagtgactaattgtttatttcattttgatagctctattttttccattgttttgcatcttttgcagtcaggaactgggtctgtgtttcagtccaaaatataacatgggcttgggatacactctttgaaagacctatccaatttatttaatgaatagatgaataaatgaatgggtgaattagagtgaattatcacatgagatagcaaaatgtttataaacctgcctggacataattttctgggaaaggagtttctgttcaaagcttcccctgaaatgaactccatagagaggtcatgtaggaaaagtacaggaatgtagccagaaacctggagtgagcatataaactagcaaatgtagtaagttaattttcctaagctttatttccttacatatgaaactaaaggtttggcttatgatttctttaatccttctcagttaaaaattatatgatgttatgattctgtaaattatagcaaggtttcggtgaccaattttttaaaggcttaagcattttgtttttgtcagttgacttttgctgagctcatgaataccaaataattcttctctctctctctctttttccctctctctcctgctccctcccttcttctctctctttctttcaaagaaaaaaaaatattccccaagtggtgcagttatttttcagactctcttatagctgaaattatttaccacataaaaacctcaaaccaagcagtgacatatcccttgtaaagtattcacaagctattcaaccaacattaaaagtggaaaataagtctttgctcataaggggacattgacaaagattaaatagacttctatgaagttcagagggtgaaggccagattacatcattatcaaagctagatagtttctcccaaataattggtaacaagagagccaactttgtttcttgctgtgcatgtggaaatctcttggacaatgatggaaactgcgtgaagaactgagcatagaattcttttacttatttatttatttgatttattaaatcttcctgagcctctggagacatgaacatagctgtaaaaaatactgatacacatttatctagtccctttcccaacctcatagttggaattctccatatcaatcagacaaaagcctggattcagcccaggatattaatgaaagttgcattctcattttgcagtcctaaacagaattatattcattaacacattttcctctctgatcactgtccagaatgcttcaggtttttaaatgtttattttgtttttctaattccttttctgcttgcaagggtcaattgcattgaaaaacaaagaaggattgatggaggcttttttcatcagacctcaagtcttaaatgtattttccttggggagtatgaccccaggcaataaacagaactaggggagagaaactggctggcattttttttggtaatatatatcctgatacttaatattgataatgatattatcactaaatctactaaagcaggagatattggttaccaacaggaattggtgacctacctattcctgttcttgaagcaaggtcattttcaaaggttgtgtaagagaaggacacgtgacccataaagtcatgtaaagcctcgtgcttagaagggctccatgcttggtttaatgctttgctactgcagtcttgaaagtcttcataatttttgaataggaggccctgcatttttattttgaactagaccttatcagttatatagcacatccttcttaggcatataatctaattaagtaattcggtattttatttttgcaccagggctaattaaattaggaaagcagtagcagctgccattcaacaatttgtatgtacccaaaactgtataatggacaaagttctcaatatagagtatcaccttgaaacctgaagacatcatttttttctcattttttaaaaataagaaatctgagcttcagagactttaaatagcttgcctaaatgtaaacaagtggtaaatatgggagacagaacttagagctatgccttcagcttctaaggcatgccactttctgtgagtgtttgctttaaagtcctattggagtatggattcatggaagatatcatgctgcaggtgtaatctataggagtttgagaaagacttagatgaatttttcaaccaaaatctaaaatatcataggggaatttatttgacctatgtatggcttcctaaatatgagaggatttcttaaaccatggtaagacaaaataactcagaattgatttacttttcttataaataaagataccactttattaatcatctctttgacaatactatgccttgaatcttcagagcgcatgacatcttcagggtctcatgaatacatagtgagtcattagaaaaactgattaaaatggaactttctatctcttctctattgtgaattaaggattaataccattttatatttttcataccatttttaagatagataaaggtttcctctcctggttactactcttcacaaatgttctcttttaacctctccagtagctccaatgtcattgatcctttcagtggtcactgtaggacattatggacatccaagcatctgaccagaaggaaacccctttgtcaaatcttctgtttcttttgtctttttccttacccttcatgataatatttgtaactgttgccagcgcttaccacatttgaactttccttgacattcttggatttctctttcttctaaaacttaatttaaatgaatttgcagactaaatatttgctgtaggtcatttacctttttcctaatgctgattctgcctccagccaaaattgaactgctttaagttcttgtttttaatgaatgataaaaaaaaattttaaccaattatattctgccttctttactaatgaggaacatagcatgttcatttaataaataagagcttatatgcgaagacaagtagctgcaaaatctctcctacaacgggcagtggtgaaaataaaggtcaatttaagaggggtttctaaccggctgataaggtttatgttccctttggaaagattacatgttatagtgaatgaagaaataattatatagtcaccaattttaaaaataatgagaaacatatttttacatatgatcttattaaaaatctcttattaacaaataattgttgggaaaacaaataagctttcacattttttatattgcttatcttcagctaatatattttaggtattcaacaaatagtttttggactaacagatgtattttgaagtatcttctctcgttgtcttcagaatatgatttaggaattcatctgctccccctgccttcaatgcacaggtacgtacacccatcagaaacaaaacaccaacaaacagagaaaaaggttttcagttaaattatacagaatttctattgaacagcagcctcattttttttagattttgaatatgaccaaagttattttcccacagagggaatggtataataatttttaattatataatttgagcccctttccaaggagaatacaagttacacccctgccctttaaaaacaaaaacaaaaacaaaaacaaaaaaacccagcagagaatagggagcagtgtgatggtgctgcaggctggcaacgctttcctgggagtcttcccacctctttcattatgtcacaccctcctggttcatccctgtcttttattccttagactctgagatctaaaactgccaaagaggtttatcttctgaattattaacaaattagaaagtcctaacaaaattctggaaatgaagaaaacattacttgtgtgcttcaaaaagcataaaatattagaacatgtaagagggaaaggctcctgggtattatgagaggcccaaatctagaacggagttttatgttcatcctctgaacacagggctggggactggagaagccttggttcatccaagtgttctagaaaaccatatgcttcttatgcaatgtagattgaagtggggttttcaaacgtatatcagtaacacaatacaaccttatttaattaaattattgtttaattaaagaaactgcttataattgtaaactttgtcatacaacaaatgaattatataataatgtagaagtctatttgtttttcacttaagaatggattctttttaagtcatgggatatgaggtagatgtgagcagaggcaatggtaaagtgtgtggcactggtatcagtctgccagggaataaatactatatccatttattcctagctgtatgaacttggacaaattccttctcttatctccatttctcacctgttgaatgatgataatgatgtctacccagtaagaccattgtaaaaattatatgtgtaattttaattatttggatgcatttttttaacgtgacataaacttgaaaaatgttaatgtaagctctgttctacaactgaaagtagttctgatacttacctgttagctgaatgaatttgagagactcattgtttaggatatctaacctaacaaagcttgagaaggagccctttctcttggctataattaacagcacattttatatgtatttaagtatgaatccatggtaagattctggctataatttgagattcaagtggcaatttcatcacaagaatatcagcagtcactttgttgcttttagctgtcatttggtaattctgttctggactcatcctttcctcaacttcacagccagatttccaaataggcctttcttctttccttcaactccccaaatgcacactgtttgagtatacctcatgataaatttcggactatgccctctaagagctggaaaaatgggcacacagagtctgacagtcacagtcatcaagagaattctgatttgctcatggaacccattcaaagggttccagagaccatccacaaaggctgtcacattgttataccacattaaacacatgcctgtgcaatactggcatgtttcataacttcagaaataacaaaaacctcaactacttccagccttttaatttccttttgtaaccattgttaactgactcttcaatgcaaaatgaaaagctaaccctcaaacccattaaccctcccccaattcctccccctccctttaatttccccttcaaccacttaaaaaatagtcctatctcctcttagcttaatttcttagtggagaactcattcttctcccaggcagattctcccagtgtggtatggtctgttgctgtggtcagcctgcatgttcagcctgccagcaggctcagccatttctggagctgctggggatcctctagctggagaatgctttgaattccctgagttatccaatgcatcagtctctctacatgcaccttgggataaccagcggcctcctgtcacggggaacctagccatgccctccccgaaagagtctacactccttatcccaggagggaaataaaaagaaaagtaatatacaaaaatagcactaaattatgtttttaaagaactttcttgcctgtaactaacttttctataaatgcaacatatattctataaatcaaagataagaggataacatttgttatggtttggctgtgaccccacccaaactcatcttgaattgtagttcccataattcccatgtgtcatgggagggaaccagtgggatataattgaatcatgagggtgggtctttcctgtgctgttctcatgatagtgaataagtctcacaggatctaatagttttataaagaggaattcccttgtaccagttctctcttccctgccgccatgtaagatgtgacttgctccttcttaccttctgccatgattgtaaggtctctccatccatgtggaactgtgagtcaattaaacccctttcctttataattacccagtttcaggtatgtctttattagcagtatgagaatggactaatacatcattatctataagccaaaacacaatttcttaaaatttgccttatttctctcttccttctgctttctttttcccttttaaccatatgttccccatttctcctactgttcttacagtatcccatttgtatccagaactctcttcaatagagctgctcaatgggccttttctatccaagtggccttcactctctctgacctagagttttctgaacttgttttatattaaagtttgcttagcccagatctctcaagtccttattgaagtgactggccattcagaaaatttaaacgtatgaatgtattaagaactattgacttaataagtccactctttgaagagcatttgcatcatggagataaaatattatattctaagttacagaaaaattcaaggaaactgaagaaaagagatttttgggtaaaagaataaatacatcacaaacacacacacacacacacacacacacacacacaactgggctattgagagacagtgtggcatgtataatgactccatataaaagattaatgctgggaatctggggatggtagggggtgtgatgggtaaagactatggttatgagttaaattgtacagtaaattgtatattttgaaagtggaagtattactttttataatatcacagaaaataaagttctataacatttcctaggagatctggcaattctcaagcttgagaaattccatgttcctatctacatgaggcagggggttgaataaatcagaatcttgaagaaacaggtgttaaccacttacattgcttcattgaaaattgtgatgaagcacagaatagaggaaaatgcatgggttttgaagggagatagacttaaaatagaagtcttattcagttcttactgagctataggatcttttacatgcacttagtttctttgggtctgttctcttatctgtaaaacagggattttttcatacctatcttttacaactgttgagatattgtatgtgacatatctagcacaatattttacctgtagtagatggtcaataaacagcagctcttattatcatttatatttctaacaataaaccctgcattactgtttaatggcaattggaggttgtcaggaaggccaggagctacaggccatggctgacaccagtaatcccagcactttgggaggccaaggtgggtgaatcacctgaggtcagtagtttgagaccagcctggccaacatggtgaaaccctgtctctactaaaaatacaaaaaccagctgggtgtgatggcacacacctgtaatcccagctacttgggaggctgaggcaggagaatcggcttgaacccaggaggtggaggttgcagtgagccgagattgtgccactgcactccagcctgggcaacagagcaagactctgtctcgaaaaaaaaaaaattatgatttgtctttcaaatcttaaagcatgttttaatgacattgtatgcagttatttttttctgtttaaaaattcatttttctagttgcccctgaatttagcacagtatgtattcagcaaatatttcctagactaatatgtcagtccattctcatgctgctataaagaactgcctgagactgagtaatttataaaagaaaaagttttaattgactcacagttctgcatggctggggatgcctcaggaaacttataattatggtagaaggggaagaaaacaggcccttcttcacaggagatacaagtgctgagtgaagggagaaaaaccccttataaaatcatcagatctcatgataagtcactcactatcactcacaaacacaagaatagcatgagggtaactacccccaagattcaattaccttccactgggtccctcgcatgaccatgggaatatgggaactacaattcaagatgagatttgggtggggacacaaagtcaaaccatatcattctgcctctggtcctcccaaatctcatgtcctcacatttcaaaacataatcatgaccttccaacagttccccaaagtcttaacttattccagcattaactgaaaagttgaagtccgaagtctcatctgagacatggcaagacccttctgcctatgggcctgtaaaatcaaaatcaagttaggtacttcctagatacaatgcgggtacaggcattgggtaaatatacccattccaaattgaagatattggccaaaacaaaggggctacaggcccaatgcaagtctggaatgcaatagggcagtcattaaaccttaaacttttaaaatgatctccattgacttcatgtctcacatgcaggacatgctgatgtaagaggtgggctcccacagccttgggcagctctgcccctgtggctttgcagggtacacctcccctcctggctgctttcatggccggtgttgagtgtctgcagcttttccagatgcacagtgcatctgttggtggatctaccattctgaggtctggaggagagtggccctcttctcacagctccaacaggcagtgccccagtggggactctgtgtggggacttcaaccctgcatttcctttctgcagtaccctagcagaggttctccatgaaggctccacccctccagcaaacttctgcctagacatccaggcatttccatacatcctctgaaatctaggcacaggatcccaagcctcaattcttgacttctgtgcacccacaggccaaacaccatgtgtaagccaccaaggcttggggctcgcaccctctgaagcaatggctcaagctgtaccttggccccttttagccatagctggagccaaagcagctgtgacacagggtaccatgtcctgacgctgcacagagcaggggggccctgggcccaacccacaaaaccattttttcctcctatgcctctgggggcctgtgatgggagaggctgctttgaaggtttctgacatgctctggagacatttttcccattgtcttggtgattaacattcagctccttgttacttgtgcaaatttctgcaataggcttgacttttcccccagaaaactggtttttcttttttattgcattgtcaggctgcaaattttccaaacttttctgctctgcttcttcttgaatgctttgccacttagaaatttcttctgtcagatgccccaaatcatctctctcaagttcaaatttccacagatatctagggcaagggcaaaaagatgccagactctttgctgaataacaacaagggacacctttgctttagttcccaacaagttcctcatctccatctgagactaccttagcttgggattttttgtccttatcactattggcattttggtcatagctattcaacaagtctctatgaagttccaaactttcccatgtcttcctgtcttctgagccctgcaaatctttaggaagttccaagctttcccacattttcctgtcttcttgtgagccctccaaactgttgcaacctcttcctattacccagttccaaagttgcttccatattttcgggtatctttatagcaacaccccactacctggtaccaatttattgtactagttcatcctcacactgctataaagaactgcccaagaatgggtaattcataaaggaaagagatttaattgtctcacagttctgcatggctggggaagtctcaggaaacttacaatcatggcggcagaaggagaagcaaacatgtccttcaggaggcacaagtgctgaatgaagtggaggtggggaaagccacttataaaaccatcagatctcatgagaacttactgactatcacaagaacagcatgagggtaacctccaccatgattcaattacctcccactggatccttcccatgacatgtggggattatgggaactaaaattcaagatgagattcgggtgtggacacagccaaaccatattagctaataaatatgacaattggaaatatccatatgggttacaggataactctgttgatttagtcagaacaccctcaagcctcaagcgaatgtggtattcttgaatgacagcagtaaaagttatgagggatatcaggtttttattttcagtgaagaaatacatttgcatgcaagtgtatgtgtaaaactaaaatgttctggcgtaaagcaaatatccaaggggcaaactatggggaggttaatttattaaaagttatggatgagttctcagggctctcttatagctcaaccatgtgtgagagccatgaaacaaaaaggtcttaacaaatgtggaaattacagagtttgttctgctcagcccacaagatagacatccagcacccttaaataaccctgagacaagaaggtggtttctgggaagcctatgtcttctggtactgcagagcactgtggggctgaccttcatgtttgaatattaaattaataaaggcagaatctacacaataccaatggtattagtcatgtctgctggggcatccaataccagatgtcacttttctgatcttttaggatcagccttcactgtttttggcacatcagagttcacatctgagtacaatttaagttgtaacaatgcaatcatcagcatgcctaactatttttttgccttcctctcccgctatttttgggagctgaagctatgaagttcctctgcctattcatctgggaagttagagatgatttttctaggttcccttcccccatttcttttaagggaatcagagaacctgttctctgctgccttacaaacattcattttaagatttacagcaaccttgcaattaatcattctccagtggaatataataatttatgctgggtgaatagaagagttctgaccccactcattttcccacctgtgcacctcttgggagagaggcactagtcaaaaacatgaatgtgtgtgctgatgaactgtttattcttactttcaaggttgacttaaagtatgatagttgggaattcacccatctgctttacctcttaaattgagcctaatttgcaagtagaaaaggaggataaatgcagctctacctcatagtttctaattattaaacaataacactgaaaactgttatcaagaccaggagtcatcaaagtttgttctgtggactgtgctctaaaagacttttaggtaattctcatatttaatcagttctaacgtgctttttttttttccttttcttggtacagtatggtgtatgtaacagttgtttgaactgtgtcttttattttggattttgagctttttcagaatgggcatgtttttggatcaacatttagtactgtgctgggcacccatgatgaccaaaatgatacctttgttgcattacaatgacgtgatttttatgtgcttttgtcactcctaaaaccttggttcaaaagtcatttattgccaagctccagatccaactcagaagttcctgttttctccataagtgtgcatcttagaagttccagctctaagatacaaggttcactctttctgtctccaggtgatactggacaaagattctgagacgctccctaagaaactatcaaagaggagtatgagcaagggtccatcaggcagcactctttccctttagctccttttcaatctggtgagctttgcttttttatatgctttacacattggctttcttttcagattttagctaaagaaaatgggctcttctactaatataaacaatatacattttttattagccaaaaggaaaagaaaataggcttacatgattttcagcctccacagaaatgtcatagatggatctttctaagcaattcgtggtaagagatgtaactatgaaaatgttaagatgtttgccttccctttgttacctaattgtccttttgagctccctgacaccctcaattttttccacactatcactggcaaagttcctcagtaccactgttcctctctgggtttttcatcattcttctcttggaaatcatgccaacctatagttattatacactagagcttccttttcatctgtaggggtctgtatacacagttctgttccagttgctcttctcatctgacctacctttcaactcaagccaacttttcctcattgactgaatccaatagaagccaatggacagggaaacatagcaggatagaaaaagtggataatgcaagacctgaacttagctctggatcaagtggacctgattgttatctacagaactgtccaccccaaatcaacaaaatacacattctcctcatcaccatatgacatttactctaaaactgatcacataattgaaagtaaaacactcctccataaatgcaaaggtactgaaattataacagtctctcagaccacagcacaatcaaattttaactcaagattaagaaactcactcaaaaccacacaactacatggaaattgaacaacctgttcctgaaagactcctggttaaattatgaaattaaggcagaaatcaaaaagttctttgaaactaataagaacaaagagaaaacataccagaatctctgggacacagctaaagcagtgttaagaggaaaatttatagcactaaatgcccatatcacaaagctagaaagatctcaaattgacaacctaaaatcacaactaaaagaactagagaaccaagagtaaataaaccccaaagttagcagaagacaagaaataaccaagatcagagcagaagtgaaggagatagacacaaaaataccctcaaaaatcaactaatccaggagtttgttttttgaaaaaattaataaaatagacagactactagctagactaataaagaataaaaaatagaagaatcaaatagacacaatcagaaatgataagggggataataccgctgatccaatagaaatacaaaaatccataaaagaatactataaacacctctatgcatataaactagaaaatctagaagaaatggataaattcctggacatatccaccctcccaagactgaaccaggaagaaattgaatccctgaataaaccaaaaatgagttctaaaactgaggcagtaatgaatagcctaccaaccaaaaaaagtccaaccagattgaattatagcttatttctaccagaggtacaaagagaaactggtgccttttctactgaaccttttccaagcaactggaaaggagagactcctccctaacttattttatgaggccagcatcatcctgatacaaaaaccttgcagagatacaacaacaaaaaagaaaacttcaggccagtatccctgatgaacatcgacacaaaaatcctctataaaatactggcaaatcaaatccagcaccacatcaaaaagcttcctccacaatcgagttggctttatcctcaggatgcaaggttggttgaacatacacaaatcaataaatgtaattcattacataaatagaactaaagacagaaaccgcatgattattcaatagacacagaaaaggccttcaataaaattcaacatcctttcatgttaaaacttctcaataaactaggtattgaagaaacatacctcaaaataattagaggtgtatatgacaaacccagagccaatatcatactgaatgggcaaaagatggaagcactttccttgaaaaccagcacaagacaagaatgccctctctcaccactcatattcaacatagtattaaaagtctggccagggcgatcgggcaagaaaaagaaataaaggatattcaaatggaaagagaggaagtcaactaatctttgtttgtggatgacatgatcttatatctagaaaaccccattgtctcagcccaaaagcttcttaagctgataagcaacttcagcagcctcaggatacaaaatcaatgtgcaaaaatcactagggtttctgtatactgacaacaggcaagcagagagccaaatcatgaattaactctgattcacaattgctacaaacacaataaaatacctaggaatacagctaacaagagaaatgaagaacctcttcaaggagaactacaaatcactgattaaagatatcagagagtacacaaacaaatggaaaaacattccatgttcacggataggaagaatcaacatcatgaaaatgactatactgcccaaattaatttatagatcaatgctattcccattagactatcattaacattctttacagaatttacaaagaaaactattttaaatttcacatagaacccaaaaagagcccacatagccaagacaatcctaagcaaaaagaacaaagctggaaccatcatgctccctgacttcaaactatactacaaggctaatgtaaccaaaacagcatggtcctggtacaaaaacagacacagagaccaatggaacagaatagagaactcaaaaataagattacacatctatagccatctgatcttcaacaaacctgacaaaaacaaacaatggggaaaggattccctatttaataaatggtgttgcaagaaaaaattgcagaaaaattgtaactgaacccatccttacaccttatacaaaaattaactcaagatggattacagacttaaatgtaaaacccaaaactataaaaattttagaagaaaatctaggcaataccattcaggacatagacacaaagatttcatgactaaaacgtgggcaaaagacatgaacagacacttctcaaaagaagatattcatgcagccaacatacacgaaaaaaacacaacatcactgatcattggagaaatgcaaatcaaaaccacagtgagataccatcttatgccagtcggaatggcaattattaaaaagtcaagaaacaacagatactggcaaggttacagagaaaaaagaacactttacacttttggtgggaatgtaaattagttcaaccattgtggaagacagcatagtgatttctcaaagatctggaagcagaaatatgttgacccagcaatcccattactgggtatatacccaaaggaatataaattattctattataaagatatattcacatatatgtttactgcagcattatttacaatagcaaagatatggaatcaacccaaatgcccatcaatgatagattggttaaagaaaatgtggtacatatataccatgcaatactatgcagccataaaaaggaaagagatcatgttctttgcagggacatggatggagtgtgaagctgttatcctcagcaaagtaatgcaagaacataaaaccaaacaccgcatgttctcacttagaagtgggagctgaataatgagagcacatagacacatgatggggaacaacacacactgaggcctgttgggggtggagagaacatcaggaagaatagctaatggatgctgaacttgtcacctaggtgttggattcatctgtgcagcaaaccaccacgacatatatttacctatgtaacaaacctgcacatccagcacatgtaccccagaacttaaaataaaggttgaagaaaaaaaatcataaaattcaaataaagaaaagcaaactggaacaaaagtgaagaatgaatccgtaggcacagatggaagctatttgaaacacttctttaacatttcagctcttcaaatagctccaatggaattcttttcagttaggatacagaagtatataaaatagctttgctgacaccaaaacaataagtaatcaatagattagcccaaaactataactaatgaggaactctggctacaaggaaatctaaaactaccaaagtttagtagaagctttagaaagatgggtgaacaaagatcagaggatagctgagtctgaaagcagttagagaagcaagatgatctttgttcaaatgagaaatcaaatcagcatttatgacctatgggctgcatactaaatttaaatctggagaagccccaaatccagaaattactctgccaagtaacaatctctcatatttgcagtcttgcagacctaaagttgcaaagtcttgtgatctggccagctgtagtctcattgtttcacagcccaacaatttcatactctggagactcattgtttcatagtcttgcattcttatgacatgtcatatttaacatccagtcatcttttatctgtctacaggtctaatagtctagcggtcttgcagttttggggtcaagcagactcaaggtcttacagatatgaggtctgacagcatttggtcccagtgcagtcctggagggaaagacatgaaatcacttttaaagtagctaatcctagagaaaaatggagtataaccaaatctccaaccaaaattctatctgattcaatgtctggtaacatcaataacatttcacctagtggtggcaccggaagctagagatagaatgaaaaacagaaagatagcacaatagacttgtggtacttgaattccaaggcctttttggaggagttaaagccaaacaaacttgccccaaaatagcttaatttatgactagataaaactgatcagcctctcaatctatctttctaataaagaataaggcattccttattgagagagtataatatgatgtgttaaaaataacaatatgtgtatatagttgcataatatctttttaaaaatctattattttgaatagatctattgttttaaatagttttataatatctattgtcctttaagacgtaatatacaacgttcaataaagtattacaggacatgcaaaggagtttgaaaatatgacttgtagtcaagagaaaaatgaatcaatagagagatacactaaatattacagtaatgataaaggaatttaagatgacaatgacaaagataataaaagatctacagaaaaagatgcatgtaatgataaaagaatgggtaattaggggatgttagggagcttttagagaaacaaataaccaactggaaaagctagaataagaaatatcatagccaaaatataaaacttactggatggtattaatagcagattgaatacaacaacaaaaaaaggatgactttattgaagtaggtcaatacaaatcatccaagctgaagtaaagagattacaataagaaaaagagcattcaatgacacattagacagtattcaggagaagttcctgaacaagaggaaagagaatgggccagaaaaactgaagaagtattggctaaaaatcctctactttgataaaaaacacaaacagatctaagatgttcaatgaaccagaagcagaataattaccaaagaaagaacatctaagaacaaaattgtcagtttgctgtaaacttgatagaatcccaaaaacagtccgaaagtcgtattacataaaagagaacaatgataagaataacaacagccctttcatcagatacaataggagccagacaatagtgaaacactgtgtttaaagagacaaaaggaaaaaattgttgattatatattcagtgaaaatatttttcagaaatgaaagtaaattaaagcaatttctgaacaataaatgttgacagactttgttgccagcagacctaactataatatatgctagggagagttctcaggtgaaaggaaatgatacagaggaaaataaggatctatgggaagcaataaaacccacttaaaataataatataagagtaaatatgaaattcttattttcttatttttttaaagtcaactaggtatttaagtaaaataataatatattttggagttcataatacgtgtagagataaatatatgataaacatataacaaagggaaggaaagcacatcaacaaagtaataaagtacttacatttaaaaattgatttaattgagaataagctgtgataaagtagaaacacatactgcatgtattagtctgttctcacactgctctaaagaactacttaagactgagtaatttataagaaaagaagttaattgtctcccagttccacatgactggggaggcctctggaaacttacagtcatggtggatggcaaaggcaaagcaagacacatcttacatggtggcagaagtgagagcatgaaggggaagtgccacacttttataccatcagaacttgtgagaacttactcactatcatgaaaacagcatgagggcaaatgcccccatgatccaatcaccttccactaggtcccactctcaacatatgggaattacaatttgagatgagatttgggtaaggacacagagccaaaccatatcatttcacccctggcccctcccaaatctcatttccttttcacatttcaaaacacaattatgccttcccaacggtccctcaaattcttaactcattctagtattaacccaaaagtccaagtccatagtctcatctgagacaatgggagtcccttctgcctatgagcctgtaaaatcaaaagcaagttagttacttccaacatacaatgggggtacaggtgttttgtaaatgaccccatttcaattgggataaattggccaaaacaaatgaccacaggtcccatgaaagcctgacatgcagcagggtactcactaaatcttaaagttccaaaattatttcctttgactccatatctcacattcagggcacgttgattcaataggtgggctcctacagccttgggcacttctgcccctgtggctctgcagggtacatccttctcggttgccttcacaagcttttgttgagtgcctgttccttttccaggtacgtggtgcaagctgtcagtggatctatcattctggggtatggaaaaaggtgaccatcttctcatagctccactaggcagtgccccagtggggactgtgtaggggcttcaaccccacattgtccctctgcatcccagccactcaagcttcagccatgtctaaaaaatatgccacgtagaccattgcttcagagtgtgcaagccctaaacaatggtggtttccacctagtgttgggcctttgggtgtggtgtgcagaagacaagagttgggctttaggagcctccacctagatttcagaggatatatggaaatgcctggatgtacaggcagaagtttgctgcaggggcagagccctcatggagaacctctcctagggcatgcagaggtacattttaagaaaaaaaaaaacaaaaacaaaaaacaaaaacaaaaaaaaacagtcacatcttgaaggtttttctgcttagaaatttattctgccagatatcctagttcaaagttcaaagtttgaagttccacagatctctagggcaggggcaaaatgctgctagtctctttgctaaagcatagcaagagtgacctttactccagttccccataagttcttcatctctgtctgagaccacgtcagcctgaacttcattgtgcatatcactagcagcattttggtcaaaaccattcaacgagtctctaggaagttacaaactttcccacatctgcctgtcttctgtcttcttctgagccttttaaactgttccaacctctgcttgttacccagttccaaaatcacttccacattttcaggctatcttcatagcagtaccccactgtcccggtatcaattttcagtattagtctgtttacactgctagatagaactacctaagactgggtaatttataaagaaaagaagtttagttgactcacagttctgcatggctggcgaggcctcaggaaacttacaatcatggtggaaggcaaaggaaaatcaacacatgtcttacataggggtaggagagagagagagagagctaagggaagtgcacatttttaaaccattagatcttatgagaactcactcactatgagaatggcatgggggaaactgccttagtgatccaatttcctcccaccaggttcctccctcaatacatgtaggtcacaatttgagatgagatttgggcagggacatagagccaaaccataacactataattcctagagcaatcacttgaaaagactaaagaaattgctagagtttgaatatggtttgtttgcctccatcagatttcacgtgtgtttattattttcccaaaccgaaactccatacccacattaaatgataatttaccacccctcctcctttctcctagtcactggcaactaccattctactttctgtttttatgaattgagttgctctgggtatttcatataagataaatcatacagcttttgtcctttcatgactggtttatttcacttcgagtaatattttcaaagtccatctatgttatagcatgtatcagaatttccttcttttttaaggcagaataatattccaatgtatgtatatacatgtgtttaccatttatctgttgataaatatttgggttgcttccaccatttggctattgtgaataatgctgctatgaacatggctgtaccagtatctgttcaagtcactgcattcaaatcttttgggtatatactcagaagggaaattatgggataatatagtaattctatttttaattttttcaggaactccatactgcatgcatcattttacattttcactagcagtacacggtttcgctccaacactttattttttaaatagccatcctaatgagtggtatctcattgttctgatttgcatgttcccctaatagctagtgatattgagcacctttacatatttttataggccatttgcatgtcttctttggtgaaatgtctattcaagtcctttgccaattttttgataaggtcatttgttttcagctattgagttgtaggggttccttattatttttgatattaacactttatcagataagtggtttgcaaatattttctcaaattccataagttgccttttcattctcttattttctttgctgagcatagctttttagttggatgtaattccatttgtctttttttttttttttttttttttgcatttgttccctgtgcgtttggtgtcatatccgggaaatcattgccaaggccaatgtcaagaagttttcttctaggagtttcatgatgtgaagtcttagacttaagtcttcaatccattttttgagtttatttttgtgtatggggtcagataagggtccaattttattcttttccatgtaaatatccagttttcctagcaccaaatgtccatcagcaggtgaataaattaacaaattgtggcacattcacataaggaatactacccaacaatacaaatgaatgaattagtattatgctcaacaacatatatgactttcagaaacattatattaaaaggaaaaagtcacacaaactagtgcataccatatgactacatacaaaggtctagaataggaaagactaagctagactgatggaaatcaaaataacaagtggatgagtatggactaaaaggggtatgaggtagcattctggggtgatagaaaagttcctcatctttaatggggtggtggtcacagaagaatatactttgaactagaccttaaaatctgtgcattttaaaaatataagttatacatcaataaagcagattgtttaaaaaaaagaaagtggttccactctctttccctgaagaaaagcagttagtccactgattggatcagaatgaggattagtatttcttaccattgtcctcccaggaagctacattagaggatacatcagcccatctttgttttatgtgaatttaagtgtgctaatgttcttggcaagatttctgaagccttcctcatgtagaagacactggggtgtcgatgtaaagtgagctctcccggggtaacgtgtgtttaccatgattccttgaggcatgcatgaaaatatactgctgcagtctgttacactgatgttaattaattatatcacttaacatttattttattaaaaagggtactaccacatgagttatctaactatcaatagcccatttattttccctaatatgtttaccaaacttttttatttaccattttttcaatggcaagccattatggtagagattcattattcagcagcacccttgctagatagcacaattttaatttgaaaatagcctcagtccatactttttttttttaggtacaattgccttaagtcgttccagattgattcactctatttcctatttttaagcattcaccgggaacaaaatttccattttcttttttccaaaatttagaattaccatctttgcagctcttatttcaagaaaactcttctttgcactaagtcaaatcctttgtgcagagatgtagtcaagcacgcaaagcaagatatgtactgtgccaaagaacctttaacctggcactagtaattagcaggcagaagaggtaataagtagccacttaacattaagaggtgggggcccaagcacaacaaagtgaggaaagtaattttattcatcaggataggctagttgcactatggtaattgacaatccaaaaatctgggtggattaaaacaataaatgtttatttcttactcatgctgcatttatatcaaaggttggtggaagttagggtatgttgactctattcaagacattctcacttaagaacctcggtggatggagcttccgctatcagacaaccactgccacttccaatcacatttcactgtccttattagaggcaggaaagtccaaacctccctgagtagagaaagaatggatattggtgagtagtaacattgttgaccatattgatattaaaaaaaaatacaggataatcaaaggtcctcaaaggagtgtagatctgcaagtagcaaagcttaaagatttatgaagcaaatgggctggaggacagattcagagctccagttccaagaggtgaaactggcaactgtaagaggaactagaagactggacagaaacttggaaatggacaaaattacacttccagccttgcaaactgtggcaatgaggacaggtgttactagggttcttgccagcaggaattagatcttgaaaatcagagcatcaacaagaaaagtttggatctaggtgcagcttgagagccagaaggccagccttgggtcactacctcttaaagcaaccaacaaagaatatcctagattgtacctggttagttcctctgagcggaaactgaagtctccaaaattctttgtgcttcaagtctgtatttagtaataactgtggggaaactagacaaagaagaggcagagataaggagctgggtttgacgatgtctgatgtccagtgtcttgtagtttgcttgcctgaggagatgtaagaaagtgcatccatgaaaaaattaaaaattgactgctagcctgtctataaatattctagagtagattcaaggaaggacaacttccagagaaaacttaatggaggaagttggcctggtagtattttctcagcccaggaaaacttcctatggctgtgtgtctaacccagtccactacaaagatattttctagcttcctgagcgcatgcatgattttataggagtctacctccagaaacaagaggtcctctcgatggtaccttctatatcatactgaagaaatgatccttaagacatttggtttggttcaacccaaacccagagaaccctttctttggtagatcacaatttatacctgcgatatccgaagaaagtgtttttaactcattcagggaaatgtgttttctgtcttgctttagcttatagtaagtagataagaaattctggacaatgtaatatacttctatggcttcaaattttatcccttctggaaactttcaaatacaaattttgtcctagactcctctttctgagcctcagctacataccaagctgcatgaaaatgtcccaaaataattttgcatatttcccccaaactggatcctcctcttgattaaatgcataaagagagtaagccaattacccaattcagaaatctctgattcctccttgcctcctgcttcttctaaacactcaaatccagtcaattgccaagtcctaataattctaacaacttaatagctgtcaaatctgctcctattatccagtcccactgcttcaggtcctcaacatttcttatcaagactacattttcgcccgtgttctcccaccttcattctctgctcagccccttcccctgttcttgatactgcaataagaggcttcttcctagaatataactgtcatgttaattctctttttaaaagctgttgccctaaagagaaactccaaattgctcagctggaccttcctgactgcacactgctaatctgtctaacctttagttctcccagactcttccagagtcccagcgctctgctttccaaagacattgaacagctttcatgctcacaaaagaactctgctcttttttttggctctggactctagattcctctttttcctccagcaaagcccttaagtagtgccgtggctcaggaaagcaggctgatgtgtcctccgtgccatggtgaaaccaactaaccacatttatggtaatggaaaagcatgttcatgtatagctttggtctacatatatctgaatactgcaattattcagtgttagacccaaaaggcaataggtcagtttttcacaacctttcaggttttctccagtctccaaactagagatgaaagagtacatgcaaaacaatttttaagtttattgctagtgctttacttctaaattcttttcaacacagtgataaataatcttaaaatatagtctaaggcaaatttcatttttattaaaaatacagtgatctaattatacccaaaccccattgactagaatatgctaatttaaaaaaatctatttcaggctgataattttgtttcttaactatgatctgaaaaagaaaaaaaaaataaccccagccacctgttctacaaatgctaatgataagaggaattaggtgaaacactgttgatagattcatgtaggcccatcaccttttcagaaattcaaaccaaacctctttcttaattggggctggaggaagcaaaatgaagaaaaatagattcttttcattaaattaaaacaaaaatctcaaagcctcgtaatattcatggacaaaaataaagagatacatgtatgctgggcttcatactttaacacagaaaacaagatatttagctttaaaaaaagtgcatctaattttttcttattaaatgtgttatttattgaaacaaccatgacttagaagatatcaattcttgatttttcatattatatgcaaattgacaaatgttctctaattgcaaaaggaaactctgagagagaaaatattttacatggctaaatattttatttttttgtgtagaggattatgttcaaccttataatcaacatttagtagtagaactaagcttaattctattaattccagaattaattatagactaccaggactaaaattcaattaatactagaataaattgaagaagtaactataattctaccagtagaaagttgtggtttgagaagtcaggaatacagaaataaagcataataagctgagtttaaatttaaaatattaggcacagtaaggtttggcattcatttcactgagtgcctcctctactcacatacctttaactcagggttagattggtggttgggaggggtggcaagttgagggtgggatgtggggcaaatgattgtagccagcaaatcaactctgaacaaacccgcaaaactaagcaataaattccagagtgcagtctggttcacacaagcttcaggctcaaaagcctccagttgtaaatagaacctccaattgtaaggcagctttctgtactccaaactgttcatgggagtcctgagggttttaagtggccagacatgtaaaattcaaatgtcattcaaattccattacaatatttaagaagctaacatacaggaaaacagctggcacgaaatcagtgccgagagcaggtataattcccagtgcagagtgaaccaacccttaggtcactgtgaattggagcagtgacttaaattcaaaaccaggctgaggattcatgggctaatactgtcagtaacttaaaactggatcccaagggaaaggacttttttccattgataaagaggatggttcactgccaggcagctggagactatcttgcaggggctttttgaacagccagcatgagtatctaaatgactactacaaagaaaaaaaaaaacacctaacaatcctcaaattttagatgtcctggaaagcttttaattcattttggtgtttggtcttcatttgttcctgttaaaaataggacaacatacacatattataattaattaacagttgttgaatgtagtctctagcgaatggaatagtaaaagttaccaccctttgtagaaaagaaatatactacccatgacagcttatatcataaaataggactcactggttgcattgtgcttacaaatattttcattgcagttattgaattcagtaaaatgtcataaggtactcttagcctctggccaaaactgacacagaatttaatttgcgctagtcagctaaagacacaaaatgttcctggggaaaattctgccgtgttatacaaacacgcaacacttactgacaggtccatggaaatcctgtgcttatgcaagtagcgggggtgatgctaataataccactggaatgaagtaaagtgttcactatttgacataataatctaaattgtttctagaccttagtttcctccctaaaggtcaacattttcatttttgcaaattctagctaagagcattggcaaataaaagaaaacccaggggaacgggttctttttaaataaatttggtagaaaacagaccatttgaaattgattctaaattactttttggtggttagtacatgacctcccacagccatttgaactagaggtgaaggtgactttctctcagtaaataggataggggattttttttcttcctgaagagtcaggattatgtgaccttataaattggtctcattacagagttactgacagacagacatattggttgctgccagtgggcatatgggctgaaatttggagaaggaggggagaacagatggaagagggaaaaagagtgatggacgggtccctcacacagagaccagctggtagggagcaggtcatgtctattactgctaagctgagaaagataagagtgtctgcagtgggaaaggcgacatccatcaatcagcttcttcattatggcaagaatgaggcttgtggtctgagggtggaagaagggggccggtcatcccacaccccacaggtggcaactctgaagaaggcttatctttcacattgcccggaaaaggaagaatgtgcccttcatgaatttgggttgttgtgggttcagagaaaactcagtgtgatggtttaatattattttcaagtgcttttatgttgagtcaaatattgcatgaatgtcacacttcataatgtaagagagcaacagtacaaaggttttccaggtgaaccccaagttctcttctgtctgtatgacaacgtccaaggcaaatggagtggaggcaggaaggctctctaagggtttctagaatgtaagctccttcagagtagtgacttgttggtcttgctcattttaatacccaggaggctaaaacagagatttggagtaaatatttactgaataaattaagttgaaattatagaaaatgtctcaaaatgattttaactcccaaacaaatacatttcctggctctttccctgacatctattatcaccttaccaactcctcttttccacggctgatattctggagatataaaggcaactttggtgaggaacagcagcaaatggaacatttgacactagaggtagttaatagctacactcaagtggtaaagagttgcactgaagctttacacttcagtgaggacatgatgaaatttggggaagggaatgcttttattctgaggagaatatctttctgccatacatgatactttgagactggttggctctgtgtcaggttcctggaaggcagaatagaagctcatttattttaattctcagtatccccaaaatagtgatgcttaattaatgttgaaccactagcttaaatgattattttctattcacaaagttttctagtgtagggtccataaactaatttggctttcttatatatttagggaagaaaaaaaaatgatcagaaagaattagaaatgtgatccagacaaagatcattttatttgaaaatactttgctctacagtacttattttaagagaaacatatattatctcaaataataataattttagtgaaaatacagtcacatagaaattagaacagttttggaagttagactagcaaatagttgaatcaaaaatttgaccttaataattaattattaatataaaccaatctaactatgaagaaggtaggtgttactgatttgtagatacatttgaagcttattgacctgatcaaattagttaaataaaattatatttatatttcctgttatcttctgattgggggttaataacatatatcaccctttagtataagaaaataataaacttttttgaggtttctaagcaaattgattttttaaatgtacctggctttaaaaatataagctctctgttaagagattctgttacatgctaacataatataagactacatatttaattagtttgcatatcctaaaagacagctgcccgtttatgaaattagaacatatcttgaataatttaaaaagagtttgacaaatttgaaagtgtgcccctatttaaattgtgagagagagttgacctgtgtgtgtaagattcacttcagggatcctactggactcacaggaaggacacattgctgacctcactaagtggtttagataggggtttcctaattgataatgatgggtttgaatgaacaaattagtcttggattgaaggggactcactgctgaacatgttaggggaggaggcaaagtgatgaaatgcttcggctctggaatgagaaggactgaactccaaatttggtcacaaggccttaggtgagttaattaattctctttttcctgtgagtccatgtggacattaaaacagataatgcatatgaagcacttaccatagtgtctggaacagagttagcactcagagagagtaatggttttatttttgccgtactgtgagtttgctaatattatagtttggttcctaaataccccaaagatatttcatactttttttgttcctactctctaaaaactacttttgaagaaaatctaagaattgcctttctttcttctttcttttcttcacttcttctctctccctccctcccttcccttcgtctcgcctttcctttgctccttccttcctccctccctccctcccttccttccttcctccttcccttcctcccctccttccttctgcatatctatatagtcaacagatttttgaatatttattctatgaaaatccaaaaacttctgcaagtaggacatgtaaaaatataatattgcaatttaactgtctgtaaacagaacattttatatggtctgaattatagcatgatgggaaaaatactccacaatgatagagataaatgcccaatattagtatcatttttcttctgtaaatatagaggagaatttgaatccctaagggtatttttttcattgagtaaaattgatcatagtataaaaatatatgatagattgaaattacatcttcttccaggttttctagtgacctataggaccgttactttcttgactatcctaaaatatatagcagcatctttcctgaatgcatttgcttctcctgatgtataacatattcatatgctggtatttattaaaataagcttgctgtcatttatggagggaatgtatgccagttccctaccaaggagtccttctccactctcctgattcaatttgtacacaattgttttcatttccattgattcaaaaaggatgtggaagtgaaaatagtaaaaatagatgtgttcaagtatttataacctatacattgaattagtgacttgaaacttcaaatatcaatgtacagaaattgagaattgactacggaggagacagcccaaccacaatctggattattttccaaatgctttaggtctggcaaaaactaaagtgtttattgccaagcccttttcctcttaattttaaaaagtcatgtgtgtttcaagggaaatttaatccacatgtttctgattcatttgcactcaagttgtcaaactgttttgtaatcacaagtctttatctttttctctccacagaaagttgagttttccaagtgtgcataaacaataacctctcagaagaataaattgaatttcaaattcagaaatcagggatgggcaaaaatgtgtatatttcacctgttctttgaaaagaaaaatattttggggcttttgcccctgacttaaaccttttggtgtagacatcacttgcccttggcaatatgcaattcttctctccaaggaacagtatatttagagttcaaaatatacagcagaaggtgctaaatgacccatgaagcaggaggattctgtctttaaaattacaagcaaatatgaccacagataatattagagttttatagcaaaaacttattttaaatattataatcgtcaaaattgggtttacttacaactcctcatcccttagatatgagcttaacaaagcaaaagtgctaggttttttggccccgaatattttatctaaaatgagtttaaattacaaatagaagaatttacaggggggaaaaacacatttttttaaagcttttgtcatctctgaaaataactcagaatttaccacatttacatatttttcttataaaacattctgtagtgagagttcaaatactaaagcttactataatagaatgccccatttgggaacattaagaacttttgttttatgataactctacaatagttactcccatttggatctcttagaaagtgctaattccaaacacttccttctttatcatgagatcaaaccatttggaccgcttattatcatgtaccccgtaaaactcaatctgttgtgttaattagttatgtaaacacattttataattgtggagacaaagcagaactagacaactgggtaggtgagaaaagatcaaagatctttcttaataaattgttacggtaattagtgtttgtcttgtacttcttttccagggggtcttttatacccaagcttgggaaacctgcttagcgaacaaggaagcttttggaaagacaaatcttgctaagctcccaaaactgacttaaaatcagtggagtgaggaaaaaaaggaatacaagaaagggaagataaaaaagaccatgaattcctctgggggagtccctactctgtttaatagcttaagaataaaatatggaaaagaactatcacatcacatgtagcctatttatatactagacaacagctttccctacccaccacccgcaccaagacatactgtgtatagctttctctgaaaataatgagagtactgtagtgtctatacttctcaaaaaatgttactaaaaagtacctaaattttaggaagataaagtcctccagaaaatgccccaccctccctcagcattacctgggcttcctcctgctccattctatctaacacatcacctactttacctagattctttggctgtctcttccaattagaaagcccatgcatgatggcagggagttttgtctagttttccactggtttgttcaatgactggctgaataaaagaatgaatacagagcagttttctaaacattttagaagcactttggggtaatatggagtgggtctaccacttacatgctgtggaatggctttgagcaatttacttgatcttcctgaactctgtttccttatacatatacctagattgttatctacttttcagggttatgtcaagattggagatgatttatgtaaactgcccagcagagtgtccagcacttagtagatgctcagttaacggtagttgttttgttgttattactttcccccacttttcctttatacaagccaaataatattaagactcttggatttagcattacttctttctgtttttaccatactcctctctttttcaagttgtattcatattttcttaattgaatagtatgctctttgttgttagtcatcccaaatataaatcaaactaatataataaaaattataacaaaaatataataatttaaacaaatatagtaacaatttcctagaactattctttaactttctcttaaaattcccacacatttgtaaattactaatttttccaattcctacctataatataggtaggggtgtgtattttcatttccagatattcatgttcaaaccccacgacaaaaattatccactttgccccaggttttcaataagattttgcatgcttctttatagccttggtggagaggaacttgtttcagaactgtacctaggatttccctcaatttatatcttttatcttttaacttcaggtcttgtctctaaaagacagtcctctcctgaaatctcctccatgaaacctggaagtatagaagaaaagagcactaaaaagaccaagaagttaaatttctaacatatccttcatctggccagattttctggcaccgtgcctgtttcacaagtttcccagtttttatgagatagtaaacctaaagctgcttttttaaaatgtattttaaaagtaatacattaaaaatggtaatatctcattgtttagcaaatctattattataaattatgaacaagtgaaatgaaaatgagtaaaaataatctttaatttttaatctcactagctataatctttgttctagcataaattatatgtttattgtcacaaaaatgtagtacagtatatagagatagtattttgaaatctgtttttctctttatagtttaacatatatttttcaatcgttaagcacacaagcatcattttaataatatcattgtatagacatatcactgtctattaaaacaatcctctgtatatgtgataaaaaaatctatatatttgagcaaaaactcaaaaaacttgaaatttttatggtagaaaactggaaaatatttggtagttttattttgttcttgccaagtaactcacattaaatttttactttcttttcctcttttctctcagataaaaacctcataaataaaaacacacctaacaaactaaaggcccatattcataacctggaattctaataacaatcttatttgtctttttcacattttctcctccctcaatgtccagcatgttgctactcaaaaagttcttaataaatattagatgaataattgaacaagtgaacttaaatcacatgcaaataccatctcatgaaatctgtgattgcagttttacaagcttgtttgtttttccactattggaaaaaatgaactgactaaaaaggtcccttttagtctccatctccttaagtgtcattattacctatgaccaggtcagagttctccaaaaagtgggtcacttggatcagaatttcctggagtactgggaataaacacagactcctgggccccattctagaccagctaaggcagaataattaaatttaaagcccaggaaagtctgagaactacttgtaggtggggtcagcaaccaactaaattttgtataacagtcagttgaagaagtatagaatgcaatgcacttcccagcatgtgtggaactaatgtagcatggggagcagaaatgggggtaaaaaatctcatttctgttttcatgaagacaatggcattccctttatgatggtaaagatctagtgaaggtaaagaagtcaagtttaaaggtcagttttgctttgtgtggaaataatttcattgggcaattctaatcaagagaagaaaaatacaacaatctaggtttctgagtttgttttcactcctagctctctttctatctgtggtatcttacaagattccagtgaaaattattaagaaaaatgcctatccactggttataagctggaatttaatgtattaaggctgttttctacacttttggtatacaataagacttttagagatacctaagttttttaaggtactgttcaatctacgaatacaataattacatcactctgtctaatcaactgaacagaaccaaaaaccaatcttcattttttttttgcaggaagatgtgaaaattaatatggcatgtaggtgctgttggttccaattaaaatcaatatctgtcctgatttgtgtctcttgtctctatgacagcgagggggctggctaaggggatacatctgctcctctctcccaaaggggctcaaaacaagtgaatgacctgcagtgtttattattaagttttcaaagggaaagttgttttggtctaattgaagcaataatacgagagaggttatttctggtcagttccctgctgttttcactctggagaatatattccaggtgttcatgtgccccactgtagtgcagtgctgccgtctcttgagtgtaggcatgctagtgccagtggagcaataaactagccttagcagtttaagccagtcttggcctttgagagacacttttttagttaacttcatagtaaatcagatggttaatgatcacattcattttcaaaagaccctgttcccatggaataaagcaatgagattttataaatctcaaatacattaaacaaaattattttatttccctttactccaagtctttgccacactatacagcgtagctatgtcatgtcaatgttttccttgtaagtcatttttctttctagattaattaatggctcatctaaagtaaatgaggagaaaaaaattaaagtattagccatcattgattcataactgcctgttgtatttctgtgtttgaaatatatattctagctctatgattttcaaatattcctgagatgtcataaacaatatcaaggatgattggtgaaggatatagacactgaaattgaattttgaatgtaaatggaaatacccagtacataatgttcggttataatttgcctgaggtatatgtgactgatcatttctaataaacgataaaagttgtcacgaacaacagtttgggaatttcagaggtaacattctatttattagccaactcatatatgtcataactttttatattactttgagatttttttcctcaaaattacaaaactgaaaacaacttattactaagtggaagttaatctaaattctgtgaactgtatgcagtatttacccaaaatagcttaatttcagttaaatttccaggtaattcttattggtaattataagaacaaagactattctaaagttaaaattcatcttctttctagttccaaaaggaatttttgatcttgattttgcttattttcatctctgaacccaacatgaacccacagaccaaaacagtcacattaagaatatgggctggatttcaggctaatcaggggaaatgcctggggagggtggtggtggtgatgtctgctgctcactcgcttaatcactcagactttttgagtccaggatacttccagagtctgagtggtagcgatttctcagttcacattcccagatgtacgaatcaaagggtctagcactgaatgtcctcagaggaggggcggccctgggatgaaaatagctctgcctctccagaaagggaataatgagtggcacacagtgtcaagggcatcatatttataaagcactttggcttctttggataatattcaaaatgttttgcagaatgattagttaagtattttcacaaactccaaggagagggcagaaacccagctccggtggctgtgtatcaggcaaaggaagctgacacgtgcattcctctcattattctttccctgccctccaaataccacacacatagcaacggtcaattacaggggagcaggtgaggtgtgcaaattaacacaggagaaaagtggtgaaagtcgtgggggtgggttgggaatgaagaagaagagggaaggtaggggctgcctggtcgggaaggcaagccacacaatgccacttaataaacatgacagttaataaaagaagatttaaattcttgaacagaaacaagcaaaaaaaaagaaaccctgcatgcttccattctgagtacttccaaaagggttatgatgttatggtctcatttgatgtgatttgtcccaaaccaaaaaggaggttccattttaatctgtaactacaaaagaaataaataacctttgtaactgaaatgatttaagacaacaaaaaatagaataatgttattgtatttcagaggccattgttgttagagtgtgcttagattattttgcttattgaaggctgtagtcgcagtgcagaacttaacatttagtagtcatagaactctcagagatgatggtgagataagaaggcaagtgtctgttactccccctgtcctttgtaaaatctcaaagcagatgatgccagaaaccatagcaatcactgccaatcttaatagccactaatgtctaaggctttactatataatgtagaattcgttgtactttcaaagttagcatcttcactgatcgttttaacaagttaaatagtcaaatcctaaaattagctcctgagttcatattgttctggggtgcaagatggacttaaatcaataaagttgtttctaagatgaaaacttggaggtgcatttgaaaggtcctttgttttgcttaagaaccacatttccaacaattggagaaggataaatcctgtagtgccagctgtgctgaatataaattaatttcttttatttttaaagtgttcttcaggatcatacaataattccgagtagtaatgagcttcaattatcactttgttggagacatatcaaagagatttatagttgacagaatgtgagataaaagatcatttacactattgttcttcaaaacacaaaggtgactttgaagtatttgttttcttacaaatctgctgtaagacatggcaaattacctcatatttttgttttgctcaaataaggaaactgagtcataaatggattaattcactgttaaacaaaatgctttgatctcttatgtttaaaacagccttttaattataaagttttaaaaaagctgctatcactgacaaagtaatttgttgagtaaaaacaagtggcctgaaaaaaaaaagtgatagagcttaacagggctttgctgtacacaaatggactagcttaggaattatgataagctgggtttatgactttaccatcttactcttcacagtaactactgttcttaggttggtaggggatgagtgactggcatagccttgattgtggtagataatctccaggttgttgtagatcatctgaagcagagtttgcggggatcagttcagtttaccatcgcagaaactgtcctggagtacatatagatgacatcaatatcatttttgtggcaggtgttacagatactagtacctcatgtttgcatgtttacttcattgtttttgaggttttgtagcatatcctcttagaatttgaagactctgaagatcaagttgccagacaccttgattttacaaataagagctgaaacccataaggtcaattgttttctctaaggtcacatgtaagtacatggagaccaaaggctaaagtccagggatactgattatattattccatgaccccaggctgtcttaatagatgtattttatttaatctttatgatatccatgtgatataggaattgctagctacacttgttttataaacaggagacatggatccaaggagttgcatgacattctaactaaagtcttaaaacttattaaggacaaaatgtggtttggtacccaggccttgttcaaaattttaaaagtcatgcaaaagggatttctactgagaactctcttacactatttcaatttatctgtgtattatctattaaggtcagttggaacgagcactatttcattctcttgaagacctgttaaaaaactaatgtggtttgttttaaattataatttccagtggactgaaagatttcattgttgctaattttgcacaacagttattaatggatgaactaagttgttttgcttatgacttatgttgagatcctagacctgaagctatcattctaaaatgaaaccattaagaaaagttccgcttttgtttttaaactgttcttttgccacattattccttttgtttcccaaatattctaaaatgtttacatttcctggccatgtgagcatccttgccactctcaataaagactttgagacaatctgacagtctgtttatctcactggttgtccttcatttattcatcccatgatagttactgagcaccttgtttatggcaggccctgttccaagagctgggtaaagagtactgaaaaaaatagaaaaagtgtctgtcctccagttggcttatggttgggagagacactgaacaagtaaatttataatgtatttgttaaattattttttttaaaataatatgtgtttgttcattgaagaaatcaatttataacttgtcaggtgtgtcaactgtaaagggtgaaaatgaagctgaggagggggatgggggtgctgaagagggagattgctattgtacacacagtgttcagggtaggcttctactgagaacctgaaggagacatctgagggaacagcaccttgaagaaaacgaggtaggattatgtttagcatgttcaaggtagagcaaaacatgggggaagtggagtttgaggtcacagggagccagaacatacagggagggcggcataagccattttaaggacattgggtgagtgacaggaggagtcattgaaggtgttagtacagaggagtacatttataagcttatatttcaaaacgtctgtgttgacttctttatgaaaataaagaagtgggtacaaggatagaggaaacaaggagaccagctaggaggtgactgagaaaaaaaatcatgccataaatgatgacggcttagggcaggagaggtcataaaactgctcatattttgacaataatgatgagaggatctataccaagatttgatgtggattgtcagagaaaaaaaaaaaagcaatgaaaggtacttacaagatatgtggcctgaaaagctagaacagcattgtccttttctagaaaaaaataaacctgatagagggactttggcggggggcatattaagaaatttgttttctgacatcttatgtttgagacgcctacacataactggagatcttgagagctggattatagaattaagattggggaattggtgtttcatgaatggaaataattatttggaacccttctagctcaggagagtggtaagggtgagtataaacatagaaattagaggaataagcttgtgttaaagtagggagatgaggaaaagttacctagagcactgagaaggaatagcaatgagagaaaggtgtgctctcttggaagccagatgaggcaagaattttagaaaacaaataattatttggatttgccttctcatttgctttttaattaaatgtgatgttaaggaattggctcaaagcaaacatcaagattatgcattttaactatttaagtattgcacacttgtaaaaatcgcttgttagaaaagattaacaggaaatttataattctctgttcacggaattaccatttgtatttattctttttcaaataatgattgagtgtgagaagatttggtctaatgcaattttgcattctcattaaaaaagcaatatggactaactcaatatttctgaagactgactttcctagaaacacagtgtggtgtagtataaagaatacaggctttggagaaagaccttgttcacagctttgtgtgtgaacccaggttccacagatgtatgaagtggtgagaacttggtcaagtgcttcacttgctttctcctgcagggctcactcccttcctccttaaaatggagatgttaacacctatctcccaggattactatgaaaattaaatgaaaaaaattaggcaaagtgcctaacacattgtaaatatttcataatgacccctaagtcattaaaaataatgacttgttttgaaagaattgcacggtataggagcatcttcctgatagaaattcagattatcttgattgcgaactgtttagtgatatatatagctgcttctagctgatggatttactaaaaattttaaagcaattgtttactctttctaccagtttcaactctggggtaaataaatgagcagaatacctctttttaccctcctttcacttagttattcaggcaaagtctaccaacacgagaaaagtattttttttctttccgagactttgttcaacccaggtggaaaatatgattaagtaagacctccctgaaacagctgttgcctttaagttgagagaagttctctggaaaaaatatatttttaaaacataaatacaataattttgtgaccattttaagcactctgtgtgtactttctctaaatcactcttctgtgcagccccctgtggctaagaaacctgagtggatgcttatctatctcatctcaatctctcaaagcaattgcaaaataaattcagatgatggatctataatctattatgaaatgaaagaaaattcatcttcagaagaaacccaaatgaagagatgattctaattagatgctatttgcttttaattgtgctttttaaaaaaaaatccctgtggtatataacttccattgtcaccaagacactctatcaattgatgttgctgccctctccaggccccgctgcacagtccactggggaccagacctggatcccctcagagcttaataatgtggaacctctgttgcctagagacatagctttggttaaatttaaaattctcttttctatatcctaagaccttggtcttactgcttccagtgtgcttttaaccaaaaaggtcaaagataatgaagcctaaaaaatctaaagtagacttcaagcatggaagggaagaatgttctccttctactctaggttagactataaataaatgagaaaaaaatgaaactttcatgaaaaaagaggcaaagaattgcttcaattgtcaatcttcgacagcttaatttgaagtctacacaatttacttgctatgtgttaaaaaattagaatggattgctacatttggagtgggggactttttatttgactaaatgcaacattattttaaaatgttttaaaagttataatcagcgtgtaataattaaaatatgtattgagcattaattcataagaaatatttcattagggaacaaggaggtaattaattggagaagaaattctttctcctgttttacaatcaacaagtctgtgcctttccttaaccatgaaataaaattagaaatacattttgcattcgtgctaaacagataactttttaattcaaaaatgtccactgagtccctgccatgtacaaaactctgtactaagcacagggatcataacaaagaataaaacataatcttctcatcaaaggagcccagtttctagttggcttggacaaagtctcaaatgaactatgaaaagaataatcacaaattaactgcaagactaaattaggtgaacaaatcaaggtgcacagaagaaaaagcaggaattattgatgggtgatcatagacggctgttgctgagttgcataaaatacccttaaacagccagaaaatgaattacttctggttaacggaacagctgaagcaaagctgtagagttgtgaaatttcttaatctgttcgcagaacaaagactacacttgggtggccagagcagagggtcattggaaggataaaataaggttggaatagcaatctagagatatctgaatgccatctgaaaagtctgaacttaattctataagaacatgggaaattattttgggtaggagtgtgtctagttatcattaagaagagattgttaggactatatataaactcatcatcagaaaaaaaaaactgtaatttgccatgttagctctaaatgatgaagtgtagataatttttttagatatggattccgtctgccctgaattcttccttcctcttaagatttcaaactgaattaaatattctttcctgacatttaaagttacttctgttcccaacagggataggaataccattggcataatgttctgtaaaatgtttagatacacttggcatcttgtcttgtctgcaatacatttattctacagcctctgtctttcccagtttggctcactgatctattttacctatagtatatcctatccttcattcttggtacattctgcaataaaacaagtctcccaactcaggtttcttttattctgctaaagtttggtattcagagatcttggtgttgatcttggctctttgtctgccaaccataccctggatccagtgccccctaatggcaccaacccaacatgtattttgccaactcttcttcctgtcactcctcactgccagccttgaaattagagttctattcctgaacccataccagtgaccaaggccttgcttcctatgaactaagggatcttggcggcttgtcattttacctcatttgtaattcctgcccaagtcctattgctaattcttatctgactacattcctagctaatctatggattagctaggagagttctctggccctgtctacttattggataacatcttttgtcaaatcttaggattttattccttctcgcattttcctattgttgttaggaaccattgtatctcaaatatgagttccctatgtaacagtcagtacaattgtagagtctgctaaaatatagaaaactggaaactcacagaagatcgacagaatatgaacttttgccccacatgaattaacatgatgatcaaaggctgtttagtctgcatgaaggcttgaaggaatcaaaagtttagtgctttcccttaacttaagcaagtaaacgtctgtactgctatgttctatgacaggctctagatggaggtgactgatttctcctcatgtcctgtcatcaccttgcttcccagctagagttaaaattgtatttaatcacaggaatatgtcaggaatgcaaacaggaaggaaaggaaacaggtcaattgattgtttattggtccgctggctaatcccatagcaaaaagaaagtctcacttactttttagagatctaaattgttcagccaaaaataggacagtcaagagacagtatactcaagaaaaaaaaaattgaagaaaattttttaaagaaactttgtatcttaattgtattttctctatgttattactagttactgattttagaatcttacatttcacagcatgtgctggactaatcaagtcttgtggttcccaaacctggaggattatgggttccctcctagacctctggaatgaagatctcccagtggtggtgccctggaatctgtgattttaataagttcctcaggtgatatgaatgatatactaggaagcactgatgcacagttcagaaatattaaaatgatgttaatttaaattatacacacacacacacacacacatatatatatatgaactgtgtcttgctctgttgcccaggcttgagtgcagttgtgcaatttcagctcaccgcaaccttcgcttcccacgttcaagcaattctcctgcctcagcctcctgagtagcttggattacaggcacctgccaccattcccagctaatttttatattcttagtagagacagggtttcaccctgctgcccaggatggttttgaactcctgaccctgacctcaagtgattctcccactttggcattccaaagtgctgggattacaggcgtgagccacagcgcccagtccttagtttaattggtagctgtctatcttagtgtgtttgggctgctgtaataaaatactctagattggatggcttataaacaacagaaatttatttctaacagttttggaaagtgagaagtcaaaaatcaaggcatcagcaggtttagtgcctggtgagggctacttcctggttcataaacagtcttgtctcgctgtgtcctctcatggtagagagaggaagcactccaaagtctcttttataagggtactaatcccattcactagggctgaaccaaatcactcacttaccaaaggccctacctcctaataccatcactttggggattcagatttcaaaataggaattttggggcagcacaaatattagtttatagcacttcctttttaggtttttcttttagaactagaatatgctttacagatgagttaattgtgttctcgatatgtttttaagtcataattaccacttctcagggtaaaaatgaaacaattagataatctgagtgagtttagttcagtgagagaagttagtgagaaacatgagaaaatttgatggggtagtggtaaatgaggtttgcaagcatttgcagaaaccagaaggatggttttattcttttgtaaaaggatgggttttgcctaggggagttagttaactaggggcttgacatttttcagttattacaacagctgttatagtttgtgcatactgtagacagaaaattcaggctatgtctcagtaaaaatatcaatatcattattgagatggcagtcgttttcatagtttttaaaatttgattctaaaaatataaaactggaaagtcttgataaaagtttaaaaggatcctatttgtttactaatctcaccagacacagacatcaggagatatgaggataggcaggtagcagttagggtaaaatgaagagaggttctgtaaaatttactcctgggcttccaatattgccttgaatatcagttgaaaaatcctacttaagaatctgtccaggtgagtcacttaaggccaatgacagactgaaataatgacgagactcagtcgtctagagtaggacatatgacaggtaatatgaaagaggaagaaacaattttcccatgacggcaaacagaatttgaaatcctctcactgaaggagcccaagaagttacagagatcatctcccatcatagtttaacactgccaggcaaatcagtgcaagccaagcaagattaatgtcaattttagagagcaccagaggggcattgaacacttgactaattatattattctagtttttcacagagcttgctgcaagataaagctctcatctacttcatttaaatcatctccttggagcattatcttattttttttcttatacttccttagtggagttggggaacagctggtaaactcacctctcaatggtatttatgactatgatattttctttaaaaattcaaaagctctaaagaagactttttagagacttccacctcaattaaggttattttctttcttttttttttaaataaatatttgtcaacagagctgaatggatagattacacaagacaatttttcatctggatttcagctctatctgaactttagtatatttggaaaatgattacaaatatgtgcagtccttttgaattgacatttaattaataatattaataattaaaaagttctgtgcagtccaaactttagacagcccatctgttacacacttggatttcttcttgggtacacagaggttctaggcaaattatttttgtcgtttcgaaatgcaattaacagatcatcagccattagctttgttcccttctccttctctttctctcactgttttctgtcagttctggggattttccttctttcattttctctggtgatcttgctattttattcacctctttattacttaaaaacccattagttctttcactcctactctatgattttaggtgaggcatatttaccatatccttttactcctgtaaaaatactgccaaacataacatattgataatcattgaaaataaaatgatgttgtcctctctagtgatccaagaaaatgaggaaaggctgaagcagaatttatttattattcattcatttagtgtcagagtacaagccctgacgttatccttagctcccctgtttaggaagcatacacagctgtttctgatctttttcacaaagtgtatgtggaggcttcacccttttcctttatcttcccctatgccattaataaaatatttttctgggggaatgaggagacagtgacatagaggaatccctatttccttgagtaataggatcacacgagcagaaagaactatgatttgatctggtacttatagtccattgaatctcgtttgcgcaagaaaggcaaatgaagccacaattagctattgggggtcattagagaggctactgtggtagtgtaaagtctggttctaaggtctccagtgtgtcttagtgggtgacagcaattgctgtaggtgacaaacaaccacctgagagggcagcctgttatgcgaatgctcccttaaagaatttttacttagtgtaaaattgtaaattaatgtatagtgattcaattttgctatcttagtgaatggtatcaaatgaatgctgtgctaaatttcctaaataatattcctgcttaaacacaataggacatcagggaggtttttccctcctgcaaatggtaatttaggaaatgagccataagctcattctgtgcactacgtgcacaagtgtaccataaaaagcccattaaccaaggtgcaagtgaaatggatctgactaccatgtgtctagcatgccacctcaaaaggtgccacttaatagcattcctgacatcaccttgagcccccaatgagaagggaaaatgagaacaagggagagatttttttccccacagttagcaaatcaagaggcattttgtctaaagcaaagcaaagtcaggattgaaaaagcaacaacatgatatatcttggtcttcttccagaatcagtgagagtctccgccaaaaagcaagaaacagtatttgaaatgtttgaaaggcagaggccctgccagccctcatccacaaggttacttgagatgaggatgaggagttcctgaatgattggggcaacttgttgccattatcagttaagggttagagagctcacttgatatgtctggccattttatccagtgggaaaaaggcagcgtttctccatggctgagggtgcataaggtctgtgtaacatacctaactaaaggatgactctaaacacaataataggtttggtcaaatttgcttgacaacagccattagccctaagcccaggccatggatgatgtgccagttatcacacaatttgatcatttatcaatgattacctctccctcaggtcaaatgacacctataaggaatgataccaggtttgtctcatccccggaaagtccacacaaaatgcaacattttgacaaagactcctgctcaaagtagcatatgctgagttgtggagtggggtgcaaacagtgtcccatctgatagcaaaactggtgcatttttcctctataccctgagtcttttcaggacccaaaggaatacggagggagagcaatgtggggcctgtctagagagtaatgtacaatctgtatcctggctcacatctcctgccttctatgtgaatacaaaacagagtggggcactagaaatgtaggcaattatagataagcttatgaaaaaatcaaatgtcttttgtcccttcttcttatagataagcttacacatttaaaaaatgtattttgccccttcttccttcctactcttcatatgaagaaacagaaactggaaatatagagttttatcaaaaaagtaatttccaggtccttctggtaaatagataacttattttgtgggtacaggaatttcttcagataactgaatcattcattttaggaccaaatcctctatatcaggtgagacccatgaccctaaacagtggcctatctcactcattattgtatattgcattcaacacatatttaaagaccaataactaagctaggctttcaggatatagcagtttacaatattataaaagtgattaagataactacattgtcttagaaagattggcattgaagtaaattaaaaataaagattggttttcttcttgctgttgtttctgctgtttttaaagggagattgactccaattacacaaggctttaaatgttagactgaagcttcattgcatgggcagtgtgatgtagggtccaatgaatgcaatgttaattttgaggttaatttagttgctttaaaatattttgtgcaacatgttagagtttatagcattaggatattttgaagttaccttagagaaagtctacctttcccaatttagagatgaaaaaacccaaatccacaaagattaagatgaaacttcattaaaatggtggattgaatgcaaatatttagttatcctaacaatagaaaacccactcaaaagactatgaaaagatacacaaagatgaagaatagaaaaaacaagggcaacaatatttaggaagctagaaagcagatggctgagtgtaacagacctggcagattgtagaaaaccatatcgtaagttagcagtagggaaagcagagaagcaactggatttacatctcatctcagaacttcccaaagctgagggactggtggtatcagttgcccctagagtggagcttttagtgggcatacataacagaacatagagccactgtcatgtccacaggtgattcatatgttgagaaaattaaataaatgaatgttttaaagggagaactgggatacaggcctaggaatatgactcaccatgctgtgttttattcattatgtgtttagatatagtgtgtgtgcatatatgaatgtaggtgaaagagagaggctcttaacgtattatgtgctaataaaaaagaatcatgacatatctcaaagccatcatggagctgtgagtcattagaattaaatttttaaaaattcctgttcaaatgcctacacttaaaaaacaaattttttgagtgaatatattgatgattttttctcttttattgtgagttgattttaaggttttttatttatttattttttggagtgtttgtttgtttgctaaatcatggagctactggaagaaatctaatttatatactaactcagagaactctacaaactggacaaccaaccacaggttgtggttccatgtaagttttaaggttccctgggagaaaaaagccaagtctactttaggactcataggtctccagggttgtagttctcatgtaaagagggaagaggaaggctacttcaaaactgaagagtttattctaatttcttcagagaagagactgaacacgaaaaggggaaaaaaagttatttacaaggtatcaacaaagaagtgaagtatttaaagaccagataaatgaaaggttattaaaagaaatgttactgttatagaaaaataattcttccactgtaccatgaccataaccaaagtctggaatttcgaaacagaacacatagaaagcaaaaaagcagggagggaggtatacagagagagtgagcaagtagagaccagagaccatgaaggaagatgaagaacagccccactccctgagaacaccagctaactgaagaagctgtggtatcaagagcagcttaggagacatggggaaggaaaagaaatttatagttgtgtgggagggttgaggatgatgggaaaaaggagggcactagtaattttaaaaggtatgcatggaggccgggcgtggtggctcacacttgtaatcccaacactttgggaggccgaggatggtggatcacctgaggtcaagagtttgagaccagcctagtcaacatggtgaaaccctgtctctactaaaaatacaaaaactaatcaggcatcatggctggcacttgtaatcccagctactcgggaggctgagacaggagaatcatttgaatctggcaggtggagtttgcagtgatcacgccactgcactccagcctgggtgacggagtaagactcaatctcaaaaaaaaaaaaaaaaaagtatgcatgggaacacagaatcaaattctaaacctgtcatcaatatactttttaagccattttttgtagaccatacactttgtaaactgcacactgtatgagcatttgtagtgtatgctctggttagtctcagatttatgactttttcccagcttaattattaatagcaccctcttcattttcaaaagtgtcttggtgaggatagtaaattagattattgccatagcatcagggaagaaatttaaagtatctttgaaaggaatgagcaggaagattggggtagaaaaaatagaatttttgctgaagacaatttaaaagaaatttcatggttctgtttgataaatactaagaaattaaaataaagaagcatgaattctagaaaattcgatgttttaagaaaatattaaagtgataccactttggggcaagttaaagttcagtgatagtgatatagtttataattcttacaaccattattctttaccagactctatcatagcctaggaggctatgttaaaacactccatggagtaattgtctaaatatcatttctcttttgttttttttgttttattaagatggaatttttgttcatgcttatgacatagaatgaaaaccaaaatttttatttgctcttttttctcaaacatcatcacttgttttatggaagattatgactttatacagccacttataaagcaaatgtgtttgtatctcataccacagaaccagtagaaaaaaagggttatcttttaaagtctttggtcaaggtcaaagatctaattatatagtaatcaacacagataaatttataaactaaaagacaattaatatatatgtcatcaattacattctcctgtgaatttcaggtggaatttggcctgttgttgaaatgttcatattatagtgactaactgatcatagtttacctggagcattccttgatcatctcagtccttgataaactgcgatgattatttactatcagactattataaaaagatcaataaagtatctcagtgctaaaaaaaatgttttcacaaaaatctaaactcttgctgatgttttaaaatattacagttcatttgttctttgttaatttcttatttgcagtttgtcataagcagcatcacagccagaggtgccaaaaatctttacaaaaggccatcctcatgtagctccaagccaggtccagtaacaaagagccagaaatttccaggccaactctgaagatttaaaaggttcagatagttcggataagctttggacaagcagccaaattatggaagcatatctgaatttcctccaaatctacaaaccttttgaggtttgcttctccttattccaaagccactgcaatagctacagcctcttcacaactttgcatgagcaataatgagcatgagattactggaggcgccaagtcacgccatcccctcattgtttggataataaagttcagaagtaccgaggataatctcactagagagacagagaccaacttttacttatcattcttgcattcacttcctttttagctaattaaaccttagttcttcacaggaaataaaattttgcaaccttcataatagtttggcttggtaatactgtgtatatctttcccggtttgtctggaaaaacaggaaaagagaggtgccagtgcgaagacccagaatagtaaattatcttgtaaattagcagatttttcatttgcacgtggccagggctggctgtgccactgggtcaacaaggatgcctgccctggacctctgtctggaaggctttgagcaaaggggaggataaagggggcatgatggaagttggaggagaattttcagaactacaagtcagccgtctctatgtgtgccctacaagtttcttgatgtggccatacataagcctcttaacaggccagttaagaggctgcagcatacactgtgtaaggaggaggggaacaataaggcaaactcgttttcaggttttagtcatatttaaggtatatgggagttgtctgtcttctatcaccttcatggagaagctgactccatgttcacatgtaactcccaacttactgtttcttgtcccttcaaagcataatgaggaagaggcaagaagacagatgttatggggccaggatcttccatgatgtgacatgtggcattatgaactctatttcaaaaacaatctgcagaagttattctttctaacatatttctgaagaaaggtgaggagtggagaaagtagagaaagctagatttatagatacaatttcatacaattaacacatttaatctctcatttggaattttacatatggaatccagtaaaaattaacaaatgttcatacaagataacaaactgccaagtaatgtgctaattaaacagatttggtggaataaagaggtggaataaatatgctaaaattagaaaaaactcagctggaatgactacatttttattcctatactttggaaaatcctgtgattctcccatccccagtggttatactattaaataataaagatttattgtaactattttgcctactatgtggctaaaaccattttggtttttattagtagtatttgagcttagaaacattggcatctcaaatataagaaaaccatcttattttgtataataatgaaaaagtattaagtcagcttactgtaaattgaataacagattgctatttgaaagacacttttagaaaagtctgttataaactcaatgcctcttttgtggcatacccaattacttcctaatttttttctttttttgataaatctaaatttttgtgtattggatttatgaagaaagaaccatattttagatcagcttaagatatagatactcataggaaacaaaatcatctgttgtcatggcaaaagaaaaaaaggcattcatttaagaatttaggcttaaaaccacaaaataatattatttttgaataagaatatggaataatttagatacctgaaaggactctgtaacacatcaacaaaatcaattcatgaacctgtagaggagaacaggccatgagataataaacatcaatgttggaaggataattaatgtcagattaggctaacatacttcaatgactataacaattaaaaatgaaacatagttgcattttagtggtgttaaatgagcaattgctatgattagaaaattaggtttttttaacaaatataaatactcatgagtcgtaggttgcatgaactaactggtatgtttttaatattaatagcaattgtagctgggctacttccagtcgaaagtaatacgctttctctgagtggcagagggagcaagaaaggaagatcttaactccaattaagatatttttgtttttgcaattaacaacgggccaagtgtttggtaatgggggttacagtggggctgggtgttataggcccccttcaaaatatatcaccttttgttgaaaatatctaatgatggtgatgatggttgttgaaaacaataaaatgtaaatgtgcccattcagtttcctcatctccctgttagctagttgtgccaggttactactctggcccctcacattgctctgaactcctcaggcagtgagtcacaagatggggcatgccagagactcacacctcttactaaatttgtgttttctccatgcaattggtaattgggatgattaccaattactaatttcagataaagtgttaaaagctaataatgggtgctctttccaagattatttcctataacaatcatgtggtggggaagacattttgggctagaagaagagaaacaggaagaaaaaggtgggggagaggacaggtttttcttccccttaatacatgatgtgggtaaggctgactctgttaacatcattaaatgttgtcgccgaaggaagctgagatagcatgtagtttaacctattcattttagagttgatgaaactgaggcttggagatgttaagcagttttgtggttgaacagggatgagacccagacatcatgaagtacattctagtgcactatacaggtcatttgtgctgtttttttcttttccaaggtcataattttcagtaaaatttaatcctggtcagattcttcatgtgatttttgacaaatccagattgctgggaacattcagtgaagacatacttattattacataatctttaatataaaagtatacttccctggatgtattgtttgctctaccctgtggtaacgctaataaagaacattatttggttagcaagtagttgaatacattgtttacaaaaacgtatttttaaaaataaaataatttttattataattacatgattattatatgtattctacatatgattaaatattttgaatgtatgatatatgattgtaattatatggttttatatcatccctttgaattatgtttcttataaaaatatcagtgggtatatattaaaatatatttttaacataatgagccatcaatgcatataagtatagagtaagatctctttcactctcttgttctcttaccccagactattgaaagtttattcagctgtttttgatgtcttaagctactctttctagccatctgttgattttttttttcttttataaaaatagactgaacctatacacacagcatttgggtaaaataattattttgactttatgttgattatatgtgaagagaatttaggcttcatatttaataagcacatcaggaatattcgttctcagcaaccaccagacaatggtgtgaattttgtatgactgttttctttaccctttctgtgcagacagcattattcactataagcaccattaaagaaccaagtgtcaatgaacccagcagtgaactgacagttacttaaacagcacatgatccaaagctgtttgaggaatgccaaatgcatctttcttcaacaagttcatttcatccaagggaaaacatcatttcgtttaaagatttatatttatgaacatgttatgaatgttctggatgttccctgtaatgttttatgaaagatacagatgcatttccaagaatcatgaagcaagccggctggccatggagacagtttggaccttagtgggcagattcaagggatggaaggagttggctgagccctggagagagattatactcgcttggcagtgggtctgctgatcttccacctgacagtgctccatggcgctcccctttgttctgactgcttcctctcaactcccccagatgggcagtgggaagagaccagctgtttgggaaaataatcaggaaaatcatttctaggagcccttcccaagagaccaggttgaaggccaaccacctgaacaggttgttagccaagaagtacttctcctactctctggtgacctgctctctggagctgcttaagaggagaaggccaagaacagcagaaggctgtcccagggagaggcagagagagaagctgaaagacaatgcaggcatctacaacaaatttccctcttttcttagggtctgtatagttatctatcattccaggagaaatagatatgctgtcattgggactttactcctgattttaattttcaaatattttcttccatttcttcgtttgactgacttgctgggttaaagcatgtggctaagtaaacaggataaataactgattccatagaagaatctatcagcattccccagaaaatatctttgtatttatatggctggagcctgtatcctagacttggtcaactgtatccaaagccatatggttggttagaagagtaactgagaaaaacatggtggaaattactgcccatcctggagaaagcaacttagtatgtgtcttcctgatggcaggtgacttagcttgggttccccagaaagcagagcctgaggcaagggctttgacgtagatggcttattttggcaaacaatctacaggggtgagatgggggaagtgggaaaagtgagacagggaaggagggaaagacaaattcggcctgttaatgagcttatcactcctgggacactatcctgcctgttgggaatcttctgaagagccttgtagaacgtcctcaaaattgccagagtagctgaaagagggcacatttacttaccactttcatactccaagatcaaggtttgtgccatgggattttaactgcctcatactttcagatttacctgtgtaattatggctgaggggttcagtaggcaatcttcttagcagcagattggatatagcctgggatatactagaggcctgggatacagcatgagatataggtggtgctgctgaggcaggtgctgtcagagtacactgacactagatgcttagatatgtctggcatataaaagtacacccagtgagtgtgaggtctgtcccaaacaatgggcttctgcattgtccagtgggaatatgtctccagttcatttaccgtcaactcttactgctgcataccttctcttctcttcttctcagttccatatgtaatgccttctacctctacactttactctcactctcaaattattaccttgcttttgaattttacttagaaaatacaattaaccaaaacatacactcctcatttttccaccactaaatctatggtcttataagcatcagtactttcatactgggccttatttctgctacaatagatgagtttctgtgctcttatcctaagccaatctcttaatttgtgccctagatcccctcccctctcacttactaaaggtcttcactcttgtgttctctttctctctctgcattatgaacgtttccttctttactggatcataaagcatatgtacatgctgtaatgtttccaatcttgataatacaacaatcctctcatatctgcaggcctccatctagctaatggcctatttctctgcagcgctttaaaacaaactcctctaaaaccctacttttactttgtgttcacactccttcacctctcattttctctcgaatatatcgctgacccggtttttattcctcgcactatattataatcaatcttgtcaaggttgctaatcgccaattactaaatctaacggtcagttttcaatcttttcttccttgatttctagataatatttgacatagtgaatctacatggttgatctgttcttttttgaaatgcttttttctcttagcttttggagctgtagatgttgcagatttgatattggaatacccatgtctcactcttcgaataactaacttttctttacaatcatccagacacatggttttaaatgccagatatatgctgctggttcctaaattcctaaatttatattttctattttgaattctcacctggaccattatcttatataatcaactctctactcgatgtgtccacttggctgtctaattggtgtcccaaagttaacacatccagaatagagcccttggattcctactctaacaaatgtcaatgttcccagcctttatacaaaagctccactgttcaccaggtgcttaggttgaaagcctaggggacattcttgattcctctctgcaatagcctcaaaactgatctgtattcctatttttacccatcattggtacattctcctctatggagccagagaaaacttctaaaagtataattcaatgcatgttactttctgctgtaaactatcacatggcttcccagctcatgcagataaaatgtgtaagcctgcagggttgtgtatgatctgatctctggctaactcttcagtgttgtctcctatatactctgccttactatatttcatctctgctggtctgtttgctatctcttaacatgccatgcttgatcttgccccagttcttctgtatttgctgttccctcccactggaatgctattttctcagattttcacccagctagctcccttacttcagtcaggtctttactcaaatataatcttttttgagaggtttttcctaaacagctttactagaatcctacatgtacccacctctagttatgttttacccaactctttattttctcttggtacttattactttctgatatatgtttttgtttatttgtttactctctgtctccattgttgaaaggtaaactacataaggctatcaaagctgggcattatattagtcataactaatgttcaatgtaatgacatggtcaatacctacagtgatgtttaggacataagaggaactcagtaaaatccactgaatgaaggaacaaatagcttaattagaattattgctgacaagttatcacagatagtcacttatttgagacaataaacatactcagaatcttccttaaataaaagcccatccttttgatggaaatatacaaatgtctataatatagaaaaaagaaaatacaaagttgcataaaatttagatgtattagaaacattttttattttctaatatattatgtgtagttaaaaagcaaccaggcccgttggctcatgcctgtaatcccagcactttgggaggctgaggtgggcagatcacctgaggtcaagagttcaagaccagcctggccaacacagcgaaatcccgtcttcattaaaaatacaaaaattagctgggcatggtagcagatacctgtaattccagctacttgggagggagaggcatgagaattggttgaacctaggaagcagaggttgcagtgagccaagatagcgccccactgcactccagcctgggtaacagaaagagactacctctcaaaaaaaaaaaaaaaaacaaccatacacattttttaagagtcctatgaaagatagagattcattagacctctgttcttgagtcacctgaaatcctatatataaactagagcaatggtttctcaaagtttatatctcaactggcaccactggcttcccttccagccacttccttccatctaggctttgtgagaaatactcttagaccactgtgcctgctcaagatctttcatttatctgctttcttctcgatgcctgagaactcttgactggtctttttatcactggaataataagattcaagattctagtgaattgataggggaagagaaatcaaggcttttgacttgctttaattttaggccatctaaaccaatttagcctacttaaaaggaatttcctctgcttatatcctggcttttgaaagttctcactaaaacctgggttaaaccccttatttggcattattctctgcattcatctctctttcagggacttagtggggaagaacaacgagatcagcatgcttgccattctctaattctttttccataagcatcaactggcaccccattttgacaaatactacatcttatgacagccagctccaacgtcactatggcataagaaagtaaaaacactggggaaaaaaagaaaattataaattaacagaaagatgatgaatttcaattgttccattcattcttcatgtatttgttcatgtctatattgaataaatattttttgagtccttaccctgtaggaggcaccatgctaagctctgactatagaggactgcacaggaccaacacggtccctgcagttatggagcttacattgtagaaggggaggcagatagtcaggtaattttaaattaggatatttatgctctctaattaatatcccattagcctgacttaaaagagtaggaaataatcatgaatagaaggatgttatgaagggtaaagaagaacacaatcaagggaaacaacagggacaatagccttccagtgaaaaggagcagaaagaagacctaagaacctggtgtgaggagagcaagggaagagaggcccatgttgaagcaagagccaaatgtgacaatgcatgtccatgcgggctgttgggtgtgtagggatttgtgttttatccgaagagccactggaagtcattccaataaaccttaaaaatattgttttggtaatacatattactggaagtagaaataaaatgggatagtttaagatgtgtctcaaaatgtcagatataggttatggtggtcatagtatgaaaagataacaatatggccaggcgcagtggctcacgcctgtaatcccagcactttgggaggccgaggcgggtggatcacgaggtcaggagttggagacctgcctgaccaacatggtgaaaccccatttctactaaaaatacaaaaattagccgggcttggtggtgggcgcctgtaatcccagttactcaggaggctgaggcaggagaatctcttgaacccgggaggcggagattgcagtgagacgagatagcaccactgctctccagcctgggcaacacagtgagactctgtccccccaaaaaaaaagaaaagaaaagaaaagaaaagaaaagataacaatactttttatgaaaaggaacttcaagtagattaaaatatatttactctaaagtttaatatgccataaaatgcaaaagattcttttatctttcactgtttcgaaagggaaggtggtttagtgtcacaaggccctctgaaactgaagtgactaataaattgtggggattaattactcactggaaagaaaatgtggaaaatgcaaacttcattggcttcatatcaaagccacatttcaacaacacatggataaacaatggataatgaaaatcttttatataactccttttctcttctacattatataataattttctaccgactataccttaacttttaaccttgattttaccactaatatacacaaacatttatctgcacttttttctttttagataacttttttagaggaagcagttttcagttatatcgagacagcatattaaaattctttttgcaaatttctatcataatttgcatattcaataaaaatctaagcagtaaatctattccaattttttccccattctctgtgaacaagaatgttttctcattgtcttagctgttgttttttaatttgggccatctttatgatgaataccaaataatgaataattgcttccatagacgtttccattatctcaagaattctgagagcttgagataatttcccagccaagaatattggggtgtgaaccctgaatatcagagacaggtcgcagttaatttaggaagtttattttgccacggttgaggacacacacccatgacacagcctcaggaggtcctgacaacatgtgcccaaggtggtcagagcagtttaatgttatacattttagggagaagtgagacatccataacatatgtaggatgaacatgggtttggtctggaaaggcgaggcaggggcttccaggtcataggtagataagagacaaatggttgcattcttttgagtttatgattagcctttccaaaggagacaatgtgatatgcgtttatctcagtgagcagaggggtaactttgaatagaatggaaggcagttttgccgtaagcaattcccaacttgactttttcctttagtttagtgatttggggccccaagatttattttcctttgtctgaggttacttggccagaaggtaggaatggcaaaatcaaggcagaaattgagtgaatgaaaagtcagcaaagaaaagcagagcttatagaaaccagtagatagagagaaaagtagatggcaaaagttaaaagcaggtggtaaaatataaggcataaaattatcattaaggagatagtcagaatcacagaaacacaatgccagaaacaaaagggtcttaaaaagaacttgatgctggcaacaaaagcaaatgtaaacaagaggaactatatcaaataaaaggcttcttcacaacaagggaaataatcaacaaaatcaaaaggcaacctatagaatggaagaaaatatgtgcaaaccatgtgtctgataaagggttaataaccaaagtatataagaaactcacccagctcaagcgcaaaaaaaatacaacctaatctaaaaatgggcaaaagaccttaatagacatgtttccaaagaagacatacaaatggccaacaagtatataaaaaggtactcagtattactaattttcagggaaggggagttaaaaaccacaatcagatatatcacctcatcctgttactaaaaagacaagagataaatgttggtgaggatgtagaaaaaaggcaccccttgtgcactgttggtgggaatgtaaattagtacagccattatggaaaacaatatgaaggtttctcaaaaaattaaaatagaattaccatacaatccagctatctcacttttgggtatatatctaaagaaaatgaaatcagtatcccaaagaaaaatctgcactcccacactcattgcagcattattcacagtagctaagacatggaaaccagaaactacctgtatacattgacaaatgaattgatcaagaaaatgtgatatacacacacacgtattattactcaacaaaaaaaggagaaaatcctgttatttgtggcaacatgggtgaaccagcaggacattacaccaagtgaaataagataaggtgggcacagaaaaacaaatactacatgattttgcttacatgtggaatctaaaaaagtcaaattcatacaatcagagagtagaatggtcattgccaggcacaggagggtaggagaaatggggagatgttggtcaaagggcacagactttcagttataagatgaatttatgagatgaataagttctggcatgctacaatatacataatggtgactattaaaaaaaaagaactccatgcctcttctagttggcaagacagagcaggtgccaagaccccttgtaaactccactcatgatgccctctgaggatcatgatgttcttttcctgcttttggtccaggcaatcaaaacagaaaacagcagacatttagagccattggttaggtagttaattacactcaacgatgagctagacttctctgaccataggaatggcctaaatatctcttcatcttcatattgttaagtcactatgattgaaaaaggagctaaactcttcccatccaaagcaataataatatcagttttcgtcggtcaagagccaattcatctcttttttgtgggtaatataaagagggacatttcatcttgaaatttttttggctgtactctactttgatctttgcagtaaagaggaatttactctgattttgaagcttccccttacccccagtctcttctgatttagccacagttaaaaatctagccagctgcccactgtattattacctatccattgcagcaatctttttggtttttgcaaagagcttgccttgatgtggtcttcaggatgtcacaagtgtctagcttaatacatttgatgacatttgtaaacaatgtaattcagtaaaaatggttcaactctgcttttcataagattactttatgagcttcttatttccctgacagagctcctgtgggcctttttcctctctgcctgtttattgaaaggaatggaggcataatcagtcaatactggacttctttcttagaaattaaagtgttaaggtatttaagttttgccatatgtgtgacacaagataagtataagagagtctgtaaggttctgctgggccttgtgatttctagttgctctgcacttgatctggggaccacagaatctgatgaacaataatatactaattttgggactctcttctcactcaaaccatggatggcctcagactttattccaagcattttttctgtatcttattctaggaagttttagattagctaaaaatatgtgtaaacaaacaactttgaagatttttttttctgtaattagtgtgattttttgcactctctgttccccttcttaaagataataagtctgttgagatctgtgagttgttaggagataatcttgttcatagatttttcatgtcattttcaaaagaagccttaaaccaaaaaatgaactataataacaatgtaagtagagtatttcttgcaagtggatttcatggaaaaaccgtctataccatactcttcatttatgaaatatttaaattgcttgatgcttttttgttttatttttgtttatttatttttttaagaaactaaatgaatctttttagagctagtttaggagcatctcctgtttacttggtactttatctatcaacacatacctacagtgtttgtatattttaggataatatctcattatttctcaaccttcagaaatttatggttagagaaatgagtaagctatggtacttttatgtgaatatgcggtatgcaagcaacagtgaatttaagaagcaccttcccttttagaatttaactaaagtgtgctttgcttttctgctttctggcatgttgattgacccaattaatttttgaaagtgtgaggtcctaacagcagggattaaatcagccattccaaaactaaatcttagagtcagggtcttttattttattttttggggaagaaaagaaagggcctgggaatgaaattcacgttgctctggggatgttttttttccctgaaacaatttcacataagcctactttattaaaacacacacacacacgcacacacacagacacactcacctctgttttaattgccactaaaataatcatctacaaactcaagagtgggtggtattaagggttactggacccccagggaattgcagcaaagaattaacacggcacattacctaaagtgactaagtgttaccttctcgctcatcaagctttctttccccttcctccactgtgcctctgacactagaccactatgttccccagagtttccttcaacagttctttaaggctccaagttcccaagtttcttgagaaaaactgattttccgtattctttatttcctataatgaatctgaccaaaacattcattaatcatctgcttgaacttcttatgggaccacacagaacatttctcctgatatcttacctataatttgtcctcccgccattctccaaggtaatctactaatctgatttctcctagacctatttctatttttgcttctacctttttcctaagttctttcctttgctagagtgactttttcttcccagtttgttatctgctatactgacactatgcagggaaacagggtcatgcaaagcagcaaaataaagattctaagataggaatcatgtatggacacaacctgggtgattggagagatgccaaaaactgggctatgttgctgagacaaagctgggagaaccccagtgcggactcaaacccagtgaggagtccagaactggaagatatacaggtatcaggatcctagataaaggtaaggcaggaagtcaaatcaacagccacgagatgtcataccaaagcagcatagagactcgagtgatgactgcctcagaaaggaaatcttgttgcatatgagccagtctcaggctatggccctacaagggtctgccaatgtgcataaatgagccacgttacagagctggcaaattgcttaacgggacttaaaatggtaatgtggttctgtatccttgttccatactgccctacttacaagtattcccaactcatctaaatgcataaaacccacaatcctgttttcactcaacaccctgccagtaactgttgccttcctatctaaatatgatggaaatgtgttatatatttaagcttgtattatcattttcaatatttctatatttcctgtagacttttctctagtggggaaaatatttttttaaaaagaactctttcgaaacgaattttatagcatgtagaccagagatggccaaataggttatatacgcagaaccacctctggggatctcacctctggcagccattattttaatcagggcacaatttcctgctgagtccaggctttacctcaaccttctcaacacagctctccaggaagcaacaaccaatttgactatactgggagtggggttgacacatttaccttcctgacccatccttggcaacagctggggaaatgaaatgttcttgatggtgatgttggcctaaaggtttgggaggaaattgccctacttctttactgaaagtatagccagattaactgcagaaagcaaaaatatcattatagacatttttagcttggctttgaaaatgggcaccattgcttctctgtaacaggtacaaagaactcaggtgtgaatgtttccaatgaattgaagtcttagcaagaaagtttctcgctctttctctctccctgtctaagtggggaagtatttaatcctctttgcaaacacagtcccagctttcaacctcacaggactgcctactgtgttgaattacattcaaaggtttatctgccatagaccactgaccctagggaccgggctaagactattcatattgtctagaactataggtcagattgaaacctgcatctctggcaaaaagccaacacttcattcaccacatcactcaacttttctcctcatgttatgtaattacaacacaagtgtccagcctgacatttcagtatgaatattagtgggcataaaaattcaatccaggcatacgacagacaaaacactaccaatttttactttttaaaatgcagggactggcataaaggagagaatagaccattacaatttagtatactgacttagtagagttaagtcactgtaaaccatcaggaatggaacacctgagcgagtaaatttggagagcatgtatgcatatgtgtgcaactattatttgtgtgtgttagcagtggcttacagaggttagtataggggcagatggaggaggtccattcggttacagggtttcacatgaatgcctcattattttgctaccatattttcctgtaggtggcagcactaacaaggctggggtcagagaagaaaggtttagcttcagattctgaagagaaatttttagtaacaagagtacaagaagaaattaaaacttgtgctttcctttttaattaactatagatgctgaaagtctttcagtagccaacatgttattcaaatgaacacacacacagccatctcatttaaagaaaacagaccaacactggctaacttggcatcatcagtcgcactggagagacttagaatgtttcatgttctgtgtgtgggagagaacgaacacagtttgttcggcttgaagtatcatttctcatagataaacatagaggagaaatttatcccagaacttttatttcagagaacactaaaaaaagttagttatggcaaagttagtagctggagttagaatctcagacccagtttctgaggaatcagcataatttcatatgttattattaccttattattcagtaattaatagattactaaaatggtaatgaacataacaaaataaaaatttcagccaataacaaataaatacccagattttataatgaatttagtagatattttcagttgacatttttaaaaaaagaatactaaaagtgtattgcgaatttgagtttacaaaatttaattattactaatcataaaattataaatatatgctcctagctgtgaaattgatttaatattttacaatctattctcctgtgcaatctctaattttaaaagtctgttttagggtttgttagatttcctcacatagacagtaagctcctgaataaccacataagttcatcttgcacagcagcagcgctatcagcttttgaacactcactatgtaaaattcactttatcctaatcctcccaacaaatggaagggatggtactgctttcttcatctttcacactgaaaaagctaaagactaggaaagttaagcaactagtccaactgcatataaaaactaaggtgtgaattctggtgtttagaggcaatactcattttacttactctcattcccctgcttattggtagttcccactgccaaagtaaattacacatagtaggtgctgaaccaagctgatggattctattattttaggatgccattaccctaaatgattctggttaattcagcagttgtccattatctatgctcaaattaatgatgtagttttctatttatagggatgggggaagtaactacttccttgtcaaattaccaaagcactaataatatttttttttaattgaaaagaggccttctaaaaggaaggtataaaatctgccatcatctgcattgaaaggttaaaaaaaattcctttgcaaaatttatactcgtatttttattattaaattggtattgctttacttaatttgggggtcttttttttcatcttgtaaatgggagttctgtattgctcaggattgttcagaggaatttgcttttcatgttagcagactaatcactctctgtcctccatcaaataaagaaattccttggatttccacatgtcactctttctagaacaacaacaacaataaaaaccagactatatactacatatgagctatgttgatatgtattcaatctgtaagaattttagtctgaataccctcaaagaaaagcatttttgtggtatttcttctggaaatccctcaagaacaagcaatgtggtaatatttctcgttgaaatactgcatttttcttccagtggtggcagaaggaaaacataagaaaatttgctttcctaaaaggcatcttttctctctcacagtgtttctgagggaaagcagtggaacctgctggtgataatgcctatgaaggggactttgcactcacaagcgcttttgacccgtgagtaattaacgtaccttacaaatattcatcttcccaacacctttatggggtaggtaagttatatactcaaggtctagtattcactgcaattttgtgacattgagaacagctacagagctgtccactgttaaataagtcctgcgccacagaagaaagtttatttttattgttcagccagatggggagctaacctactctatggcaagtgcagtgaactatgtgaattgatttacacctcaaaacacccttgcaaaaatttattgttatctccatcttacacaggggtcaaaaagttcaatatactcaaattcagatgcttctttgagagaaagctgtatgtctccctgtatgcctgtatgtatgtatggctctgaaaattgtgtgtttccataatatcacactatctctttgactgtacattgtcctgtattgaaaccagagagcttctctaacacatcttggacatccttgtgctggtgctcctcactactgctttctgctacttggccagactagggcatctctctcatctgttctgttaggcaagatgatttaaattattcagaacaagagtaggaaggcaactttattattctgtgcacacttttatgaaatgtatcccattttagggttgaaattcaatgtatcccactacaattcttttcatggattatgagtactttaaaacaaagaacaatatcttaattgattcaaacctgcaaaatttaacaccatgtctggcacataccgggtagtcagaagagatctgaaaagctaacaaaatcaagtctttttactatttgatatcctgacttcatttactttttacctacacaatgacatttccaagattatttaaggtaggcaaattttggaatttttacaataattataaagccacttttcaacatagtcttttgtaatattggtaaatactaccaatactttgctatcacttgtaatataaaagagtaatacactctatttcatgaaagcatcatggaccgtaaagaaaacgaaacagaaataaaagatgaatgataaaagtgtctcaatccattgctataccatagatctttaatataattatgaaatatttcagtgattgattctattgctgtatcatagatctttaattatgaaatatttcagtgattataaaaatgctgctggctacattatattgcttttcctaaacatagtataaattacagacatataacttctgtttgaaaatataagcgatagaggaaaatatgaactatttaagatggcctgaaggctctccatagcctcccattccctccttttttcaggcttatttcttaccacgctcctctactcactcaaccagctcttttccaaacacattggcctcttatttgaacagacctcaggacctctgcatgttctcatgcctcttgctggaattccccttttcctcatgtcctgttttccccatggctccctccctcactttgttcttctctctgctcaaatgttccctcttccaccacccaggtccacttcttcctccattcctctgcacatgtgctcaatctctaccctttgggatgctttacctttttttcattgcatttatcatcacctgtcattattctgaatatttataaaggtatccttgtcacttcctagtacaataaaaagtctatgaaggcagagacttttgtctatcttgttcatctcctcatcccagtgcctagagcacatggcaagcgctcatgaatgaaataataaatgagttgttgcatgacttcacagcataaggaagttattaaaggcacatgatatttcatgatactctgttttcataatgatacttgattttttttcaagacatcacaatccctatgtcctaaaaacagtgcttttgaaaatgcatcctagtgtattgttcctatgaatatactttatcataagtaagttttttatgtgtgtttgttttcttcatagataatatccacaatgatgtgctaagcagaagcaaaaagctaagacatttctttgatttcctaatttgctaaatattactacaaatacaatttgtggtactcagtattttggggattagagactccaacaagttactacctaaaaggctgcatcatagtaattcaatgttatacatttgctcaaatgaatactgtttttagcttgtctattttattcctggagctagctaactgataatgtgtctctattttatagagtattgactcagaacaaataggaaaaaattgtttatacaaagttatattattaggtgggttgcattagaaatgtgaattccagcagtgttttccaccacatttttttctccacatttaatggaggaaacaaaaatgcttccaaggccaatcccgaaggtcctcatagaaaaaaaaaaaaaagcgtggctaaactggtctcaggaggaggaccagcaatagcattagttttaccgcactgcctgtcagtcttttatgaagaaaagctttcctccaaggggaaaatcccttccctgacagccaccccccacccccctccaggacataagaaaggtgtcatatgacattcaataagactgagtattctatacaagattgaaaaataaatttctattttagttgcttttgatcttttttaaaaatcagaacactgtgtgggaatggaactttctaacaaagatgtttgtgtatctttattttgaatgtcataaaataatataattttggagtttttaataaggcttactggagtcaaccttctcactacagatgagtagttcagtgatttgcaacttactatatttggaaataaagacaatgttgagattctgtcacttctctttactccacaattaacaaccaacccgaactaaaacggaaactttacgaagaagttatctgacaaaaatgctgcttctttccaatgctaaaattctgaaaacatttaaattacccacaatatgataagtaaagggacatttaatgggtatttgagcttataattggttaagggttggacttgaaaatatatttattggcactacaaaataaactctctgtataccattttcctgattaaagttttaacacacttaactcagtagttattgaatgatggggggatcagtgtttctctaatatgaaaggtgaccactttaatttttaagagataacatcttgttcagtatatattctccaaaaaataatccgtttatgcaatattatctatttgacaaatttagccttaaaaaatgcctcatttattcaactctgggatatcatgaagacaactaaggtttgacacaacagcctaatttctacattctcattttccaaattttgattgacaagctgaagggcactgcatgtaaaggaaaagttttaaagaaacagaaccagttgcagttatgcccagggaaactattgccactactctataatcaaaccctgtgctaagattgcttgagaagttgtgagggactttagtgaaaaagcagctgctagccccatgatctttattttgttactgagatacattgtcatatagaggacaatatgaatgaattagtaaatgtttatagattatagaatatgctggggaaggaagagaaactcctatgtcttattttcctgatacatccgctaactttacacagagtccctgaatcatagcagatacaaatgtgcagccttcctgcaggggtcctcatccttatttttgctgtgtaggcactgacaatctaataactaccataacttcaacgtagtgactacaacaagagatatttcaagacataagcaacaaaaataatatgctataaagtatctgtgatacatcatatttgtaattcaagaaaacagtaaatttcagttacaggacaataacaacaaaaacgtatttttgttcccatcatggatctcctgaattctatgcacagatgaagagggttctgtggacctgatatttaaaacatcagattagagagcaaacaaaaaactacttactataatcatcagagaaatgcaaatcaaaaccacaagagataccacttcagctagaatggttattataaaagagataaaagaaaacaagttttggcaagaatgtggagaaaagggaacctttgtacactgttggtggaattttaaattagtacagccattatgaaagtaaattggtatatagaagagacctctcctgtcatgtggattacagcactattcactgtagccaagatatggagtcaacctaagtgtcaaacaatagatgaatggataaagaaaatgtgatatatctacacaatggaatagtatttagccataaaaatgagtgacgtcctgtcatttgtgacaacatggatgaacctagggacatcatgttaagtgaaataagacaggcacagaaacaaatatgccatgttctcactcctatgtggaatcttaaagcaaagaagttgacatcaaagaagcagaagcagagagagtagaacagtggttactagagactggggaggggtagggcaggagaaagatggggagagttggcttatgaggacaaagttacagttagataggaagagtaagtcctggtaatctgttgcagagtatattgacaatggttaacagtaaaagatggtatattaaaaatagctagaagggaggctttgaatattctcatcacaaagaaatctaaatgcatgagatgatggatacactaacctcacaacacatgtatgtatggaaatgtcaaattgtaccccagaaatagatacaatcatgtgcccagttaaaataatgaatcatttttaagttagaccacttaaacaaaccaaaaaaaaccctctatttactacaaaataaaatttaaacttgtcaatatgagatttgtttactcctccctaaaagatagtctaatttatatgtaatgtaataaggtttaattaatccatagaataatgtttgataggaggaaaaggggtcaatgtttgaacatacatgtgcttgctttaccttcttcatgcctttagtctttctgaaaaacataaaaagcagatgcctgattaaggcagtaaaatatcttcatgataaaaaaatggacagagagctcctggatcagtatttgactcatttacttatttcctccgagttcagtagtttcatgtttatatattcaggcttcctttggcccagccgtttctttgctttggctttgttttacctaggcaactgtccagatgatgttagccaaaatccactttggacattttctggagtttagagagccatgtgtgaggcttgtactttattcattaaacttttatgttaagttataatttacactaaacttcatttacaaacagacgttttaacaaaagaaacttgatgactgagatgtttagccctcaaattattttttctttgtgttgttgttattgctgaggctgaaattaacttacatgttcattgtttaattaaaatttaaaaacactgaaatacattagtgattaaactgtgcaccatcgtatgaagggataatatattttggcaagcatagatttttgcctcaaaattaactgaattgataataattataaagctatactaagttgaataaggcaaaaatggagaaagaaacagtattgatacctattcgtgatttcttatgtatcagattttgtatgtgttatctcattcaatctttacagtaaatgtaagaggaaggcattattataatattattactggaaccaagattaagtaatttcccaaggtcaccactaattgacatatgtggaattcatgcccgggtatttctgtctccttatgaacaacataaccctggatgtgtagctaagaaaaaaaaaaaaacaaaaacctagccattatggacacaatttccaagacatctcataacaggttgatctcaagccagtaaatataaacacaccgcagcctagagttcacttttcccccttctgattttctcaaggagctagtttcttttgggcatcacattttttacacaaaactgagttatcagtttttaaggcataaaattgacacataaatgagatgattcacacgacagttgaatctcctgtaaagctatttttagtttcatttttagcttaagaaataaggaatttctttttcaagttacatttttttttaacctaaaaagattttttccttaacagattcaacaacttatggacttacactcccaaatgtcttcattttttaaaaatttatttgtattattttgttcttatagtcaaatagataataataccatgatttcttctggggggaatagagtaggtggagtagtgggcagcccacaatagagaacaatagtttgtctttgtataaaggtaaaagtgtgaatcttgtgtcatgttcatagtctctctctctctctcacacacacacactctcactctctttctctctctctcctctctctctctctctttctctcagactgccatgcacttggggtcattaaaagagcagctaaccatttgacacagtgtttggattctcacccctacaccacagaccctcattaccaaactgttaatcactgccaaaagagcaagtcccctggcagccctcaagcccccatcccccaaagcagatctttccacacttggtatcaaattgcattgtagttacaacactgggactgagtcctttaattgtacattagcaacaaggaagttcttttctagctcggatttaagtgtttcttcgactatctagtgcatgtttgtacatcagtaagaagtatagaggttaaaatttgttctcacaaacaccattcctcaaacatacacattatacacaaagcacctgaagcccagctctgagtccaaattccatttctaagatgttcaacctgctatttggaagttttgtgtattttttattatattggaaattgccccatctattatttggctataaggttagtgacacaactagctactcaagagaaaaatttgtttcatcaacaatcattttgtttatttgatatcaaatagctgaacaggaggatgttttccactgatggtttcagtgggcttgttgaaatgaagtggagtgttgatagtgtggaaactgagccaagaagtgaggagatagaatttgatttaatataatgacccacagggctaatttcagtgtttctggcatatctttgttttttaaaagcaattttcatattctagcacctaaagcttcattaaaaatacagtctttctcatggcaatgtgaagactaaaggcgattatgtaaatatgccactttgtcctgtgttcatttattagattggttaaatgaagagttcctgccttacccatgtttagttcatttcctttatttttattccatcatatcaaaggcatttcaagtgacatgtaattgattaccttaaactagctaatgtttatcaaaccacctagaacctatattcagatgtgtggagcaataataatatgtaaataaaaataaaagtcatgtctggtgatgatcagtgtgtgattggtggttgtgcatctgttgatattgcagtcctctcgccagtggtggaatatggtacttatcaaaatgctgtcagttgtaagtgacagattcccaagtcagattagctttgactgaaagggaatatactgtttcatgtaactaggaagtcaaagtagaatttgctgcctgcaggcattgtgggaaccaggagctcaaatgtggccacaagggttttttccctttctctatctccctgctctccgtgctttgcctggcttcactctgggggctggaatctccacatagaagatgaaaaggaccctggcagagccagacctttatttttctaggaagagcagttctttcttccagtgactatgtattaatccctgtaaaggacttggcttctctctgtttgaactatattccttcattgaaactatgattttgtctgaaataatgtagaacaataactggcctagcctcaatgatatcctctcccctatgactgttggcaggtttcaatgattatagcccaaccagaactctgtcagctgcaggagagatgatttctccaaggctgtgatacagtcagcataattgacatacactccccttctacctaccccactccagttgcaacaacagaaagattagcagttgagttgatatacactaagtataaagtctagaaattcagaaatctatcattatttcactccctctacaaatctaaattcttcaacacaaaggcatggtttggaccaagccagtttccttagcattcctcaaactcatcatccttatcctatcctgtattttgcatttctctttcatctcccactctcataggatttgctttgctttcctttcatctattattcaaactacatgtatttttcagaaaacaattcaaaccttcgtctaagcaaaatttctgcataactaattacaaacatgcttaaatatttcttctcttatttcttatagcattgtattaaccatttgttttatatggcttttatttccaacaatattaaacttgctgtctaagctttacagttttgatttcctcagcatgacagtatggctgcccatgggcgctgggagaatatgtctctttgtttacaccttgcaagggagacagaaggagagagtaagagagagagagagagagagagagagagagagagagaatatgaatcttctcttcagagaagatctgagcaaacctctcttctagttgcattagcccaaagagtctaggctgacccaaccaagctccagtccctggacagaggagagtagtatttgatagccatcaattgatagatgaattacctgaggctaaataaaatcagtaacaagattactattataccaaatatggaactaaatctgcattaaagagtcaaatataaagacaagttgaataaatcatactggaactgaagaatgtaattgactgcaatggaattcagtgagggataattaatatttagcccctgttcaattagaattaaataaatattatgcaactgacatggatttagttgtattcacaatgattttaatactatcttaaagagtttatctgattaattcttgtattattaagcttagtataaattttctaaaggaaatgctgttctattttttaaaaatgataccattaagtaatctgaagaagattatagtaaaaaaaacccaaaaaacctccttattccactgaggcagtttaacgtaatgaatcatcagtttcaaaaattataaagaatttgatttaaccatgctcaaaacatttttttaatatcttaattatcaagaggttaagggtgtcagagggaacagtatatgacttattgcatattcatttcccataatacctgaacatgtattatgttctagaccatgtaacagcataaaacacctagaaaggcaaagatttgaaatgtattcatgggtcttgacatagatgcattatgtgtaacaccaagataaaacactctttctatttgcccttccttgtagaaggcctgttggagcatgagggtcacttacaaaaagtatttcctttattttgtcagaaaacctcttgggagatgatttgtgtgggcctggttacaatcaagaacttttattatagtgaaattaaagacaattaagccaggataaagatattaatcttggacagcaatactattattatatctcagtgagtttataaccaatgttaacacattgggaattaggttttattctttaattttctttttctttctttctttctctttctttctttccttccttccttcctctttctttccttccatccttccttccttccccttcttccttccttccttctttccccttccttccttttctttttctttctctttctttctttccttccttctctttctttccttccacccttcctttcttccttccccttcttccttccttctttctttctctttccttccatccttccttccttctttcccctttcttccttccttctctttctttctctttccttccttccttctttctttctttccttccttccatccttccttccttccccctcttccttccttctttctccttccttccttccttctttttctttccttccatccttccttccttctccttcgtccttccttctttccccttccttcctttcctttcttttttcttttcttttctttcctttctttctttctttctttctttctttctttctttctttctttctctttctttctttcctttctttctttctttctttctttctttctttctttctttctttctttcttctcttcgctttctttctttcttctctttctttctttctctcttttttttccaagacaggttctcactctgtcaccctgtctggagtgcaatagcgcaatcgcagctcactatagcctctcacctcagcctccagagtagctgggactacaagcatgtgctaccatgcccacataattttattttatatttttagagaaggggtttgctatgcttctcaggctgatttcaaattcctggtctccaggaatcatcaagcctcggcctcgtgagtatctgggattacaggataagccgctgtacctggctatcctttaattttcaagtctctgccgccaaatgtatttgcccagagacctgtatatgtatgtgtgtgtgtgcatgcatttgtgtgtgtctagtattattcatatcaaggagaaactccacaaaaaataactgcttaagttgataaagttttaattcttatttttttcagtatttatgaggaacccaacataaggcaatctttttcatgatactattttccagaaactttattgaacagtggctaatggatcattattattattttaatgtatagacacttactatttggtggagaaagctcagcttactctccaagattctttgggaatttttcccccctgggcctcacactttcctggacacaaagactgaagctaattagaaagtagcagattagaacaacattgagagattgtccaagttgatagaattatttttcttcttatctggtaaatgagagcaattctaaaagcatactgaaataattttaatacataaaaaatttaaatatacaaaatatttttaagcactgagaaatctctttatccatttataagaatttaagatcatcagattttcaaatgtaaaacatgtttagacaagagtagatgttactaataggtaagagaaacttacatgatgattaatatctatgttctaaatcatgcctcaaacatggttttatcctaaatttctaacttaagaaaaggattagagtcagaagagtacgatctattctacattcattcaccatgacatccgaccaatacttttctatgccatactatgacacacattttccaaaagaagcaaggatgtgaaatttaatacataagtatcaacccagtattttggtctcatattagatacatagttaagaaacttgaaatgtttatctgaattaggcaactaaggacatcattgtcttttcctgtgtactatgcaaaaagtgaaataatagcatagtgttacatatgagataatccaactctcagtaaaaagtctgggagtttgaatgttgaatattacataaacaatacactccatatatatggattaaaatgctaaattatttgaaatttatttggaaaattacagctcaactcatgttatctctaaagatgacatcaactagcttcagaataaataaaataaaagatattgagttaaagtttaaatttttaagataagctgtatttatatttgtatataaattacaaaatatagaaatgtttgctcattttacagaacttgcctttgattttattttaaaatatttgtggcagatttaagtgacttaagatttggggtattaaaacgacaaacatccagcattctattccttttataatgacagaggaaatagaagttatttgctaactttaattcttgaatacctgcagtcacatttttaagtaatcgctaacttcgatacattggcacatatatattttgctctcaaagattcgaaataatttatgatacccctgtaatcccagcactgtgggaggccgaggcaggtggaccatgaggtcaggagttcgagaccagcctgcccaacatagtgaaatcccgtctctactaaaaatctaaaaaaatagccaggtgtagtggtgggagcctgtaattccagctactcaggagactgaggcagaagaatcgctggaacctgggaggcagaagtttcagtgagctgaaatcgtgccattgcactccagcctgggcaacaagagtgaaactccatctctaataataataataataacaataataataataataatttatgatagacaaataccataaaataaatctttcccattgtaaaaggtataaagttgaggacccctattttatcttcactaattcatacttacggaaccacattcttccagaacataagttactgtctaggactaagaagagtttccttgaaatctacatgagcttttccttagcatgagggtactattaaataactgtacgtttctaagcagaaatgaacagtaaattatctaaggtcaaaaccaaaacatgatcaaacagtagctacaacacttttaactcctaatcaaatagctctggcttctggctgaattgtactgaccaacaggtaatgatc

SEQ ID NO: 60104 - DNA, 2126 bp, Homo Sapiens
catccatcttgaattaatctttgtataaggtgtaaggaagggatccagttttggctttctacatatggctagccagctttccaccaccatttattaaatagggaatcctttccccattgcttgtttttgtcaggtttgtcaaagatcagatagttgtagatatgtggcattatttctgagggctctgttctgttccattgatctatatctctgttttggtaccagtaccatgatgttttggttactgtagccttgtagtatagtttgaagtcaggtagcgtgatgcctccagttttgttcttttggcttagggatgacttggcaatgagggctctcttttggttccatatgaactttaaagtagttttttccaattctgtgaagaaagtcattggtagcttgatggggatggcattgaatctgtaaattaccttgggcagtatggccattttcacgagattgattcttcctcctacccatgagcatggaatgttcttccatttctttgtatcctcttttatttcgttgagcagtggtttgtaattctccttgaagaggtccttcacatcccttgtaagttggattcctaggtattttattctctttgaagcaattgtgaatgggagttcactcatgatttggctctctgtttgtctgttattagtgtataagaatgcttgtgatttttgcacattgattttgtatcctgagactctgctgaagttgcttatcaggttaaggagattttgggctagacgatggggttttctagatatacaatcatgtcatctgcaaacagggacaatttgacttcctcttttcctaattgaataccctttatttccttctcctgcttgattgccttggccagaacttccaacactatgttgaataggagtggtgatttttgcaatctactcatctgacaaagggctaatatccagaatctacaatgaactcaaacaaatttacaagaaaaaaacaacccaatcaacgggctaaggatatgaaaagacccttctcaaaagaagacattgatgcagccaacaaacacatgaaaaaatgctcatcatcactggccatcagagaaatgcaaatcaaaaccacaatgagataccatttcacaccagttagaatggcgatcattaaaaagtcagggaacaacaggtgctggagaggatgtggagaaataggaacacttttacactgttggtgggactgtaaactcattcaaccattgtggaagtcaatgtggcgattcctcaaggatctagaactagaaataccatttgacccagccatcccattactgggtatatacccaaaggattataaatcatgctgctataaagacacatgcacacatatgtttattgcagcactattcacaatagcaaagacttggaaccaacccaaatgtccaacaatgatagactggattaagaaaatgtggcacatatacaccatggaatactatggagccataaaaaggatgagttcatgtcctttgtaggaacatgggtgaagctggaaaccatcattctcagcaaactatcgcaaggacaaaaaccaaacaccacatgttctcactcataggtgggaaatgaacaatgagaacacatggacaaaggaaggggaacatcacccaccagggcctgttgtggggtgcggggagaggggagggatagcattaggagatatacctaatgtaaatgatgagttaatgggtgcagcacaccaacatggcacatgtatacatacgtaacaaacctgcacattgtgcacatgtaccctaaaacttaaattaaaaaaaaaaagttcaaaaaaaaacaaacaaactcctgagtacagtttttgtgctgagctctcaaagagattacagaatgaacaaatcaagattcttccataagactgaagtgctggttaccaactttcctggttaacattcagcaaaagcattttctctctaagtctggaactaggatcaggatattttcttttgtaaaattcacttgttactttcagaccaaagttgtgttttacacaaatcatgcgatcttggcactcctgattgcttggttgaaaaaatatttctgaataaaaaatattttaaatttgccattttt

SEQ ID NO: 60105 - DNA, 636 bp, Homo Sapiens
gttttttttttttttttttatttttgttgttgttgttgttaaaggacaatagtccagagacctaaaacccgaaaaacaatgatggaattaaacctggtactgaagatggcttttgtagattacagccccccacaagctgttcccaatccctttccagtaataaaacttattttttagttgtacaaccaacacataaatatattctttggctaaaaatttaaactatccagaagcaaagagaatataaaccaaaagtctacctttatggttcctcagttcccacattgctttccagaggtaaagatgcttataaacttgatgtattatctttccacaccttttcttctgagacactatgcttttgtatgtaaatgtacacagaaaaatataacttaaaatctatttataaatggcatactacacacattgttctatagcttttttccatttagtaagatctttccaaaaatgtcagtgcttatcaattcatcttattcttaactgctgcacagcattccacacagctagtattccacattgtttagttaatcattcaattcccaaccccttttctagtacaggtgctacttcagactctacacctctattcataaccaaacagtcaaattcctatct

SEQ ID NO: 60106 - DNA, 201 bp, Homo Sapiens
gtcgactttttttttttttttttttttttttttttttttttttttggtataaaaacgagacctttactctggcaataggaattcacatttcaaaagctgatgattggcaaggcgatttaaaaaacatttttatgagtgtaaaaaatagtgttttaaagttggcccttttctaaatacaaaatgtttgtcgacgcggccacg

SEQ ID NO: 60107 - DNA, 339 bp, Homo Sapiens
gaaagcttcatgttccgcacctggggggcggatgttatcaacatgaccacagttccagaggtggttcttgctaaggaggctggaatttgttacgcaagtatcgccatggcgacagattatgactgctggaaggagcacgaggaagcaatgatcaagttccagatgatcctcagtgagggataccatcctttcmatattcaagagtcacccttctacagaggactcctagacttcccatcagtgggrcatggcagaggtgaaatcctgcccctgtctcccttagacctggctrgatactgcttccaacaacccatgcagccaccctgccctgacagctag

SEQ ID NO: 60108 - DNA, 498 bp, Homo Sapiens
tttctttttttttttatttttttattatactttaagttttagggtacatgtgcacattgtgcaggttagttacatatgtatacatgtgccatgctggtgcgctgcacccactaactcaaagaataagacatggggatctttggggtgccattattctccctaccacagtatattaagaaaaatatttaaagatttctaataatgcacagcattgcagaagctacagtgatgatttctctccttttttttatttttttaacatctgctagagtagttaagaaatgtgtacaaaatcatactatcaaggcaacagtcatcctaaaagtgctccaagtaaaaattagattaaaaactacagaactgagaaaacattttagctcaaagatttaaagggaagatggcctatgaaccaggccttagagcataggtaggatctgttaaataggcagagacgagtatagagggtgggggctttgtgcgactaaatggagggaaagt

SEQ ID NO: 60109 - DNA, 131546 bp, Homo Sapiens
gatcattagagaaatgaaaatcaaaaccacaatgaaataccatctcatgccagccagaatggtgattattaaaaagtcaagaaagaacagatgctggtatggctaaggataaataagaatgcttttacggctgtgcgcggtggctcacgcctgtaatcccagcacattgggaggcggaggcaggcagatcacgaggtcaggagatcaagaccatcctggctaacacagtgaaaccccgtctctactaaaaatactaaaaaaattagctgggcgtggtggtgggcccctgtagtcccagctactcgggaggctgaggcaggagaatggcgtgaaccccagaggtggagcttgcagtgagccgagatcgcaccactgcactctagcctgggcgacagagctggactcagcctcaaaaaaaaaaaaaaaagaaaaaaaaaatgcttttacaccattggtgggagtgtaaattagttcaatcattgtggaagacaatgtggcgattcctcaaagacctacaggcagaagtaccatttgtcccagaaatccctttactgggtatatacccaaaggaatataaatcattttcttataaagatacttgcacacgtatgttcattttagcactattcacaatagcaaagaaatggaaacaacccaaatgcccatcaatgatagactggataaagaaaatgtggtacatatacaccacggaataccatgcagtcacaaaaaggaatgagatcatgccctttgcggggacatggatgaagctggaagccattatgcttagcaaactaacgcaggaacagaaaacgaaacaccgcatgttttcacttataagtgggagctaaacagtgagaacacacggacatagggaggggaccaacatacactggggcctctgttggggagttgcggaagggagagcatcaggataaagagttaatggatgtggggcttaatacctaggtgatgggttgataggtgcagcaaaccaccatggcacacatttacctatgtaacaaacctgcatgtcctgcatatgtctccaggaacttaaaataaaataaaataaaatttaaaaaataagaaactaccaaaccatttttcatggctgaattgcgttacattcctcccagcaatattccagttgctctacatctttgtcagtacttggtattttcagttttaataagtatgtggcagcatatttatgtggttttaatttgcatttatatttacttaatgacaactgatgctgacattatacatcttttcatgtgcttgattgctattcatatgttttcttttgtgaggtttctgttaaaattatttccccatatatttatggagatgtcttcttattacattttgataattgcttatatatatatatatatatatatatatatatatatatttaacagtcatatatctgatatacatcttgcaaatattttttcctagtctagggattgtcttttttatttcttaataatgcctctctcaagagtgaaagtttttaattttgatgaagcccaatttataattttttattttatggttctagttttttgtgttctctctaacaaaacttagcttattgcaggtcacaattttttttctgtggtttcttctataggtttaccagtttaggtctatgttccattttttatacctcatgagatatgaattgaggtttctctttttgcatatgattgtccaattgttgtagcagtatttgtttaaaagatatcctttatccattgaattgctttggaacctttgttaatgattgattatatatgtgtgtaagtctatttctgaactttcatcctgttttattaaggcatgaaaaatgtaattttgccaatatcattgatttatagaatcattttgctagtactatactctattgtatactgtggcttcagagtaaatattaaaatctagaaattgtagtcctgcaagttggtttttttccttgaaattgtttgactattttgtgtcatatgcttttcacatatatatacttttttttttttttgagacagcatctcactctgtcacccaggctggagtgcggtggtgtgatcttggctcgctgcaaccttcacctcccgggttcaagcgattctcctgcctcagcttcctgagcagctggaattataggcacgcgcctccacacttggctaatttttatatttttagtagagacgggttttttcccgtctgttggccaggctggtcccgaactcctggcatcaagcgatctgctggcctcagactcccaaagtgttgggattacaggcatgaatcaccacacccagccccacttttcatataaatttaataattaatttaaatatttctactagaaatccttcaggaattttgattttgaacttttatatgtgttttttattattgttattttttgctttattgaattggctaagacctccagcaattcattgaatgaaaagtgttgaaagtggacatccttgtcttatttttgatcctagaggtatttcaaaatttttgcagagagtctaatgttagctgtacgttatttgtagactttttctttaaaaaaatagagacaggttcaccctttttcacccaggttggagtgcagtggtgtgatcaatgcttgacctccttgcctcaagtgattatattgcctcagcctctcaagggattctcctgcctcagcttctcaagtagctaggactacaggtgcctggtatcacacctgacctaaacttttctaaaaaatcagattaagggccaggcatggaggctcacacctgtaatcctggcacgatgggaggccaaggcaagtggacggcttgaggccaagagtttgagaccaatcaggtcaacatggtgaaaacccatctgtgctaaaaatacaaaaattagccaggtgaggtggagcacacctccaatcccagcatacttgggaggctgagacatgagaatcgcttgcacccagaagacagaggttgtggtgagctgaacttgcgccactgcactctagcctgggcaacagagcaagactgtctcaattaaaagaaaaaaattaaaagaaaaaatcagattaaggaagtcttattgtgttcctagtttgaaagttctctgtaaaaattatgaatggattttaaatttaataaaaaatttttcacatctatttatatatactattttaatctttattctgttaatatgggaatttgcgtggttgatttttaaatactaaaccaactctactttcttataagtaaccctatctggtcatgattgaacattgttcgagtttactgctaatatttattatgagacattagtattcattttctcttcttgtaatgctctttccagtgtttggtataaggaatattctggcttaaaaaattagtttggaagtattttattctcctctattttttgtaagtacttgtttagtattgaaattattttttcttaaagaagatattttctttcatattggaagacatctttctaaactttgcagctgtgttgactttcacttctacatgatttcttttttcttcttctcctttttttcttttgagatgccatcttactctgtcacccaggctggagtgcagtggcgtgatcttggcccactgcaacctacgcctcctaggttcaagtgattctcctgcctcagcctcccaagtagctgggattacaggcacacgccaccatgcccggctaatttttgtatttttagtagagatggggtttcactatgttggccaggctggtctcaaactcctgacctcaggtgatccacccaccttggcctcccaaagtggtgggattacaggtgtgagccactgctactggccactactacgtgatttctaacaacctgtttggattcaatattcttcttgcacaactatctgtcctttaggaataatgtgacagtaagagtgaaagtgcaaaaatatagtcagttgtttcatatcattcactaaaagtaattgttctcatgcatgcatttgggagcagtcatcttaagaaaagtttactacagtcaaatgtgtctgaaagacattgttcattatatctctttctcagaaggcagaacacatgtagtacattagagacgtcacaaggtcctgaagaaatgaatttaactttgtataacccaaaggtttccaatatatttctcctagaattctttttacttgcacaatacattttaaaatcactcagaaacgaatgctccatgtacagcagtttgaaaaagcatggactagaaagtactgagactgaaattcattaagctagaaaagagtttaataaaatagcttctcccaaatcatttcagggctgctccatttcagcaacatttctaatctttagctatattccttggtgatgttttacagtatgatgtccaaattgcatgcattttaaatttccataaagtgaatcttagtcattttccttgtagaaaattaacagactaaaattaattgttcatcaatccggagtcttcctcccactccttctctcctcaatgaaagaagaaggagctggaaatagcatgtttcttaactgattatctcaactttaatcatcctctgcactggaaggtctgatgcccacaagatactttcactgttttcagttatgaagaatggtcatttgtataattttgctggagaaaaattgcttctatatacaaaacccaaggaagaatattgcatctgtaatatctaaatacataagtaacctctttttgtcctagaatcttaaaaattggccttttttgatttccaacttttaatttcaggggcacatgtgcaggatgtgcaggtttgttacataggtaaacatgtgccattgtgattagctgcacagatcatctcatcacctaggtataaagcccagcatccattagctattcttcttaatgctccacccttccacaggccccagtgcgtgttgctcccctcaatgtatccatgtgttctcattattcatctcccacttataagtgagaagatgtggtatttggttttctgttcctgagttagtttgctgaggaaaatgggttccagctccatccatgtccctgcaaagggcatgatcttgttcctttttatggctgcatagtattccatagtgtatatgtactacatttaatttatccagtctaacattgacaggctggataaagccacaatttgcaattttttgataagagttttctcctcaattccttcctaattttacaaatttataaaaatgagttctagcatagatttttaaaattcacaatctgtttgaaattaccaaatacatttatcaactttcaatcaaggtgaacagattattctaatgaattttttttctctaagtctctgcacatttttctctctgaggaagaacaattatgtcaggcttctgacaagcttatgactgacaattgattaatattatttttagtgtgtttccaatgctggtctatgatgtgttctgtcatagaaactttacttttctatatcttcagatcttttttccacaatcaagaatagatactttgggattttatttattgcacacctagtaaactggctaatctggtatcttcataggttacgcatatctaatttaagggatagtacttgtttctttcatgcaatgaagactgcaagaatattatatatttttaaaattcttgtatgtttttaattgatgaaaaatgtctaattaattatgtatagattgcaaactgaattactgtaaactccttaagggtgtcaactgtataaccttagcagtcaagcagaatgctgggcacatttaaatggctcaacaaaagtgtcaacagatgataaaggaaggatgattttctgaaaaaaatattaccagtattgcaaccttgtgccatatcatgcatcactgggcattaagagacaaatgagaaagctgggattgaaatattaaagagatattaagaattgacatcattgtccaagcaagagagtatattcaagtggaagtaggatattaggcaagaattatatttagtaatcgcaaatataattcaagatagcaagggctacagccaacaagcaaggcagtcagattgacatttctttagccatttttcttaatttccagacaaatataaatccatcctttttgatcatggttggaactcactgtttttttaaattgcatgaagttgtggtatcctacaattttataacagtctttgtttctaatacaccactttcaagctttcaatgatttgcaaatgaagagactacatatatttcttttgacagtgtctgaagtgttggtataatgcttaacaggagtccctcatcaagtgactattttacataattgaattatctaactagaatcagaggtgaaaagctatgacacagtgaaatgtgaaattattttgcagatcataaacagctttgcaagtatgcaataccatcattatgagttcagcaatctgtcaaagaaaatattaatactggcaaagaatttacctacagggtaacagaaaatgaatacttcttattgatcatgtttctagcaaattattaaaacagcataattcagagcatcaggcacaaactaattttgtgaataaaggcccttaggccacatcctctctattaaggaaagctggccaacattccagatgtacggttagtttttaatgggagggtggtgtgagtaagtgggggatcctgtctcaaagaagtcaagtgacattacccgacactcatgcattgaccttccatgagtggcatggtattgtatttattataaaatggcagcaggttttctgagattaagtagaaaaattggtaagtatttaactactatctagtgacacaactctttaaaaacatcaaatagagaactgaggccagaaaaatagcaataaaaagtcagtttgaaaattttaaaaaaatcttcaaataaacagcatgaaaagaaggaaactgggaaaataaaatctgagatatactgagtaaaatacctttggattgagtagagctattagcgggaaaaaaataaggcaagaatttgaatgaagctcataagaactgaaatgcttggttttaaaagttgaaaaaagaggccttttaaaatattcttaggtagctgattatgaattaaagaggaaacatcacattgaatctaagactttctctttataaagggaatgaaagcttagcagattaatattaatgaacaaactgaatgaatgaataaatgaatgaatgcctactctctatacacaggtgtaattttaattagctgtaagagttaacttgtcaaggcctgtgagattgtaaactagttgaaattgttaggcttcctctccatcctttttttcaaggcctatttttcccttatccattgtatgtgacttttaaaaaaaaacagacttatcctgaactttcaaaaatgcaactaaataataaactcactcatgatttcttcattcaataaatatattttgagtatctatcatgacctgacattgtttcaggtgtctgtaatttaacagtgagaaaaacagataggatatctgacctcatggagctcatagcttagtctaggaattgtatataaaataaataatttcctaaatgaatatataagtatataattataaaccatcatgtgtactgtattagtcagagttctccagaaggacagaattaatggaataaaagagtttcttaggtatttaatgagtttattaagtattaactcacacgatcacaagttcccacaataggcctgctgcaggctgaggagcaaggagagccagtccaagttccaaaactgaagaacttggagtctgatgttcaagggtaggaagcatccagcatgggaaaaagatgtaggctgggaggctttcacattttctgcctgctttataatcgctggcagttgattagatggtgcccatccagattaagtgtaggtctgccttccccagcccactgactcaaatgttaatctcctttggcagcaccctcacagacacacccaggattaatagtttgcatccttcagtctcatcaatttgacactcagtattaaccatcacatgtgctatggaacaatatgatttctgtgagaacatatgactgggttggttagggaagactttcataagaatatagtatctgagagagagctgaagaattagcagataataactatttggggaaacaggcattcataataatttatggagagtgttttaggccaagggcacaaagagtagggcctaagaagcatgttaaaatacttgcttattaatgaattatattgtattttctcaaggattgtttttattttaatggagaacttttccccttctttgactgtattataagtgatctaacaaatttttctcattataattcaagcagcttagaattatacatgttaaaaatatataataaaatgcataattatatacattattttataattgtgagtggaaaatcgttatctcaatttcctaaaaatacttattattgcattgttatgcattaagacataaatttcatacatgtgcacacacactttattttctctaaaatggtttcatactatatgcagcaatttgcaacttgcttttttacttaacagtatgacttgaacactttccctgccagtatgtatagtcattattcatctattttatgtacacatgtcattcatatacatatgatatgtgaatatataaattcataaatgttaatacgtatgatacatgaattcatatatagtatatatgtgatgtgtgagatattgttacatatatactgactatatcatgatttctataaccactgttgtataaatgcacatctagattgtttacaaggtttttttattttgggtgatgcagccaaacatattcttgcacacaaaagtttttggatctgtatgagtaattttttagaaaaaagtttctggaattagaattacagcttcaaagtacaaattttaaaaatttgacagctattataaccaaattctattcctttacaagaagactttttattagctaaaatgtacaaggatagcttgtacattttctgcacacttgacaaactaaatataattatctttaaacttttaacagagggctctgaaatcggaagcatcttctgtacaaaattgactgcttttataattcagtaggtagtatcattgtttggatcaggatatacaaaaaataaaaagtggtaggtattgtgccaaagtagagagggcttgcctagtatggagacattcaaattcgaatccaaataccaccacagccaaatgcaatatagacctgggctggagtccatcagctggaactcacagaagtaaagagtctcaagaagaagataactggtcccaattgttcattgtccttaaatcattacaattggctgtccatccaacatctcatatacagaaggtgggctttgtctctgaatcaggctgctacacccacaaatatgaaaattccttgttaagaattgcgaggttggaatttcacttgctgacatcttagaatgtggtaaattttttcttactcctagagcagtcaatcaacataatagaggaaaaataatacatatttaaagggatctattatgcttcaattaaattgcatgttcaataatgaaacaaatggccaggtgcggtagctcacacctgtaatcccagcactttgggaggccaaggagggcggatcactaggtcaggagttagagaccagcctggccaacatggtgaaaccctgtctctactaaaagaatacaaaaattagctgggcatggtggtgtgcccctgtaatcctagctacttgggagcctgaggcaggagaattgcttgaacccaggaggccgaggttgcagtgagcagagattgcaccactgcactctggcctgggcgacagagcaagactcggtctcaaaaataaaatgaaataaaagaaacaaacactttaataatacttactctgtataatgctttgtacagatccagcatattaactaagaaaatggattaattacctttccagtaaaattccatgaaactgatgagtttttaaaaattctattcctttttgttttgtagaaacataatataatgtttcaaatgacggtgttctgtcttatgaattgattgaattcaattcattcaaaacattgaaaagtaggactgttttgtagattatttgaaaaaaattactttcaatgcatgaatgttttcccagcctagaacattccctctctattgttcccaaacctagtccaaactatatcattgacatatttgaaagccataagtatgaggaacagctggacaagttactgatctcaatgaatacattttcctgctttgcaccccaattctttccctgttgaggagccttaaaaattttcttagccagaggaagtaagagataaaatttaattttctccatctcagcatatctactttaatgagctccccaggcttctttctagatttgcctagataactggataataacaagaattctcacagaatgtcttttatgattaaaaaaattttacctgtggataaaatcataaaattggtaaaattggatgggagagtcacctgtaggggcagtgttaacttcaaagtcagtgggtgggtctgtgttgccaattcatctcagccatttgtggatgacttctggtcaactaataaaaactggtttgttgtgtgcattagatgagatagaatgtgtacggcacccagcactgggccagcacatagctattaataaatgttactggataggaaaagattaaaacaattttttttgtttctttctttctcttccctgtggataaccacagtggttctgactccctatgcaactgctccattttccctctccactttctatgcagccttttgaaagaatggacttctcagtgggaattggtcttctgtgaaagattcatgaggactgcattcaaaacaactttatacccatgctttcaatctgacacattgtttcacttgacaaatctctccttttaccactcatattgtttgatatggatcatcattatcatcatcttctgcaagtttggagaatctcctaacctctctcctatcccctccaaccaactaaaaagcagcttctggcaggctaaaaagtcaggtgatcgtgtccatattaaaatggtggttatctgtttgacagacctatggagctcaacatgcacagcagtattccagtgtaaagtggaaatggtgcatatgtgattagatctgagcaaatccagaaggtagaaaaataaaagcagatgactcaaactgtcatggtattactttctactgcttcattgcttctccctccactcgtatctttgaagtaggactagtttttatctgtaactgtattgtatattagcagagttgatccaggaagtagtgaggaaatcctttaaatagcgctttagattgtgcctttggtcatttacttcaagtgggaagaaggcctgagatacaaatctacagatttaagaacagaggctaatatattgctcaaatggtcaagaatatggaaagaacaaatattataaactttacaagggatgaggggtatatagtaagggtatagagagtgtgatgagatctatatcccatacaaatgtttatcagaggtctacaactgactagaggggtctccaaggcactctttccagattttccttcaggtttggggcctcattcccccaactactggtcatgttggccaccactgataaatcatggctgtttccttctcttagaattaccctgaatgataagagctgactcactcaaggatggcttccctgtccaggggcagaccacattcaattactagtaaatgtagaggtaaagccccacccctcaccttaatgtaatttcactttgaaagcccccaaataaagagctccctgtggaatcaactgaggcttctgcttaaattgtactgttttttccttttagagttaccaaagcaggctgggtatggtggctcatgcctgtaatcccatcacctttggaggtcaatgcaggcagatcacttaaggccaggagttcaagaccagcctggccaacatggtgaagccccatctctactaaaatacaaaaattagccagctgtggtggcacgcacctgtaatcccagctacttgggaggctgaggtaggatcgcttgagcccaggaggtggaagttgcagtgagctgagattgtgccactgcactccagcctgggcaacagagccagaccctatctcaaaaaaaattatcaaaacaaaactcccacagataagaataactcttaaatattccctaagaggttcatttctttgtttgtattattccatttcaagttaacaaataacaagtatatttgataatttgattgattatggacagatgtgtctcaaatttgagtgaggctgatctaatggctcaaaagacatgtggctacctataaatgaatagccttttatttatgaattgtaacataatttgtaaggacttgttttccagagttggcaaaaaaaacaagagaagttttaaacatgacttaagggaggttgtcgccaatgcagtaagaaatgttgattccaatctgactgagaattagagatcataaatatccatctggctacttggaaagttgagctatttaccttttagctgtcatcatccgtgatgaacattcccaggacttcagacaagcatttgcattattagtgttaggacagactctcagagcttctgagatccatacaattgtcacatgtgtatgaagaaagattaaaaaattaactgaagaaggattttatgaaagagagtgaaaggaatgtcagctaccactatttaagatgctttttaaggatgttcctttctttctttgactctgtattggagccaaaaattttctgtatgagggtgttttatgatggttgctacagttccagatcacattccaggcataaagtcctggaaatgttcattgcacatggtgcaccttagggagctcatgggaggaattctcactctgtattaacatatactattgtatttatttatttaacttttaagttcagagatgcaggtttgttacacaggtaaacttgtgtcatgggggtttgttgtacagattattttatcacccaggtattaagcctagtagccatgagttatttttcctgatcctctccctcctcccaccctccagattttttttttttttttttttttgatatggagtcttgcgctgttgcccaggctggagtgcagtggtgtgatcttggctcactgtaagccccacctcctgggttcacgccattctccttcctcagtctcctgagtagctgggactacaggcacccgccaccatgcctggctaattttttgtatttttttagtagagatggggtttcactgtgtaagccaggatggtctctatctcctgacctcatgatccgcctgcctcggcctcccaaagtgctgggattacaggcgtgagccaccatgcccggccccaccctccacattttgaaaggccgtagtgcatgttgtttccctcaatgtgcccatgtgttctcatcattttgttcccacttataaatgagagcaagcagtatttagttgtctgttcctgtgttagtttgctgaggaagtggcctccagttccatcattcttttttatggctgcatagtattccatgctgtatgtttagcacattttctttatctagcttaccattatgggtgtttagcacagagctcccagaggaaggggcaggctacattatttattagataaaggattttataagattttccacaaaaatcagagcatagtactatttcagaagttcataatatttttatataaagatttttcttccaccaacaggatgtaagatgcatgatggatgcctgcatgagtagttgtccacattcaaggtgtttgttatagttttttgagttacatgagggatggttatcacttatcatttggcatgatgttacaaaattctagctacagtggattaaacaaaaaggaatttatttttgcataatgtaagaattttttgaggcaagtagtccaggtctaagatggcagtccaatgagaacatccatattttagtcttcctatagctttatcctcttggtatgtggcttttattctgatgattttatgatagttgctacaattccagaccacattgcaggcataaagaaaactgaagaaacaagaaagagcatgaaaattttgttttagtaatacaaaacgtttccaggaaccctgagtagaatatggcttatatctcattgagcaacaatgtgtcacatggtgatatggtttggcactgtgtccctacccatagctcatctggaattgtaatctgaattgtaacccccaagtgtcaagggagggacatggtgggaggggattgggtcatgggggtggtttctctcatgttgttctcatgatagtcagtgagttttcacgagatctggttgtttggtaagtgtctggtgtgtcccctgagctctctttcttgcctgctgccatgtaagatatgtcttgcttcccctttgccttctgccataattgtaagtttcctgtggcctcctcagccatgcagaactgtaagtcaataaagcctcttctttataaattacccaggctcaggtagtatctttatagcagtgtggaaattgactaatacagagaattggtaccaaagtggggtactgctataaagataacatgaaaatgtggaagttactctggaactgggtaacaggcagaggctggagcagtttggaggtctcagaagaagacaggaagatgtaggaaagtttggaacttcctagagatttgttgaatggttttgaccaaaatgctgatattgttatggacaatgaaatccaggctgaggtggtctcagatggagatgaggaacttacgtttaaacgggaagcagaatataaaagtttggaaaatttgcagtctggccatgtggtagaaaagaaaaaccccattttctgaagagaaattcaagttggctatagaaatttgcataagtgatgaaccaaatgttaatagccaagacaatggggaaaatgtctccaagccatgtcagaaatcttcacagcagcccctcccatcacaggcctggaggcctaggaggaaaaaatgtttttgtgggccaggcacagggcctcactgctctgtgagcctcaggacttggtgtcctgtgttccaggccctccagctcaagccatggctaaaatgtgacacagtacagctcaagctatcacttcataaggtgcaaggccaaaggcttggtagcttccacatggtgttgggcccgcgagtgcatagaagacaaaagttgagctttgggagcctccacctagatttcagaggaggtatggaaatgcctggatgtccaggcagaagtctgctgcagaggtccctcacggagaacctctgccagggcagtgcagaagggaaatgtggggttggagaccctatgcagagtacttactggggcacagccaagtgaagctgtgagaagagggccaccatcctccagaccccagaatggtaggttcactgacagtttgcagtgtgccctggaaaagccacaggcattcaacgccagcctgtgaaagcggctttaggggctgtatcctgaaaagccacataggcgaagctgcccaaggccatgggagcccaccttttgcatcagcattccctgcatgtgagatatggactcaaaagaggttatttcagagctttaagatttaatgactgctttgctaggttttggacttgcatggggctggtaaaccttttgttttgtcccatttctcccatttggaatgggaacatttacccaatgcctgtacccccattgtatcttcaaagtaaatgacttgttttttattttacaggcttataggtggaagggacttgacttgtcttacgtgagactttggacttggacttttcagttaaggtgctggaatgagttaagacttgggggactgctgggaaggcatgattggttttgatatgtgaaaataacatgagattttggagggtcagggtggaataatttggcttggctctgtttccccacccaaatctcatctggaattgtaatccccacatgttgaggtagggacctggtgggaggggattggatcatggggtgattccctccatgctgttcttgtgatagtgagtgaattttcatgagatctggttgtttgataagtgcctggtgcttcccctctgctctctcttgtgcctgctgccatttaagacatgacttggttccccttcaccttctgctatgactgtaagtttcctgaggcttccctagtcatgcagaactgtgtcagttagtcagctaaacctcttttttaaataagttacccagtcccaggtagtatctttatagtagtgtgaaaacagactaatacacatggccacatagatgcaagagaggctgataaatgttgattttagttggcatattgagagtatgtataaagtctgtaaaaatgaaagggagtatagatattaggtaggcaatagtggttctgacaaaatggattttcacttctaagtacatcactactattttacctttcttcctcaaactatgcccaccattgctagattttatggacttacatcattgtctacttaaacaccaaaaagttggtgatgcagttttctacagtaattttttgcatataggcagagttagagtatgtgtaaatatctctctaggtgcccatttttatgagaggagccactttcaatgaagaggttgccaaattatctccttaacagaactgccaaatgtgtaatagtgatttaaaatgaacaaattattatgttaagaatgattccctattagataaccttgaaaactcaccttttgattaatgtcatgcaaataaaatcattctttaaaccagagaaattatctttaccatatatgttgcatggctatttttttaaaattacaattttttataactgataaaattcagcttggtgagagcaattttaattcccctgtatttcagtcacaaaagtgatatctctggcttcattagcagtggaattacttgctcttcttatgacttaatttcttgctgaatttcacaggcatgctcttcctacagaggaaagttacaaagaacaaacttcccagatggctaaatttcattgaaaaagagtcatctaggaatagaacaatttgaaaagaagttcaatatttgtttactgccaccatcaactccttctgtcagacaaaaatgtaaaaaagtcaaatgaaagcttatgacattctcaaattaaaaaatgagtgtgttattgatttcttatttacaaaaaaaatcagcaaaatgttgtaactgaaattatctaattttaaaattggctcatttctattaatcaagtagaaaagtttttgatgtgtctagatggatatttagcagtagattaccatgtggacagttggacagtttttcttttttttttaactaatgcattagaatgtatttgttgttgttttgttattgttaagccaagtgttatttaaaagtacagaagaatggtagcacactaaaaactgtagcaggggataaaggtagaaaaaagacattttagttgaattttgatttacattgtgcttaataagcaatctaaattcacccagacttttttttagtcatttcaggatattgaatggcaaagtattaagctgaagagaaagattaatatttgaaaacagcatttttacactgtaaagttttgaacaaaaagaaataacctagaaaatcacgttttccagggaacttaaaattaacccagaaaattaaataaaatttaccacttggtttcgccctcccttaatatcttttaaattcattaatggtccaatagatgttgtaattaaggtcatccaagtaacttgtcaactaagacgttttgctggggtaatcttcattgtcaaaaggaaataattgattgaaatagccattgagataattaacacacacagacagatatgcagtgtaaaaaaatgcccttgcccttggtgctaaccttgttggataagttgagtgggtttttaattctttctgattgccgtgtttgtttttctagacttattcagttatattaattctttgctttggttttagaattccagcttctcggtgcaatgtttgtgtatacatgcattttctacttagtgaaaaaaaaatgggagcatgagtaaatgcttgtgaagaagcaaaacaaaataaaaactaatgttttgttttttttctatttgccatattgtctgatcaaaaaattctactagcaactttatgaaaaaatgaaatgtcactatgaaataaattgatgggattatatttatctaagaattataagcattctcatttaatggtttgtcaattttctgccatgtaaaccaggtactcagaaaagaagtttttccttaacaaaatcaaacattttataaagtttgtattcagtgtttctctaacccctttctgtcctaacttagtactctcgcattctttttgggtgcctttcataccataatctcatatcttcttctgctttctgtctaccaagcaacccccacagtagaggctcttcctagtagggatttcataaatattcattgaataaatgattttgggggtagttttctgaccttcagttatagcaagattgtgggatcttgaattcagaagctgaaacaaaggatgcctgattgtggtggaaataggagtccccttggtgggctggttttacagtatggtcctggaagtatttctggaagtacaccatagagaagttctttaattctaccaataattttgaaaacaccctattcctggtacaaaactctttgttgtttaaaatagccagagcgttttctgttacagtgagtcaataaagtacttgataccaaaagacattacaagcaacagacctcaagtttgtgataagagatttattatttgatctagttagataagaaggcagtgaggagcaggttaacattagacaggaaacatttttaatccatgactccaatcattaaaatattgagaacagatcaaatgatggttgctctagcatatcacaatgggcataagttatacaaagactatagagtgagatagttccagaaacctctattggagtgtaaatgatagaatcagagctttaaattctatactcaaggcaccagagattttctatgactattcctaaaataatttcttatagccactgggtttatgtagatatttctcaggtttagaatctgatttttttatttctggaattttaacatagaccaggtttacagtctcagtgtgtttcttctgaaagttaggatttatttggaaaaaatagaatattatgatatggaatacggcattttggaggcttcacgtatatctcagttcctcaaactccaaaatttcccagaacttttcatatcaatagaatcgatccctcttcattggtttcatgacctggtttcactggtttcaaaagactctgcactaaattcatgagcttattatcttgcaggcagatgcaaattctcatttctgatccctgtcacctctcactgtcctcttctataactagagtcagaatgccctacaattgtaaatttaaacctcagaggaaagggttacacattaaaaactttgcaaaactttaaaaacttataccagcccaaatctggaaagcttgtggtgcaatagacactgagggtactttaccagggagaggaaaacatggctaaatttattaatttggagctcttaaaaaatgttataccctctgcttgagtagctgagagaagcttggattgttgactaaaactagactaaatgggagcctgtattgaatgaagcttgggagtctagaaattattatgtataaggtagagaaagtaatctaaatatttagaaagaaaaggcccacaggtttttttttttttttcatcaaaacactaagagataaattgacaaggaaggcactacctttcttaaataattctgtagtggctgtatttttctagacttaaaaagaagaaaaaggtaggagaagctgccaataaaatgaactcctgatttcaataaagaagttaacttaattactactgactaagtgagcatggttaccaagataagatatgacccaagaaatcagaatggtttgaatttaaccaaactttgaagatagttaatcgatcatgcaatatctaggactgaaaaagatgaggagtctacaaagttctctaatgggagagtagccaggaacacttggggaagacctattacatatacatatacatatacatatacatatacatatacatatacatatacatatttcaaatatttctcttgtccttctgcaaacctgtagccaaagtaatattggactgggtaaagtgatagacccaggcttttatacatatatgtatatatgtatcatttttttctgaaaatagaaagctgatgaacagtttcagaatgccattgaggactaccaatcaaagaaaagtgaggaaattaaattattcaggcaaatggagttttgaacccaatctacattttacagtgggcctggtagatctggaaaaaagtttttgtggttatttacttagctgctgagttcatatcaggaataaatatattcagcaacagcatcaccacattgcctcttgaactagtaaaggctcttacagtaaaaaaatggccagctcctagaatattctatttttactcaaaaagtacatcaaagtcaatatctgttccctggagggaaccagagagattagtggcaccatcaacgtcttaaaagatgcatgtaaaaataatatttttatatacccacttaaattgacaatttgacctgtacagaagataggaaaatcttgtaggacagtagattaaaatacactttatcaggagatggctacaattgcagatgctctttcacatgtggtatatttggaaaacaaagtaaatatagctgatggtgtctatgtgacttcatgtgaattttttctctgagttaataaacattttacttttactttattagtacagcagtatgctttcttcatcctgccttagggttatagcaactttccacctctgctaattgtactgtctaaggaatgtaatcattttgccatacttctgaggatcatgtttatcaattacatggatgatatcatgttatagttcactggtgaggagaacatagcaagatgagttgataaaacatgtgaaaaaggggttacaagtaaattctatgcatgatatgttgggaattgataattttataattcagtttaaaagttggcaaactttttctatgaagaattagatagtagcttttccacaacatgtttgcctccagaacacatgctgctaaaaccacccctaaaagccaaaatgcaaaggaagagattcttaacagcattattgttattggacacatagatctgggaaagtccatgactactggccatctgatccccaaatgtgattgtatcaacaaaagaaccatttaaaaattttagaaggaggctgctgaggtgcaaaagtgttcccttaaaggtgtctgggtcttacataaactgaaagctgagcatgaatgcgatatcaccattgaaatctccttgtggaattttgagatcagcaactactatgtcactgtcattgacaccccaagaaacagagactttatcaaaaacatgattacaggaggatctcaggcaaattcaaagctgctgtctccaaggatgagccaacctgtgatcatgcccttcttggttacactgtgggtgtgaaacaattgttggctttaataaaatggatttcgctgagccaccctatagccaggagagatatgaggagatcattaaggaagtcagcacttatattaagaagactggctacaaacttgacatagtagcatttgtgctaatttctggttggaatgttaataacgtgctggaactgcgatggttaatattgagtgtcaacttgattggactgaaggatgcaatgtattgtgtgtccctaagggtgttgctaaaagagattaacatttgaatcaagggactgggagaagcagacccacccttaatctgggtgggcaccatctaatcagctgccagtgtggctagaataaaagcaggcagagaaacgtgaaaggactagactggctaagtcttctggcctccatctttctcccataattgatgcttcctgtcctctaacatcagactccaagttctttagcttttggaatcttgtacctacaccagtggtttgcaggggctcctgggccttcagtcacagactgaaggctgcactgttagctttcctacttttgaggttttgggacttgaattggcttccttgctcctcagcttgcagatggcattttgtggaacttcaccctgtgattgtgtgagtcaatactccttaataaactccctttcatatacatctatattagtccatcttcacaccgctggtaaagacatacccaagactgggaaatttacaaaagaaagagttttaatggatttatagttccaagtgactgggaggccttacaatcatggtggaaggcaaggaggagcaagccacgtcttacactgatggcagcaggcaaagaaagagagcttgtgcaggaaaactcccccttataaaaccatcagatctcatgagacatactcaccatcatgagaacagcacgggaaagacccacccccatgattcaaccacctcccaccaggtcccacccacaacatgtgagaattcaagatgagatttgggtgaggacacagccgaaccacataaacatctattctattagtcctgtccatctagagaaccctgactaatatgagaaccaagtgctcacacgtcttgttgcaagggatggagagccacctgaaagatgtcagtgccagtggaactacactgcctcaagctctggacgaccaactcttccaactaacaagcccttctatctgcctctccaagatgtctacaaaattggttgtattgatattgtccctgtgggcctagtggagacatgttctcaagcccagcatggtggtcatctttgctccagtcaatgttacaactgaagtaaagtctgctaaaatgcaacatgaatcttttgagtgaagccttttctggggacaatatgggcttcaatgtcaaaaatgtgtctgtcaaagatatttgttgtgacaatgttgctggtggcagcaaaaatgacctgcaaatggaagcagctggattcactgctcaggtgattatcctgaacaagccagaccaaatcactggtggctatgtccctgtactggattgccacacagctcacattgtttgcacgtctgctgagctgaaggaaaagattgaatactattctggtaataagctggaagatggccctaaattcttgaaatctgatgatgctgccattgttgatatggttcctgacaagcccatgtgtgttgacagcctctctgactattctcttctgggtcgttttgctgttcatgatatgagatagacagttactactggtgtcatcaaagcagtggacaagaaagcttctgaagctgtcaaagtcaccaagtctacccagaagcctcagaaggctaaatgaatattatccctaatacctaccaccccaatcttaatcagtaaaagaatgacctcagaactttttgtttcaattggtcatttaagtttaacagtaaaagattggttaatgaaaacaatgcatcagaaaagcttcagaaggaaaggagaatgttttgcggatccatttttttttttaatgtgtggtagttttaagttattagtttttaaaatcagtgcttttattttattttatttttttttggagacagagtctcacacagtctcccaggcagtggcatgatctcgtctcactgcaacctcacctccagggttcaagcaattctcttgcctcagtctcccgattagctgagattacagacaccctaaaatcagtactttttaatgaaaacaaccaaaaacctgtcacagaattttgagacctgttaaaactaagtttaatcagaaaaaaaagagtcagatagtaatattaaaagttttgtaggccaggagactaaatcaagaatattagataatctaaggatattaaataactaatgtaacaagagagaaaacaaatgtccatttttattgatgaaattaaaaaataatataactgagtacatattttgtaatgtaattgaataagaaaaagtgaatttttttttattttggggggcacatattatttcacttatttgatgttcaaaattagtggttcatatttcaaaattgattaaaaatattcatctgttcatgataatatgtaataagagttggtgtatttcatctttgaaaatgtctttttatacaaatagttactgccaaatactgatataaatctatgagcatatgattttaactgagcatattcaatgcttgagaggcagttatatatttctattagatttttctcttgatatttaccatttagcatgtcattttattgcagatttatcatttctaatcgaaggttaagtggaaggtctgcaattgctcagtcaagtggattctgaaatacagatatttcctttgcatttatatagaggttcccaagacactgctggaactgtagtttgatcttgtaaaatatacccactacaactttgtatgagaatggatttctcactttttaaaatctgatagcatcgtaagtatacaaagtagcttaacattacacgtgattccaacaacatttagttgtcattgaaataactttgccataagttttgcatacatgttgttttggcttgaaattttaggtttaattcattaagaaaaataaatctgtagtgaaaactaaattccaaagccattcagtgttcaataatagtagttgaagggatttcttttcacttataaagaaattcattctctgcttgaactaaatatgcaataaaattttaagccaccaagatgttgtatgttagggcatgttaggatatttaacttctatttctgacaaaaattcttggaaactggtgattgtcaagttctcaaaagtgatgaagttcactgttgacactacatgaaaaagccaaatgttttctggaatgtacttgctgttgaattcaatgaataaccattggctttaaacatcttacatttttataactttttaatttgtccaagtgaacacttttagctctaaacatattttaccactataaatttggaaatattatcagattcccctttaatttgtgctaaattaatgttcttcttaaattcttttataatgttcttacttggtgtttttctactcagcttattcagtgaacttaatttttcagttgattcacattcagcattgacactttaaacaactgagtgatagagtggtcccttggtgcctgcaggggtttgatcacaggatccccttggatatcaaaattcaaggatgctgaagtcccctataaacaatggtatagtatttgtatataacctatggaaatcttcctgtatactttgttttattttttattttattttactttattattattttttagagatagagtctcactctgttacccaggctggagtgaagtggtataatcatagcttactgcaacctcaaactcatgggcaaaagcaatcctctcaccccagcctctcaagtagatggaactacaggtatgtataccagcctggctaatttttaattttttttttgtagagatggagtcttgcccaggctggtctcaaattccagatctcaaatgatcctccctttggcctcccaaagtgctgggattacaggtataagccatttcactgaaccaccttccatatactttaaatcatctctagattacttataatacctaacacaatgtaaatgccgtgttaaagtttctaaatatattccataataatttttatctgtgttattttttagtttattttaaagtttctaaatatattctatactaaattgtttatttgtgttattttttattattgtattgttactttaaaaaattactttgtttgggattcagggggtgttttgcaggtttgttacatagatatatagcataagggtgaggtttgtgtttctagtgtatccatcacccaaataatgactattgtacttgataggtaacttttaaactcttaaccccctcctatcccgcccccccaaccttttggtgtctccagtgtctattatttccatctctatgttcatatattcccactctttagctcctgcttacaagtgagaatatgagatatttgattttctttttctgagttattcacgtgggagaatggctttctcctttgttgctgcaaaggacatgactattattttttaatggttgcatagtattccatggtgtatgtatacaacattttctttgtccagtccactgtggatgggcacacgttagttttattgctttgctactgtgaatagtgctgagataaacatactagtgcaggggtcttttttatataataatttctttttctttgggtagacactccatagtaggattgctggattgaatgtagttccattcgtagttatttcagatatctacatgttgttttccctagaggctgaactaatttacattcccaccaacagtggaattcctttttcttctcatccttgtcatctgttgtgcacgtgtgtgtgtgttttacttctttttttaatgaacgttttgactggtgtaagatatctcagagtggttttaacttgcattttcctgataattagtgatgttgaacctttttgcatgtgtttcttggccacttgtatttcttcttttgagaaatgcctgttcatgtcttttgcctagtttttagtttggttgtttgctttttcttgttgagttgtttgagttccttatagatactggatattagtcctttgctggaggcataatttgcatgtattttctcctgttctatatgttgttggttcactctgttgattatttcttttgcagcatgaaagctttttagtttaattaagtcccatttgtatttttgttgttgttgttgcctttgcttctgggtccttcattataaattctttgcctaggctaatgtccagaagagtttttcctagagttttgttcagaagttttatagtttcaggtgttacatttaagtcttttatccatcttgagataattttgtatatggtgagagataggggtccagtttcattcttctgcacttgaccaaccaattttccaagcaccatttatggaatccagtgtctttcctccattgtttatttttgtcacttttgttgaagatcagttgtttgcaagtattttgttttatttatggtttctctactttgttccattgatctatgtgtctacttttctgccagtaccatgctgttttagttactatagccttgtaggataatttgacatcaggcagtgtgatgcctctggatttgttctttctgcttaggattgccttggctattcaggctttttgttgttattgttccatatgaattttaggattttttttctaattctataaagaatgttgttggtattttgataaaaattgctttgaatctctagaatgctttgggtggcatggtcctattaatgatattgattcttctaatccattgcatgggatgtttctccatttgttgtgttatctaccatttctttcatcaatattttatagttctccctgcagagatcattcactttttggttaaaagtattctcacattttttgtggctattagaaatgggattgtatttttgatttggttctcagctacaatgttactgttgtatagcaatactactgacttctgtacattaattttgtatcctgaaactttcctgaagttgtttatcaaatctaggagtcttttggagaaagctttagtttttttttttttcctagatgtatgatcacgttgtcagcaaatagataattttatttcttctctttcattttggatgctttttttttttctcttgcctgattgctctgactaggacttccagtactatattgaatagtagtggtgatggtggacatccttgtcttgttccagttcttaggcaaaacattttcaacttttctttattctgtataatggaggctgtaagactgtcatatatggttgttattattttgagttatgtttctttgatgtcttgtttgttgagattttttttatcatgaagggatgttggttttattaaatgctttttctggatccactgggatgattatatggtttttgttcttagtttctgtttatgtgatgaatcacatttattgatttgcatatgttgaaccatcattgcatctctagaataaagcccacttgatcataagaagttatctttttgatgtgctgttaaattttgtttgtcaatattttgttaattatttttgcatatttcatcagggatattgggctgtaattttttgtgtgtgtgtgttcccttgcttgattttggtatcagggtgatactgtatttatagaatgagttagaaaagagtcccttcttgatttttggaaatagtttaagtaagattggtattagctcttctttgcacatctggtaaaatttggctgtgaattcatattgtcctggagtttagttttttggaagtttttttttattactgatttgatttcataattcattactggtcttttcaggatttctatttcatactggttcaatatggggataatatattgttccagaaattcactcatttcctccaggttttctaatttgtgtgcataaaggtgttcatagtaatcaccaatgacctttcatatttctatggtatcagttgtaacatcatctttgtcaagtctgactgtgcttatttgaatcgtctcttttttttttcttggttaatctaagtagcactgtcagttttgtttaacctttcaaaaaatcagcttttcatttcattgatcctttttttttttttttttggtcacaatgtcatttatttctgctctgatctttgttatttctttttttctgctagctttaggttaggtatgttcttgttttttcagttccttgaggtatgacattgtgttgttaatttgaaatctttccacctgcttgatgtaggcattttgtgctataaactttcctcttagcgttgcttttgctgtatcccttaggatttggcacattgtgcctctattttccttcatttcaaaaaaattttgaattcgactttcattttattgtttatccaaaagttgttcaagagtaagttgcttagtttccgtgcacttgtgtagttctgagaattcctcttggtattcatttctaattttattccattgtgttctaaaaaagtatttgatatactttcaagtttttgaatttattgagacttgctttatataaggtcaagcatatggttgattttggagaatgttccatgatcaaatcagaagaatgtattttctgtagttgttgggtagaatgttctgtaaatgtctattaggtatattgggcctacagtctagtttcagtccagagtttctttgttgattttctgctttgatgatatgtctagtggtgtcagtgggatgttgaagtcccctactattattgcattcctggtaatatgttttcctaggtctagaagtatttatggtaagaatctgggtgcttcaatgttgggtgcatatattttacgtagttataattttttgttttattgaagcctttattgttatataattcccttgtctttattttacagttgcggtttaaagtctgtttctcatatcagatatgagatctgatatcagatatgagattctcatatcagatataagatatgagatctgatatcagatatgagattctcatatctgatatgagaatggctatttctactcacttttgttttccatttacatgatatatctttttccacctctttactttgagcctgtaagtgtccttagctataaggtggatctcctgtaggtaacagatggtgggatcgtatgttttatccaatttgctagtctaagtcttttaagtggagaatttaagccatttatattcaaggttaatgttgatatgtggggttttgttcttgtcatagtttgttagctacttgccttggaatctcaattgtaattacctatagaatctgtgagctttctattatgtgtgctttgatattggtgagtattttcctttcatttccgtgttaaaactcctttgagcatttcttgtaggactggtatagtggtgttgaattctcttagcatctccttccctgagaaatacttttttctccttcatctatgaagcttattttgataggatatactattggctggctttttcttttatttgagccggtaaaaatagggcttcaatctcttctggctccaaaagtttctgctgaaaactctaatattagtctgatgggatttcttttatagctgatttggtgtttttctctggctacttttaggatttgctccttcacgttaaccttagatagcctggtgagtatataacttggtaatgttcatcttgtgtagtatctccaagatattctctggattttgtatatctgcatatctacatctttagcaagatccaggaaattttcctgaattattttcttaagtaattattttctaaacttcttactttttctttttctccttcaggaatggctatgaatcacaagtttggttgccttataaaatgttgtgtttctcaaaagctttgtcatttttaaaaattctttttcctttatcttttctgactgggtttattcaaaagattggtcttcaaggtcttaaattatttcttctgcttggtctagtctcttgttaaagctttcaattgcattttgaaattgtgtccatgaactttttatttccagaagttctctctgttgttgatatgtttttaaagatatgtgtgaaaaacaacccaagaattgtttttctggtttatgttggttttcaactttcccttggatgtcattgagcttccttataatctatgttttgaattctatgcctgtcatttaaaatgtttcattttggttagaatccattgctagggagttagtgtggttcttttgggggtgtgtcacaacattctgtttcttcatgttgctggagttcttggctggttcctgcttatctttcagaggttgtgattcttatttttgaatttactttcgttgggatgggggtttttccccctcgcttgctggtgtgactgtagagcatgttgggtagagtcttttggctttgcttctattgccctgtgcgcttctgttatagttttatatcagattttgcagtcacacttacaggtcagtagatgacactaacaggtaagagccagctatggcaaaagcagatgggtatgtactagatctttgtttactgtgtggtgcattctggtgacacagctgggcaggcctggatcacctggcttgcccatgaatattccagtgatgagcacaggaactaatcctgatgggagtggctcaggagctcctggtgaaatatgatgatgtctgctggaggtaagtgggctgtgctagctttatgtccaagacaggcaggaatgcagtatgggtccccatcacacccctgtgctgggctcttgactctcacatcaaatgcacactgtcatctacctcagccctcagtgtagctaagagccatggaagatagctgtgctgtggttttctgtgagactggtttcagggtggaaccccctccctcaacctacgtattgctttatttttttcttttcttttctttcttttttttttttttttgagaaggagtttcactctcgtcgcccaggctggagtgcaatggcatgatatcggcttactgcaagctccacctcccaggttcatgagattctcctgcctcagtctcctgagtagctgggattacaggcactgccaccatgcctggctaattttttgtatttttagtacagactgggttttgccatgttgggcaggctggtctcaaactcttgacctcaggtgacccacccactttggcctcctaaagtgctgggattacaggtgtgagccactgcgcccagcctgctatttttctatcgttctttccaaatattttcaatggccgttagttgaattcattgatgtagaacccatggatacagcaggccaactgtgttagtaatatccctcaatttgtcaacaaccaatgaaaagcactctaaatcatttttctttaaaaaaattatttgatttttctcctaaagtcctcaactctttgaacaactgttcttgcagaaaggctaatagtcctaaacaagattactttctctgaacatatttccttttctgtagcgatcaatattgtgataaatgctgaatctggtaatatcaacatacattataatcttttagcacagctatattgttatcatataacgaatacaattcttgttaactaagataacaatatccacacttgattctgcctttaagtgcaaagcccacttttcttgttttcacagaatgggtatgcagtgataataaaaaataaagttgcaatatggagatatacatgttatttgaagagctgtcaagttataactatgtcactgtgatttgtgaactgaatagcagtgaaaagtaatgagagtaccagataaggtctttgtttcacgtactcaactcggcagccatagagaatacataaaccaatgagtactgcttagttaaataaaactttatctccggacactgaaatttgaattttatataattttcattttgtcattccttgtcagaatgaaaaaatgtaccataattacacagaaatattcaagttagattgaaaacctagagactggtcatcagttagtttaaaagaatcatagcgtgtgtgaccatgtcttaaaggatactgagtctgactcagttaattttttagaaaataaatcaacgggctgggcctggtggctcacgtcggtaatcccagcaatttgggaggctgaggtgagtggatcatctgaggtcaggagttcgacaccggcctgaccaacatggtgaaactccatctctactaaaaacacaagaattagtgttgggtgcctgtaatcccacctacttgggaggttgagacaggagaattgcttgaacctgggaggtggaggttacagtgggccaagatcacgccactgcactccagcctgggcgacagagcgagactccatctcaaaaataaataaataaataaataaataaataaataaataaataaataaatggtctgaagtgttaaatgactcatgcaagacacatagtaacagtagagctagaaatcttgttttaaaattttctatgtagtgtatttctctaattacaacatggactttatatatacagtaatgaatacacatttttgtttgtttgctttataatacttgtcactcttttggaaaaaaatttatattaagcataaaagtatccacaaccaatgtacagactaagtagcaataataatagttacaataataaggcaaataccaatgtacctgctattaatcttaagaaagacaagtgatgatggtggcatacctagctttttaaatttaaaatatgatactttcaacactccatgattttttgtgattttagtgtaattaccttttctttttaaaaatagattccctttctcgggttaagaaagttcccttcatttcttagtgtcctaaaggattttctggtactcctaattttggtcctctggcctgaagctcaagttttaggaattcttctctgcagctcattttctgcaactgtgctcatgtctggggtcaagtgacaggaagactgagaaagaaaataagcacctatcctctttagaccaccacttctctattggaaacaaagtttcccttgcctcaaattttaggtaccttttggaccttgctggtgccaatattcctcgtttataccactactgtgagatcacctgaaggctagggcatgagagaaaagaaaaaaaaattagagacaaatggggaaatttccctccacgttctctgagtgtcaggaaacctttccgagtcttcaggagagaacttgagggtttctagaactctctctgttgccacttccatgttttgggctgccttgggccccagctatgttccatggaggagatagtttgtagagtgcttcctcctttgacccagaattaggactagccagcagaacttcttatatttctagctctgcttagagcgaagttcgagacaggcaaccatatttatcttcttctatggaactttttttttttttttttttttttttttgagatggagtctcactctgtcaccccaggctggagtgcagtggcgcgatctaggctcactgcaagttctgcctcccaggttcacaccattctcctgcctcagcctcccgagtagctgggactacaggcgcgtgccaccacgcctggcaaattttttgtatttttaatacagacggggtttcaccaagttagccaggatggtctcaatctcctgacctcatgatcctcccacctcggcctcccaaagtgctgggattgcaggtgtgagccactgtgcgcggcctatggaacattttttttaactaatagaccttttgaaggtattgcccttccctttagggagccttcttttgtgtggaggtgctcactttgatcttccatcttgcttgtctctagattttatttatctcctgtattcaggggcttctgaaatgtcaacctagggaaaatgcctgctttaatgtgctgcatagttctctggaatcaatttttctttgctcttacctctgaggttattccctatttttaaataaactcatccatgacaaaaaggtagattgttttaatattttatatagtattataaatattctctatgtggagtacttttttatacctctagctcaaaacacttgctacaaatggcagttttgatggatttttaaaaaataaaattgatttgtggttttgatatgatgtgcatatgttccaaggaatggctctagtgaacccctagttacattaccttggtgaattaatgaatcagcaactctatctctaatatttcaatttatctctctggaatatttttttctcagatttttttaaacatttgagataaagagaagtcaaattgacttgattttaggtattcacttgatacatgggtatatttgcattagattctagttcatcctcagtgctaatttcaaacaatatgaactcaatgatacatttactgtaatttaagtatcaatgattatgatgaatatgaatttctttggatttgtaaagtccacctctaaatatacttaagtgacaactctggtataaatcgtcttctcattctgtaccctttatccttctgctgtctcctgtcacctaccttcagaaacgtgtctctgttcctacaaaacattgagaaaatgaagtattagaacaaggtggtttcttctggaaagatttgcattttaaccatgataaaagctttaagttatgagtctatgataacaaaacttcaggtaccagagaggattttgagagaaaactcacacgaaaaaattggcctaagattgtggcataatacaaaatgcatggctttcagattttaaaattttgtgttgatttattgaaggaatttaggtgggaaaaggtggttattttctatgatgcctggaggttagcaatacatcctcattccctaataaaacccagtgatgctcagtgtgatttacaagaagagtatttgaggaatagtgaaatatataaagacagcatttttttcataataactaagtcagcagtgtgactccctatggcaaactttatttcaaagtctcataagcctattaattcttcagtaagcggattccactggacagggtattaggtatatctggaaggcttgaaggggtaagttctgaataagttgtaattttagggttttaaattaggtttaacaaagcctgtagggtatttgagtctaatattctctgcacatttgaaaattaatgtttgtggcgtaaaaacatctgggttagagattaagctttctttggtgtaaaacattattataacagtagatatgtaactagagagagaaattgaagtttgtgggtgtgctccagttcagtaggtagtttagttattgcactaattcctcccgcttgcattctctttgtggagtacttggaattccttggtatgtgtggcttcctaagtaatacatctgatcctgatgaaagccaaccagacctatcctcggagggtgaacttactcttagatgttgaaagtgaaagtcaacaaccactctgctgtctgtattagagatatttatcagagcaaataaatgatatgaatatagagcaaactgagtgtcttgggtataaagtaatgatgatcaggcctgtgttaaacatgtcacataatcattgttgactcaattttgcttgatctttggatgtagccagccttgggatgtagccagccttaatcttggatggatcttgctgcacgttttagaatgaagtctgtgagttgccatgaaatgggcttccatgattatgatatagtggctcatcggtttgtttggattcacttaagctgtggtgacagacatgcactgagccagtgaatggtggaaaatatcctctagggctcctcattagtcacactagagactcaaacatcatttaaaacatataagcttcatatgatttgatcatccagtatgtgaattttctttccaaatcaatcaatcgttctctcccacatgcctccatcaaaacaagttatccagtgttacagctcttttagaatttgtctagcaagttctctggtcttcactggaaaacccataaaacattaataataaaactagttttctaaagaacagctactcgtttgctgtctcttctagtagacgtagggagttcaaactgttttcaccattactgcttttgaatccacatagcattatgtctagtggcattctaatctctggtgcttcgaatgatgctcaattaatatgctacagtacttgtgtggtaagagcttcattagatgatgtctgggatctgctcagtgcccaagtttcaagtataggacttaaaacatagttgttacctgatatctgcccttggtaaatgcttcctatttccttctctcatacctacttcctagtgaaaggttgacaagcaggagttatacatccagaatgatcctttattgctcttcttcctgtatttactctgcagagaaacactgaaggatagcatgcacaaagttgtgaaggaaggtgtggcagacagaccctaaggtgagctcccattatccttgccttttagtatttataatgttgtttaacccccttctcctaaatgtgaacaaggcccttgactttcagctaatcagtagaatagggcaaatgagatgacatgtcagccacttgattaggttatgttatattgcaaaggtaaagaaattttgcatatatagttaaggtccccaaaccagtggtttagaagtatcaaaagggaggttatccggagagatcaggtgaaaacccttgacaagatgactgggccttccctgagtgacaaactctcctgctgaccttgaagaaacaagcagctaagatgtgaactgccatggagaatgccaggtggcagggaaccaaaggcagcttctaggagctgagggcctcagtgctacaattgcaagaaattaaattctgccaacaaccacacgaacttggaagagtacccttaatttcaaatgagattgtagcctggttgacacattgattgcagccagtgagactctcaacaaagaacccagttatgttcccagactcctgactcacataaatggagtattttaaagtgttgggccaggcacagtggctcatgcctgtaatcccagcactttgggaggctgaggcaagaggatcacctgaggtcaggagttcaagaccagcctgggcaatgtggtgaaaccctgtctctacaaaaatattaaaaaattagctggcccttgtggcatccgcctataatcccaggtacctgggaggccgaggcaagaaaatcacttgaatccaggaagcggaggttgcagtgagctgatatcgcaccactgcactccagcaatgtaagactccatctcaaaaaatatataaataaataaaatgtatataaaataaacaagtaatgtattttaaaatgttaaatttatggtaatttgttatacaataattaaaagaaatgaatacacaagtaatataggagatttgggattttataatcacagacctgtacccaagagaggtgactacaaactttctgctcacataaaacgtgtggagaaggactcccttcttaatatttatacctgtgagaggggatttgtagccagataggctcaaattatgatcttacctctgccactttataagctgaataatttgtggcaagttctttcacttgttttaacttgtcttctcattagacaaaggggataatagtagtaatgactttgcagtattgtggagatgaaagtgagatatgtcaagtgctgagcccacagttgttcaaaaacactactctccttccccattctttatgtttgccaggtgcctctctcttttgtatacatatttaaattacacgtatacttttagattcagctcatatggtttattggtcacattttctagttcattaactagacttcaagcacctagcagataaggatatgtctcattcttttgtgttcccagcatatagcacaaatgctggcataacacaggtgtccctgtgacactccagctcagttggatctcttctttgaactcaaatgtgtgtgtttgggatggaatgcagtcgattttgtacagaggcttgaggaggtggtgattgatttactagggccgggtggggggattggtttgaccaggtatgccatttacatagcctgggaaaagcctggccttcccatcctagtcttttattatgcaaatgtgccactgcctggagctctgccaggatgcatgcacagtgtggtattacctggaggccgccatgacacgggcacacgtggtgaaaaggagaagagagtgggaaacgccatattgaatgtacttggctttcaggtacagctgccagcatttacatataaaagcttctagtttgcatatttatgcctgactcttcaggctgctttctgttagagaagaaatagtttggggctgctttttattaaaggaaaattccacctagaactcttctaccctttttagctttttactctttctctaccacttattttacaatactgcctttcctatttctttaattttaattttgctcttgctttctgaattttcatgtgtagttcatgtctcccaaacagattataaactcctttagggtaaaacttatttatatccaataccttgtgtgtttgtctgctctcatgctgtgaataaagacatacctgagactgggtaatttataatgaaaaagaggtttaatggactcacagttccacatggctaaggatgtctcacaatcatggcagaaggcgaatgaggcttgttttacatggcaccaggcaagagagcttgtgcaggggaactcccatttgtaaaaccatcggatctcatgacacttattcactaccacaagaacagaatgggggaaacaactcccatagttcaactatctccacctggccccacccttgacacatagggattattacggttcaaggtgagatttgggtgggacacagccaaactatatcaccttgcctaatagtgaaaatatacgtagcatttctaaaaaaataaaagagggacttgaatgggatattacaatcggtcatggacttaaatgttcatcagttaaaataatttgcactcttgtttacttagagattaaataccttgaagcgatgatatttattattaagcaggtgcattgctgcccaatttttaatttttgttttttggatacactgaagtataatatcacttgagtgtcactgaccaaaaattttattgtattatagtgtgaaatctagcttggagattttaatgaatagttagctcttcaagaagtggttaaattggtttttaattaaatttcattttatttgtagtgattaattttaaactaatttaggattagataaatgagagtaatcttgaaatcaagaaactgacttaattatgagaaatagctatttcttacggtgaaatgagaaacaaaatattaatttcatctaagaggacactgttttagctaagataaaattacaaagaaagcatttggggaggaaattttgcatttaaaataaacttaggataaagaacatacgttaactgaaccactgatgaagaaagcttgcagcttaagttttctaactgaaaagcagttaccatttgtgaaccctgaaaatctgagacaggtctcagttaatttaggaagtttattttgccaaggctgaggacacatgcccatgacacaacttcaggaggtcctgacgacatgtgccgaaggtgatcagagcacagtttggttttacattttagggagacatgagacatcaaacaacatatgctaggcatacatgagacaatcaacatatgcaagatgaacattggtttagtctggaaaggcgggacaactcaaagcaaggcaggaagactcgaagtggggatggccttccaggtcatgggtagagaagagacaaatggttgcattcctttgagtttctgttagcctctccaaaggaggcaatcagatatggatttaactcagtgagcagagggtggctttgaatagaaagggaggcaggtttgccccagtagttcccacattgacttttccctttagcttagtgatttgtgagccccagttttcacaccataaagttatcttcaaaggggataagatctggaggttgaaggaaagattcgtcttcatgattcatctctgattatttgtccaatctatttttacattttctaattgatgcagcattttaaagtctttaaaaatattacattagttattcatagacattgttagaaaggtgtaatagatgtaataaagttttctgtctgttaatttgatataatttttttcacaagctctgttgtttgactaaacgtctttcttctcttgacttatcaactatcccgtgttcctgttccttcatctttgccactgacatgatctatatatactacatttatttcttttcgcccactttatgcactatatttcttccactatattttactttgcagtctaaatatagaaaatttgttttattttcacaataggtagattgaagatataagaatatttagtttcatagtgtcatagtatacagaaaattcagctgcttatttttttccagtagcagtaccatgactgaagatgcattaaaatataaacacacacacatgaacacacagacattcacatgcacacatgtacactaagtcaaaagagaaaagttggcaggtagaaaaacaatatgaaattgaatagaattaagtaattacatgtcataacaaagaatccctctatactactccaatggtgttgttgataacatacaacgttggatatggatatgaagtaatatttctgaagaaaacaaaatctgtacccattttgtgtccagtacattttaaaataaatcactttcctattttagtggcacagactgactctccttagagagagtttcaactttttcaatataatcatatatgcagtataagtctatatttgattataaaatcctctgaaagtatttaaaatttattaacttatttgaaacctactacattcttggggcttgtagtattagttctactttgtagacataaaaacataggcacagtgtggccaaggacacctaaaggaagagggagtctgcaggacttgagttcatgtttctcctattacatcttgctaaaatggctcattgtctggggtatacaccctggttctttgtctctgttgagaaataattcaggacatgggcacacatgaggaatggaattaggagcagaaagtttaatagacaaaaaagaagagagagagaaagggcttcctcaggctgagaagtgggtctcccaagagaaggtctctggtttgggtggaaggcaatcgattttgtacagatgcttgaggaggtggtgattaatttacatagggcccaggggattggtttgaccaggtgtaccatttacatatcccgtgtaaagactggccttcccacactagtctttgttattattatgcaaattcgacctctacctggcagtcaccatgatgcctgaacacgtggttttacttggtgggtgccataatactagcacatgtggtgacaaggaaaagagagtggaaaacaccattttgaatatacctagcttccaggtacagctgctgacatttacatataaaagcttctagtttgcatatttatgcctgactctccaggctgctttctgttagagaagaaatgatttggggctgctttttattaaaggaaaattccacccagaactcttttactctttctagctgcctaaaagtaatgttttaaaaactcctgtattattgttatatcttaatagcaacttgtgactgaaatgtctttgagtctttactttcttacttttcctttttttctttcaccatttaattagacactaaattctgaactttcttgtctaacctcaaaagaaatgtccaaactgctttacaaagtggatgtttcattttgcattcataccagcaatgtctgagagtttaccacactttatctgcacaaaaatttggtatcataatgttttagctgttaattttaggcattctaatgtgtgtatagtgatatcttgtgattttcatttttatttttctcatgactaatgacattgatcatctttgtatttattttttgactttcacatatcttcctttctgaagtggctttttaatattttgcccatttaaaaaatatgtattgttttcttattattgagttttgagagctctttacatattctggatacaagtgctttgtcaggtattggacatgaatgtattttcctactaacctatggcatgtttttctctgctcttaacagagttgttcacagcataagatgttttaattttttatgatagtcaatgcatatattttttttctttcatggattgtatttttatgttgtacttaaaaatactttggccacaaagattttctctacattctttgcctaaaagttttatatttctatgaaacttgtagatttatgcctggatccattttgagctaatttttgtatatacagtgtgaggtatatgttaagatatttttctttttcttttcttgcttatgagtgtcaaattgtttcagcaccatttgttgaatgataggttattctctctttactgaattacttttgtaactttttaaaaggtagtcagtttctggacctcttcagttccattgatctatctgtctctcttttcacaaatgccaccttgtcttgatttctgaaattttttagtatgtgttgaaatcaggtagttgtagtcttcctacggtactcttctttttcagaattgtttttgtattttagtttctttaattgtccatatattttataatcaccttgtatatatctacagagaaatctactaggatattggttgagattgtattgaatctacagatcagtttgggaacatttgacatctcaacaatattgagatttctaatcaatgataattatatatattttcatttacttagatctttgattcttttttctgtgtttatgatttttagcttagatactttaggatactgatcttatagcctatgatattgataaacatactcattcacttttgaagtttaaaaaatttcttttgaatttttgacctggacaatcatttcttatgtaaaaaagatgcttattgtttcctctttaatatacatgattttatttctttttcttaccttaatgtgctgatgaggactttcagtatgatgatgactagaagggttgagggtagatatccttgctttatttccagtcttagaaagaaaacatttagtcttacagcattaaatataatatttgcagttaattttagatttcctttatcaggttaaggaagttgccttctatccccagctgctaagactttttctcatgaattttgacttctgtaaaaggcaaaagatttatacgatctgaagagaaaccagaatattatgttgacttttgtaaaatgctttgtctgttttttgatgattggtttttctttgttagtttgttaattacatatttgatttacaaatgttgaactaggttcgtattcctaggatatatcctatttggttgtgatattgaagcaggagatatgggaggaaaaacaaattttccctctttcctttggtataagcagcttccccctccaatcccaaccccctccatgagattgtaccctgctctgcaagtttttatgagtttatggtttcctgttttctgtaactagtgtctgtaagtctgttttttatctgagtagcacagcggaggtcatgagacatgcttgagcaagcttagattgcagccatctgggcacctagtgaaggacacaagataaggctgtgtaggcatcttgagcaaacctagatagcagccacctggcctgcatagcaagagtcatacgtaagcctgagttaggaacccttcacagtttgattaactgcctttgttctgcttctgtaagcttgctttccccgccctacaagtttcgtgccagtggcaagccaccccccttcagttgcatgaataaaagtcaagccctctcttcgttaattgctcagcctctggatattaatctgctgagccagtggccacctaaataaaatcctccttttccacccatctggtctctcgtttcctgcaacagtattttaacctctctctattgctgaattcaactctatatctgttgaggttttttgcatacatgttcatgagcaatattggtctgtagttttatttcctaatgatgtctttgtcttatattggtatcagggcaatcttggaccaatgagttggctagtgttccctctcctgttttctggaatatattatgtagtgttagtgttatttccttcttacctttaaaaactgtctgggcctgaaattttcctgtggaaacttccttattactaattcaattttatttcatttcatagatatagaaaaattcaggttacccatttcttcataaatgtattttggtagtttgcaatttttaaggaatgggtacattccctttaagttgctgaatttatcagcattgtgttgttcacagtttttattccttattattcttttaatgtccatgtggtatgtagcaatagtctcttttttgttcctgataatggtaatttgtgtctttttatttttattttttttggttactctggctagaagctttttaattttattagtcttttcaaagaaccagatctctgttttctgttttttatttcattgattttccctctaatatttattatgattattatttctactgctagtagtatcattgctctggctgcttgggtttaagttgttcttctttttctagtttgttaatgtggaattttagattgtttgatacatttataatgttctaaacatttaatgttataattattaaatgtttagaatctttaatgttataaatttctaagtacttctctatctccttctcacacattttgatatgttatttttatttttattttattttacagttaaaatactttcttattttcccagacactttatctttgactcataggttatttagaagttgttttctatttaaatttccaagtattttagaatgtttctgatatctttctgtattgttttcttgtttagtttcaatatggtcactgaacatacctttttgattttgatttcaattcttttatctttgttaaagtttgttttattgtccagaagataatatatcttggagaatattccatgtgagcttgatgaaaatatgaattttcatcttgttctagactatgttgaaattacagaaaacaattataacaatattatgaagcagaacccataaaataatttgcaatatacaagatataagaagtgggaaactctaaaataggagaatgggctaatgtcatggaacagaccttatgttgataagattagtatgtttcattacacagtataatattaatagtagagaagcattggtgttacagtctagtactgttagccaacttttcatgatttatattttaaataaattgtaagctcttcgagtggtgggacaatgtggcagagccacagttgatagacctgttctacttctggtttctggaccttgctatagaggttgagtctcacaagattggagctggcatgaggacatgtataaatctattattttaaagaaatgtaggactgtgcagtgtgaggctcatgcagatacttcagccgggggaaggtcaatcaagcttttctatagttccttggtgaggagacctggaatgggaggagacattgggtcctgaggaaggaacacagcaaggatgagccatggtattagggacgtaaatggggatgagatcatgaagaaccttgaatgcatgctaagaagtttttgggaaacaaatatcttggtatcaactattgaggctagatttttttaacctttaaacacagaaatgtctcttcaaataaagagatgaattactttcaaaagtacagtactagtagccgtatcagtggtggggacacgtctctcttctcatgtttcctgctgaagggactgaactggtgcaacattgtttttcttcccatctttttacttactctactccagtgtaaaagggtggcttatctttggtaagtttgtgataaggttaaaccaggagtgagtatccactaatcatctgtccagtaaatcttaacctgagcaggttctttttgtgtgaagggctttttttttttttttttgctcacattaagctctccactctaattttgtttttattatttattacagtgattttggcctccaccagattcccttttttctttttttcagaatttggaaagggaaaatgtatgctatttattggctctccttagagaccccagaaataataacaatgggcatttacagaatgattcatgtataagattatcattattactatccctattatccttagtggttcatgtctaagactatgcttattactgatataatataggtcctactcacacttctactgtgcccaatgttcctgtcttagtataactgtaaatttataattttgttttaattttataccctataaaatgtacaattttatcaattaaaatataaaacaagtaatccactaaataaacaaaaaaatgtgttaaggaccaaggacttaaagatgaataatgtctaaattttaataataataaaatctccataacgattagaacagaagacatagaaatataggttttaaagaaatgtgtagaattttctgtaacatatgtctacccaaattccgaatcccacacaaaatttggtcacgtaatgactcacagatgtcttttgttggcatttccaagaggcatgatatcaattctatgtaagctactttcttggaatatgagttttatttattttactgagagatgagatagcctgtgaacatttttttcctggcttaaagttacattttttccacatcttcctttttcagagatccattaatttttccaggtttagcaggaagaaagcataagttgtggctgtgtaaatggtgttactatttgcttatctccattttaacaagtatgggagtaataaagaacatatgtaaatattactgggtatggtgaaataaagaacatatgtaaatattactgggtatggtgaatgttccttggatcagtggttctccaagtgtgatcactgcaccagcagcattagcatcactgggaaaattgttagcaatagaaattcatggaactccatgccagaccaagtgaatcataaactctgggatggtgtttagtcatctgtgttttaacaagcccctcaggtgattctgatacacactaccatttgagaaccactaccttaccttagagaaaacagtactcccttgaaatcctcagcacaggagaatttgggaaacacattacctgctaacgtcatttgctcccataaagtattatagtgcaggccaaaggcgaataccccccatttttgagattagcaattattatacctttggttgtaaggaatcacctgttataagattccacagttactttcctagtagtttcaacatgtcaggaaatatgtaaggcttagtgaatatagaagtgaacagaagggaaaatatatctgccctcattaatttttaataacagttaagaagcaagtaaataaatatacaaacaattgtgataaattttggaagaggaatactagcatgtggatgtactcacagaatgtggttgggaaaagggattgttatgctaagagctggttgtagagtctttcaaatgtcctgagacaggaatgggcttggcctttcttaaaaaacaatagaaacccaatgtgactataacaggatgaactgagagagacctggcatgagataagcttggatttctacgcagggcaagatcatgctattccaaaaggattagtctacacctctccatgcctgattcctcatctcctatgaacataaaacttagatctattttcttataatcagaatccatttaacaaattcactttcccagcttgaatttaaggctgcaaatactggttcttgcccatgttttcccatgtggctcagtaccctggagaccagtcttagctctgtctgtaaaactcttgtttttctaatattagtatataatatgaacatcacccagcacatttattagacctttttattaaaatttggcccatggttatcttgttatatattgctgcataacaaattttcccttaacttagaagtttaaagtgatagatatttattatctcatagtttctgcaggtcagaaatccaggagtggctactgcatagttttggctcagggtttctgatgaggttccagtcaagctgctgatcagggctgaagtcatctgaaggcttgactggactgggaggatctgctttgtttttaagatcatttatgctgttgttggctaaagaccgtggttccttacaacatgggcttctctactgcgctgttcatgacaggacagttggcttctctcagtgtaaataatccgagagagagagagagagagagagagagagagagagaaagagagcaaccaagatgggaccgtgtttttttttttaacacttattatcagaaatgatataccgtcatttctgccacattctattgatcacaaagaccaactttgccacaatatgagcagggaggaaacaagattacaaatcctaaatggcaaagatctttaggagccatccttgaggagactgtcatatgaattttggattcaggtttatggctttgagccttggtttttcattttaccagttgcatgtatgtttgtttgtgtgtgtatatatacttataattaaaggttatttttacctctttgcttctcatccatgatttccagtcatgcactttcctgaatattttgcttgccggtctgtcccttccttgactgttttgtctttagcttaacagcaatcacaatatggaggcaatggcatctactgaatatgggaatagtccaggagcaaccctcagaaacacaacacatttgaaacctaagatgagttatgaggaaagaccatatacatttcaaagtattagtcatgaatctccaataaagccattgtcttatagctgaatttcagccttgaatttttattttgttaattttccaaacagttttataaacattgtgtgttaactcaaataatatgcaatgcacaaattttgctgagtccagacctcttttgaaaatactcatatttttcaaagggaggaacatcttagatattagtagcagttaatagttaatgaagttaaaattagcaaaacaccattgtctttttagttttttatttatcttttgcacatggtatgtatgttttctgaacactttggttataaaaatctgctcagcctgatattttttccagtaaaacattcttaaatcatacctctttcagtgaggctcatgagaccctgtttaacaaacaaatggaggagctgttgagctcttaattatactcacttagtttcatgaaaatttgagataatgaactttgaggtatttcttatgggtactaataacaagtggttggaaattatagggttctctatgccttgctgctattttcttgttaattatacttattactgtgaagctctattgcagcaacatatgtataaactaaatacactcaattaatttgcactattttagaaactgtgtttattaagcaaaacaatgccaagactctctgatagaatttaaatggctgggcttaggagataatagcatttctttaattgaaaccatttctgaagcttaaatgtgatgtttatatgatatctttccctctgtaacatccttatgtggatgaagattattctggttaagaagtgaaatactgaaaatgtcacttggtttttatttatggttattttttactaaataatttctgatgctgaaatagccaaacatgcttgcatgtaaaattaagcttggtaccatcaagggtagtaaatattaaagtgaaggaaataagaacgtttggggaaaaactcttgagttcttcttctgtttctcttgggaaatttatattccagtactagcattatctatgcatatgcccactttctctagcagattttgacctctctgggcaagagctgagctttgtttgtattttctacacgacactgagcccatggtatagaatatagtgagtgttttataaaataataatgaataagggaaactctccaggaccctgggtcaagatgaactgaaaaatatagcctataaattgtgatatacttaactgaaataaatagtttaacagagaaagtgaggagttgagcagaacaaagagtggtaaaaatgtgtttcagataagatgtgagggatccataattcagcctcaggagagaaaagatgtcaccactagttcaggggttaaaactatatttctgtctatatgaaatagttgagtgtgtttggaaggtggacggcaccaggtcaaagtgtcctgctagcttctcctaaactctaaatagcattgtcctagcaatgttaaacatgcccagtcctttatactgaggaggagtcatctaggctgtcttagtgtacaggaaggattttgggttaaactcagtatttagtaaagtttaaatgaactttttcaaaatagcaagaaatgcttgactttggtagctatgctatccaggttgattggagtttcataacataaaactaaaaattcatttctactagtcatgcatattgaaatctacatttagtatatgatactgaggatgataaagtggcaggaggaaccctgcagatatgaaatgcaacatagtaagataaaaattacatgaattttatatgaagactcctaggtttgagtcctagcttttcgatttacagttgtgtaatcttaaagaggctgtttttatctctttgtttcttagtgtctttgtatgtataattaagattttattgttaactgtgaagaactagaaaacagggcttctgagtatttgaaagcccaataaatgtaaagtacaagaggagaaaatgaggtatggtcttaagaaggtaaacccctgatttctttggtggtagggagtagatgggagagagagggcaaaaaggaaaaaagagaagtgagagggagaaagaatgaaagagggggaggagaaagagagagaaagagagagagaaagatgtggatctggtaaagatttccttctgagagtaggacttcattatggaaaatgctctgggatttttttcgaaatggttactttatttcttcctctgccagaaacaacgtgtcacagaattaaaataaattaaaaaatgtttcctagccatcaacagataatatatccagaatatttttcaatggcctgaagtgtaatgccttgacattatcatctaagaaagattagcttaggctcatttctccaaagaagtgaagtagtattttgtataattacctagtgcatttaacttttattacaaattattcatataaataccatttcggccctacttgatttaatcttatattatttcccaaatttttaaccttattatacccttaattgccaattttgctttttcttcttttctctcaccactaaatctgtgtccaattcatttcttttaagttctttgtctgggcccatgaactagtgttgctgattgaggatatgcaattataatatccagtatggcaagtttatatagacatatatttaacccagtttccatttgctccaagaattgtctgtaaccatcatatacatttctgttatattaggattagagacaagttctgtttagaaataactccaaaaacagtttttatacattattttcacattgaaaatcagtcagatctgctccagcctcaaagatcatgtttatgtaaaattaaatgagtgctggcagcaagctgcacttttttttttcctaaataggaaataggttaagctctctaattcatttctaggccatgtccagtcttttaatgagcatatcaaagacattctctgtttctgttacagggtttttgatctctagaattttctttccattttttttttcatggagtttccatctctctgcttacattattcatctgttcttgcatacctatttttatgttttccattagagatcttaatataagaatcaaagtaattttgacttccttatctgataattctgtgtcatatctgagtttggttctgatgcttgctttgtttcttcagattgtgcttttttgccttttagcatgccttgtatttttttatgaaagccagatatgattattaggtaataagaactgaggtaaataggtctttggcataagaagttatgtttatctggctagaaggtaggctgttttcaatatttgctgtgactgtaggagccagagcgtcagactcctctagagtcctggtttttgtatcctctgttgtctttgtgtttccatagagactcctttttatttaggatctgagctttatttaggatctgctgttcctttagttgtattcattgttattatacaggagtcctgttgatgtgatggtaaggggtgtgtgtgtgtgtgtgtgtgtgtgtgagtgggtgggtaagtgttctattatactgcaattgggactcagtctttttgtgtgtctccatccctgggctgttgcctttcaggaatatttcttagcttcctttccaccccttagatgaggtaggaaggctaaatggagctggagtggggtaattggccttctcccagttcagatatggacctggtaaagatttccttctgagagtaggactttcttatggaaaatgccctgggattttattcaaaatggttactttattctttcctttgccataaatatgaggatttcaaaaaaaatctttacagagtgagactccattaggtaaaacctgtgaaaatgtgggagtcgctctaggactgaaaccctcggaattgtcactttcacactagtctccagcaattcatcaaaattactatttaagtattcacaccagtttgtggcctaacagttctgttcctgttaaattgatcttggctgtgattgcctgtatttggctatgaatctctgtattctccaatctctccagagtctggggtttgccctgttacttcaattctctgatgcatctgggaaaatttgttgatttcaagtttgttcagcctttttcttattgtaataatgggagtgacaactttgaaactgtttacatgttggagctgaaaatgaaagtccctctgataaccagatagggccacctaaaatcatgctcattaggcagagcaagctggtctaggcactgcaaaacatatcaactcaggtgagttggttaaaatgaatgaaggatgaaataaaatctatcaattcacctcctagtgcagagacttgcaaaaaactcataaaaaatatgggatgatttcttacagtcccaagcaaaagacatagtcatacgatagttctatcttttgtgtttctgtagcactttcactttacatattttatgattcatattgtgttatagttggctcattatatgtaagctttttgaaagacttcaaactagcatgaacaagaccactattagaagagattacaactgataaacaatattgtggaaacaaatacacagtgtgtgattgagagtatagccaaaactatctgcattttaagttttttacttttatatgaccatcaaatatttagcccataataatgtggatccaaccccaccaattctcataaagtacttttacaaaggcctctacaagttaatttttcttcttctaagtttcaccacttaaccaaactataagctaatcacctgtatgactatctctattctcactagataggaggctttttgaaagcaggagtgatgttatgagcctgttgtattgctggcatctagcacaatgtctaacacatagtaggttttaataaatactttataagtgaattaatgaatgaaggtcactaataccagaactacaatgttctatacatacacaaaaaaagggctgaccttatcagtaaagcaccacgaacatattgtgaaacctttctcctttttaggacaaactcattattctctatttatagcatgcacaaggaagctgacaaaatcaggaagaagtaagaaagcatgcatcatgaacattggaatgtgagacatttcctcctgtattaatcatattttcagattctgtgttgactatttgacatctattattcctaacctctccataagcctgctggatcacagggccaaactaacaaccaatattgtttacatctttactgcaagttagctttcatggacatgcagaagttgtattacaatcctcccaaccactaaccctgacctgcctgtttcctcttagttcccagtagggaacatttccacctagttactttattccacgattgtcatacaggtatagtcccagttcctctgtttgtctgctttcctacccatgcatatgacagactttgggtagcctgtatggtatgctatgcctctcattaccaggggaaatggtgagtattaaaaactttctttcaatggcatttacttctttgtgtcatcactcagttacatgtataagttaagaagttgacacaatataacctctcatcatcagggtgtgttatgaagtaatctcacttcctttagcactgagattttcctctgctttctgctattgtccccataggagattgatatggtttggacttgtgtctccacccaaatctcttctcaaattgtaatccccaagtgttgagggagggacctggtgagaggtgattggatcatgggggtggtttcccccatgctgttctcatgataatgagtgagttctctcgtgatttgatgttttgaaagtgtgacacctgtgcccctgccccacctgccatcatgtaagatgtgtcttgcttcccctttgccttctgctatgattttaagtttcctgaggcctccccagccatgcagaactgtgagtcaattaaacctctcttttttttttaaataaattacccagtctcaggtagttctttatagcagtgtgaaaatgaactaatacagagatattcagaactgtaagcataattatcaacttcaaatgtggagtgcagtttcttagccactctccttctttttccctgcagcctaccccaacttgtagatcataagtagctgggctgcaaaactgtcttaataaacttggattactccaaaagttttgaattaaaatgttagcacttattatatattgattaatttagctttctaagtgttctgaaagaatactgggcataaaatgtaattgctttagttaatagctatttgattggatgttgagtgtcatttgatcgtttacccttaaagtctttcaaactttaaactgaaattgaaaaatgtctggtgggattaaagtatgtgagtaactttaaaataaaaaataaaaataatctggtgaaaaccataagaaaatagagaaagagggaagaaagagaggagacagaaatcttaaatgtaattttgttttttctgtagtcatattacatttatgtattaaacttatgttttgctgaatttcttaaatccttgtgtcagtgtctttcatctgcttttggaaactcttggccattttatcttaaatattgtgtttgcttcattctctttttcctctcattctgaaactccaattataggtatgctagatcttttctctttatttcacatattgcttacattactttatgtgttattcatttttgtacttctgtcttttaacactttttaattattaatttttggtaacaccaatctttcttatatctaatgtgctattaatctcacccactggtttgttaaatcaatatatttttaaaatcagctttagaatgtctacttcttttttcttatagatttcaatcctcttacattgtccattttttgtctattttctctatatttgtctctatattcttggcgttaccaatcataattaaagtccttgactgctagtgccaatacatgaatcacttttatatatggtgtatatctggtattttctaaatcatgagtggtaattttttcctcatttatttattttttatttcaatagcttttggggggtacaggtggtttttggttagacaaataagttcttagtggtgatttctgagatttttgtgtacccagagcacccgagcagagtacactgtacccaatatgtagtcttttgtctctcgcccccccccatttccccctgagttcccaaagtccattatatcattattacgacttcacatcctcatagcttagctctcacctataactgagaacatacaatatttggtttccattcctgagttacttcacttagaatattggcctctagtttcatctaagtacctgcaaaaggcattattttgtttatttttatggctgagtagtattctatagggtgtatataccacattttctttaactacatgttgattgatgaagacttaggttggttccatatttttgcaattgcaagttgtgctgctataaacatgtgtgtatgtgtcttttatagaatgacttcttttcctttgggtagatacccagcagtggacgttctactttgaaaggttgatctacttttacttctttaaggaatagtcatactgttttccatagtggttgtactaatttacattcccaccagcagtgtaaaagtgttgcatttttaccacatgcatgccaacatctatttttttttgattttctaattatggtcattcttgcaagagaaaggtggtatcacattgtggttttgatttgcattcccctgataataagttatatggagcatttttttcatatttttttttggccatttgtataccttcctttgagaaatgtctattcatgctctttggctgggtggtaatttttgattgaatgctgaacaacaagtataaaatactgtagtgaatctagatagtatcttctaccagggaggattcactatccttctggcagaaagaagggaggttgaccaccttaattcaatcaggggctggcttgaattaaagcaggattgtggttatagtaagactcaatctatgtttgtttcattccatgctctcaaagcatagccctccacaggatccaactgataatgtggtatggtaactagggctcatttccctggaaagtcttgttttagtcctgtgggattgtagaagcttccattctgcttttcagaggtgttcaagctcaattctttaattcttgttctgcatagtttaaacattcaccagatttctcaagaagcctgtcatgtcttcagatctgtcaattctgcagttaagtcactctggctccacatgaccaccaaagctttgttgggttttatgtcccctacacacagttctattcctagcaaagtctgaatctcagattccagcccattctcagaactggcaaacgcctgcccacagggaaaaggtaactgttcctaagataatttctttaaagcttttcttttctgtaattttagatcctccattactcactgcttctgttgctcaatggtgccttgaaattaaggacctcttaaaatgtacttggatttatttgcaggtacaattaagactctttccaagagtgttagtttgtcacaaactacttcatcccactttgaagtggaaggtctgtgggtcatattatttcaatcaacacctttattaaaaatgttctcaatattgtttgttctgcagtaataacattgtgaatgtaataaaattaatatagtgtgttagtaatctatttaggttgaataaagtatggattataatcaaattgaaacatttctcttttaaaacaaaactattaagaaactgacatcatagagtgtacctaaataatcatagacataacctcctgattttgcaaatgagagttttgaggcctggaacaatgcattttatttactcactttttttctcctaccaatgtttaggatgattttatgctataaaaagtaccagttgctgaggttataaaaatggcaagataaaatctctaccctgaagtgaaaaccttaactttggtagggatataaatggtaaataaacatgcccagagcaacatagttactaaaatataaatgtcctagaattatatttgagcatattagaggtactaactgactagaggattctaatagagtgtcatggaatatttcaactggttcttagtgactaagattttattttgaaaaggaaagtaaaagggcattttaagtgggggatgccatgagggtcatagatatgaaacagcatggagtttgcattttagagtgcatgatgggttggtggtaatatgtcacaggggtatacaaatggaaaatcagggctcatattgttaacggtcctatacaccatacataggaatctggacttttactgtggtgtcaggggaaactattaaaatgtttctgtaggtgaaacttgattagagtcagggtggaaaaaagcaaggttaagtggtttgtatattatttcatagggagcagagttaaaatcttgatttaaatccaatattcttatctttacaacaagctatttataatgagtaaattatacatgtggaatgataataatatttattatagatttaccatatgttaagggctaagtgttttatttttatcttagctaatcatcaccagaggcgatgggataaggaagacttctatccagaatgactccttgattggaagtaaaaacagcactcttgaaagagccactgtgctttgatctttggtccagcccttgtagatgtgtccgcagctcctatttgcctggacactggaagagtcaataaaaagaactgtacatttatcatttaagaaactaagaggtcattttttggacttgtgacaaaacccattatactgtcaagaccactcagctagaataaagtaggtgataaggaaagaaaaatggcacatgggcaaactttttgaataaatcacatgaatgtcttggaaaagtcattacataaacaaaaaccatgccaatgtcagtccacatcatggtggagctatcagagagcaacagaccttagggtacggagatgcagggaaaggatgtccgcctccccagcaacagtggaagattttaacatcaacccaggagattggctgctccatcttgagtctctgcccggggtaggagggcttctgcagggtgaaatgaggactttgtttctattgatttctgtactgggtatccagaacctcaaattactattaacaagattcatgtcattacagtcataatttccaaagttgcagtggaaatgaggaagacataagacagatgaatttgtttaggtgagaaaatcacaaattatccttcaaaaaataggaaacaatatgaaaccattattaaatgcaacaaatatgactcttgctcattgatactaatgccttttgaaatcttgtaatgagaaataacttagaagtaaaatcacttttaacagaattaatgattaaagctgtaggtaccagcaaagggttttgttacaaatagtctggaatgtatgatggtatcctctggtgtgtatttcttctgtggatctaaaggcataaccatgtcagtaaaggcttcaactaaagcactcaaattcattggctcatatattgcattactgttaaattcctaggcaataaaaatgatcaattctgtccctttgcaatatttaattgacagaagaattgtgagtttttgtagaatgcttatctgttcgatgtcagattttcagatgtgtgcatttaaaatggatactgcccaataacagaaaaattctttctccttagaggaaagataacagagctctctaaatgttcacagcctttctccaggtttcttctgtttttatggactagttgtcagtgcagtaggccagtccaattttgtttatttaccattttcctacaggcaggtggtaatcagagccaatctacctatatctccaaaaactgttccgattatctccaactcccaaaggaatagaaataagccactctgaagtcttgaggattttacatagttgacctatcatgtttctactgatagagctagtgaacaagactttgaggtgctgccttgttagaactttggggatatcacactgaatggctaatataattcagcttggaaaaattatccttaacacataagtttatggccagtctaagtacctgttccatgaatagtcaaaaggagataagacagtggaaaaaggaagataagaaaaagaataagaaaagaagcaaagagaaaggaaagcaaacagaggggaattttaaatcaagttgatttatgggaggcatggatttcactcaacagttgataagggtcctgacagcagactagaaataaattatttctcaaaaagaaatggcaccggaggtttctcactgagaaagagaaatgaacaacataaagaataaaaaattgagatagttgtttaaaagaaataaaactccatggaagataaccttggtgttcacaattgctattcaaagatgcacatcttttagagatgaaatgagaatactgtgaacatcaggagactgttctactattttatcttttacttaaacagaccacataagggtactaggtaacattattctattgaagcttgtatggaaaaatcaagagaatataaatgacagtttgccactgagaacttgcttattcaaggataatttctaaattacatatgccccccagttagaaaaatttcctgttttcaataatactatgtttttatttttgaagattggctgctagcttctatttattaaatgctcatgactacctttgcatttgtctaagatgtacatcttgaatttatggatgatgtatcagtcaggacccagcaggaaacagatggcatcctaaaaacggtttacttagaaataatttaataaaagctacgtacaaaagtgcgtccagggtgaaggaaaccagtaagacataggtgaggcagccagacactatcaacaagaaaggcagttacaattgctaggcaggaaagagctaaagttgcagcagccactgccagaattaaactctgagtagaatgggatgcaggtcagtaaatattcagcctctctcttctcatattttgatttcctcttagagactcctattgattaagcccaacaggaagtcgggaggcaagggagcctaggtaagggtgtctatagaggtttcaacccctgaaatagagcacagagaaagaggagttatttggcatgtaagataattgattaaatttgggaaataatttagttgatgcacctgcagaaatccagatgaatgttttcagttggagcagaggaaatagttaagcctagaaatataaatttagaggtaatcaactatttgtccttatattcaggcttaaaattagagttctgccttaagtttttcctttgttatttttatctatatacgttggatgagcctatctacttccaaagtttaaattcccaatttttgtgactataatgtcacatttatttatcaaagcaggacccttggtaacacatagtaggcaatatttgttatatcagatttggttattgaaagtacttgaagacaatgcagttctttttccttcttatttatttttaattgacaactaaaaattgtatatttttatggtatacaacatgatgttttgaaatgtatatatatttggaatggctaaatcaagccaattaacatatgtattaactatatatatgcatataactatctcatatttatttgtagtaagaacacttcaaatcttctctctcagcaattttctaggatacaaatattattaactatagtcaccacattgtacaatagatttcttgaacttatactcctttataatagattttgtgtcctttagccaacatctccctatccctactcctaatcccagactctagtgtccactattctattctctgcttctatgaatttgatttttagactctacatgtaagtaagatcatgcaggttggtttttctgtgcctggcttatttcacttaacataatgtcctgtggatctattcatgttgttgcaaatggcagaatttccttctttttaaagactggatagtatccattgagtatatatacatcacattttctttatccattcatccattgatggacacttaagttgattccatgtctaggctgttgtgaataatgctactatgaacatgggagtgcagatatctactaattttattttctttggatacatacccagtagtagaattgctggattatatagtagttctatttttaacttcttgagaaatctttatactattttccataatggctgcactaatttacattctcacagtagtgtgcaagagttcctgtttctccacattcttgccaacacttacgtttggtttttatgatgttgttgttcatagccattctaacaggtataaggtgatatctcattgtggttttaatttgcatttccttgatgattagtgattttgaaaaaattatttatatacttgttggccattgtatgtttccttttgaggaatatctatctaggtccttggttcatatttaaatctggttatttgttttcttgccattgagttgtttgagttctttgtatattttggatgttaacccttatcagatgtatggcttgaaactacagtctcccattacataggttatctcttcattctgttgattgtttcactggctgtgaaaaagtgttttggtttgatataattccattgatctattttttgcttttgttttctgtgcttttggagttatagccaaaaatatcataacctacaccaatgtcatgaagcatttctcttatgttttcttctagtaattttacagtttcaagtcttatgttcaagtccttttgtactttgagttgatttttatatgtgatgtgagatgacagtataatttcttttttctgcatatggataaccagttttcccaagaccaagaagagactgtcctttccccattgcatgtttttgtcctctttattgaaaatcaattgactttaaatgtgtggatttatttctggacactctattctgcaatgttgatctattgtctgtttttatgccagtactatgctgtcttgattactatagctttgttgtatattttgaagacaggtaatgttgagatgtgaagccagctggacttcctgggtcgagtggggacttggagaacttttctctctagctagaggattgtaaatgcaccaatcagcattgtgtctagctaaaggattctaaatgcgccaatcagcactctgtaaaaatgcgccaatcagcactctgtgtctagctaaaggattgtaaacacaccaatcagcactctgtaaaatggaccaatcagctctctgtaaaatggaccaatcagcaggatgtgggcggagccaaataagggaataaaagctggccacctgagccagcagcggcaatccgctcaggtccacttccacactgtgaaagctttattctttcactcttcacaataaatcttgctgctcctcactctttgggtctgcactacctttatgagctgtaacactcaccgcaagggtctgcggcttaatttctgaagtcagcaagaccacagacccatcaggaggaacaaacaactccagatgcaccacgtttaagggctgtaacactcactgcaaaggtctgcggcttcactccagaagtcagcgagaccacaaacccatggcaaggcagaaattccagacacatctgaacatctgaaggaacaaactccggacacaccatctttaagagctgtaacactcaccatgagggtctgcggcttcattcttgaagtcagcgagaccaaggacacacaggaaggaaccaattctggacacaatgtgatgccttcagctgtgttcttttttctgagcattgctttggctatttggagtcttgcggctctctacaaattttcaaattttttccatttctgtgaaaaattttattagaattttgataaggattgcattaaatctgtagattttttgtatagtataattaattataatttatattaattaacaaattaattaataattgatttattataaaattatcgattttagtaatattaattatcccactccatgaacctggggtatcttttcatttatttgtgtcttcttcaacttctttcataagtgttttatagttttcagtgtacactttatttttcagtttcacctccttggttaaatttatttctaagaatttcatttttttgtagttattgtaaatgagagttttttgatggttttggttagttcactgttagcagatagaaatactatgacatttgcatgttgattatgtatcctgcaactttactgtatttgtttattggttctaacaggttttttttttttggttgaaacttaaggattttctgtatatatgatcatgccatccatgaacagagacaatttcttcctttccaaactgaatgccttctatttaacttttcttgcctaattaatctggctgaaacttccagggccatgccaaatagaagcggcaagagttggtattttgctctgttcttgatcttagaggaaaagtttttaaattttcaccactgattatgttagctgtgggcttctcatatatggcctttattgtggtgaggtacattccttctatatcatctagtttgttgagggtctttttattatcacaaaaagatttgcattttgtactgttgactttggcttgctagtacagttgtcccttggtatccatgggggattggttccaggatcttctgtcaatacccaaatccatgaatgctcaagtatctatataaaatgacatagtatgtgcagatgacctgtatgttttggtttgtatgctttaaatcacccctagattatttaaaacatctcaaacaatgtaattactatgtaaatagttgttattctgtattgcttaggagaaaatgacaagaaaaaaagctgtacacattcagtactaatgcattcgttcttttttccccaaatattttcaatctatgattgaatccatggatgcagaacccataaatatgagggtcagttatattttgttgaagatttttgcatctctgtttgtcaagggtattggcctgtaattttcatttctgtagtgtcatagtctggctttgttatcagggtaaccctcgccttgtaaaataagtttagaagtatttcttctccttcattttttggaaacgtttgagaaagattggttttagttattttaaaaatctgatcctggacatttatttgatgagagactttatattattgattcaatctctttactttttttttggtttagatttttcagtttagattttctatttctgattcaatcttggtaggttgtacatttctagaaatttatccatttattctagtttatccaatttattggaatatattgcttatagtaaccttttataatcctttgtatttctatggtatcagttgtaatgtctcctctttcatttctgattttatttattcgagtcctctttctttttcatttcttagactacctaaaatcttgtcaatttgtttatttcttcaaaaagcaactcttagttttattgacttttctattatttctcatgtctctcatttagttcttctcagatcttggtcattttcttcttctgctaactctggtctcagtttgttcttctttctctagttccttgaagtgtatagttagggtcctcatttgagatcttttttttttttcttaatgtaggcagctattactacaaaattccctcttagaactatgttgctacattccattggttctggtattttgtgtctccatttctgattgtctcaagatattttttgtttctcttttatttttttcctcagttgttcaggactatgtactttaatttctccctatttgtgaattttccggtttttcctctataatgattttctagtttcataccattgtggtcagaaaagatactttatgtgacagatttcactctttttaagttattaagacttgttttgtggcctaacacatgatctgccctggagaattctttgtgtgctcttgagaaggatgagtattctgatgcttgttgatggatattctgtatatgtcttttaggtacattaggcttaaaatcttgttcaagtacgaagtttacatgctgattttctatctaaatgatatgtccattgttaaaagtgggatactgaagtctctgattataacaactgtattgctatttctgtcttcagatctattaatatttgttttatatatttatgggctttgatattgagtgtatctatatttacagttattatatcatcttgatgaactgacatcatttatcattatataatgaccctttttgtctcttgttacagttttttacttaaagtctattttgtctcctgtaagtatagcacttttttggttttcatttgtatggaatatctttttccattccttcacgttcaacctatgtaagtccttgaagataaagtaagtctcttattggcaacatagagttaggtcttgttttatttatccattcagctactctatgtcttctgattggacattctaatccatttacatttaaagtaattcttgataggtaaagacccactattgccattgtcttaattgttccctgactgttttgtaccaattttctttctttttcctctcttgtctccctttgttatttaaaaattgttttagtggtatgctttaattgctttttctttatctcttgtgtatctaccataagtttttgcttattggttaccatgaggcttttggaaagcatcatattgttatggcagtctactataaactaacaccttaactttaattgcataggaatctttcactcccctttccccacattttctatttttgatgtcataacttacttttttatattatgtttccattaacaaaatactgtagctaaggctatttttaatactttttttaacctttatactaaatttaaaggtgattacacatcaccactccagtattcaagtattctgaatttaagtatatacttacttttaccaatcaattgtatatattttgttacaaattattgtccttttgtttcagcttaaagaacttcctttagcgtttttttgtaaggcaggtctagtggtgataaactccttcaggttttacttttcagggaaagtcttcatctctcctttattgctgaagcacaggtgccccaggtaaagtattcttggttaaaagttttattccttctctaccaaaaatacaaaaaaaaaaaaaaaaagccaggcgtagcaactcggggggctgagaatggcatgaactcaggaggcagagcttgcagtgagccgagatcacaccactgcactccagcctgggtgacagagtaagactccagctcaaaaagaaaaaaggttttattctttcagcactttgaatacatcatcccattttctccttcactgcaggtttctactgagaaatttgctgatagctttatggaaatttccttatatgtggtgagttacttttctcttaatgtttttaaaatggtctattcgtatttgacttgaataacttaattataatgtgtcttttgaagttctctttgagttgcacctgtttaggaacttttgatctcatgtatcagatgtccatatctcttgggaatttttcatttattatttctttaaataagctttcagcccttttctctattctctgttaatggtgtcctataagtctgataggctttctttactctttccatttctttttttctttgttttcctctgactaggtaatttcaaaagacctgtcttcgagtttacagattctttttctacttgatttattctgctgttgaatctctctattacattttcattttatttattgaatattttgcctcctggatttctgtttagttcagtttttataattctatttgttttttgaacttctaatttttttcgtttttaaaataatattgttgagttgtctgtgttctcttatatgccaccgagcttccttaaaataatttatttgaatttcttttcaggcaattcataagtttccagaaaattattgtgtttgatggtgtcatgtttcttgctttttcatgtttcttgtggctttgtgttgctgaatgagcttttgagaaagcagtcacttccttgagacattatatactggctttggtagagaaagactttcacctgcaggtgagtgtgaaggcatcaactaggtgggatacagcaagtctggtttcagaaagggcattgtggcatagtttatgtataactccatcacctgatatcagcattggcaaagattgaggtgtcctcaacactctaaactgtaggtgtctgttgtagcagtggcagtagcaagccttgtttgaaaaagtggcaaaggctgctgtggttctccttttttttttttaacccctgcaggggaagtcatagctgcagggatacttgtttgtgtgacctctggtgtgcaggtacacaggcagccgtaacagcacaaattctggggcccaggcacacttctcccagaagtagtgctagtgttcaggttgcaggcactcaaaatgacagtggactgggttcctgggctctgaggcacacaaaactaccatgatgcccaggtccttggatgtaggtacactcactacagtgttggcaccagtatctagatctgagctgaacatgattgatttcagagacaaccttaaaaaaattctgttgaaatatggacatggcatatcagctataagcaactgaggaaaacaggtcgttagtgtgaagttttgtgtttctctggctaggagttaggctatgtttactgtttgctgtaataacaggtgccagaggcttaagttttctctagtgtctttgttttattcttctctgttgtctttgaatttctttagagaccccttcttaaattgggtctcagccttgcagttcttacgatgtaattccctgttattttacgggatcctgattggtgtgctggtaaattgtggggagagggaaaatgtcctctaattctgtaattaagttttagtcttttattgggatcctaggctgggatcttcacaagagcttctgagtttgtttttttttctcttagatgagataggaagactagagaaactacagttcagtatttgtcatcttccagatcagttaggctttagtaaaactcaaatcagtcagtgataaatagtttcccttgagggtaggtgttaaagagaacagaacactctgggactgtttaaaaatggttattttctgcttgctcctgtcagaagcacaaaaggaatctttctctgatctttaccctgagcatgtagtttgggctcctggatgtgaaagtcatgaatttgtggggtcctctgaggctgtgcctgcaatttttgtctctcaagatagtccatgctttttctccagcaattagtcagttaccctttaagtgttcctaccagctgctggctctagcagcagcttctgtttctttctgtttctggtgagctgtgattctctttatccgcacgtctccccagctttcaggacagttgtttgcccagtaacctgggcaatctaaaaatggttgtttatattctcttttttccccaaattattttttattattattattattattattattattattattattattattattattgtgagcaggactgacttttgagttctttacatgtcaggccagaaactggaagccctagtttctttgctcaacattccttctggaattaagggtgctgatttgtacccctttcctccaccattgtcttttactgagggtctgttgttcactaagttagtttttgtacctctacaaagttttatttcaccctaattcttgaagaatactttttctagatatagaattctagattggattttaaaaatgttttcacttggacaacttcttgaatcagtgctttcatctcttctcagaaattcttaactattatctattcagattctgtatctctcaatttctttattatcactttcttgaactctccttcaacatatgttagaacattttatactatctgccctattttgtaccctttcattttcttccatcccacgttttttttttctttactgcactctcaatcctttcaggttgaatttcctatttattaatttctttcaatttttctcccctctggcatttatcctattcgttttagtttcaaataaaatattaatttttagtcattatttttcaaagatgtttggtcaatttttatagttacatattccttacttatgtttatagttttctgttttatttctttaagtatatttgacatatttacttggcattctttgaatagtaatttaaatgctaaatttttgcagatttgattctgttgttagttattttggaaagttttttttttcctcataccctgattccttatatgttttatatgtacattttattgtggtcccttggaattttatcattttataaagtttctttagaaggtaagttttttcaaaggacattgactttttaaaatgtgttaagtagttttaattcaacatcctttttaatgaagaaaacttatgggttgttgtttatttgtttgttgttaggtgaggagcaaaataaaacaatcattctaaactcttttacgatgaattctgtggttgaaatggataggactgcacaagtaatataaataattttaggccacaaacatgcaagatttctgatgctcaagggagactccacccctcagtatactctgctatctaaatctaaactgaatttatttggagtatctttccatatgccaacttatttctagtttattttattcttttccaaaattaccagctttatttgtagatcttattagatcttgaacctgttggtctcaggctttatatttggtctcccatgtcacatgtggtcatcaaaacagaaacttcattttttttaaaactcttgatgctataatagttatttacatttagaaaaagtaacttttttttttttgattcagtggtacatgtgcagtttgttacatggatatattgcatgatgctgaggtttgggttacaattgcccaggtaatgaacatagtacccaataggtagttttccaacccttacccctgtctgtctcttccacctcttagagtccccagtgtctattgttcccatctttatgtccatgtgtatccaatgtttaactttcacttataagtgagaacatgtagtgtttggttttctgtttctgcattaattgacttaggataatggccaccagctgaagtcatattgctgcaaaatacatgatttcattcctttttatgtattcatgtagtattccatggtgtatatgcatattttctttatccagtccactgttcatgggcacccaggttgattccatacctctgctattgtgaattgtgcgcgatgaacatatgagtgtatgtgcctttttggtagaactccttaatttcctttaggtgtatattctgtaataggattgctggatcaaatggtagttctctttttagttatttgagaaatctccaaacttctttccatgatggctgaactaatttatattctcaccaacaatttataagcattctcttttctccacagcctcatcaacgtctgttgttttttgacttttttgatacaagccattttaactagtgtgagatggtatctcattgtagttttgatttgcatttttctgatgattagtgatgttaagcattttttcttatgtttatggcccacctatgtgtgttcttttgagaagtacctacccatgttctttgcttcacttttaacaggattgttttttgcttgttgatttgttcaaatttcatatagattctgtatattaagacttttgtcagattcagaatttgtaaatattttctcccattgtgtagcttgtctgtttactctattgacagttccttttgctgaattatttgcacttttaattgttttcataacgaagactgcttaaggtatctaaagttctgcttggaatacaattgtctgaaattttatataggaattttgaataaggaataccttctaaacctacaagaatgcatttctgagaaaaatattttaaagctaatttccatttccttcaattaagttgctggtatactctgatagcactaaaaatataatttttggtggggtgcagtggctcacgcctgtaatcccagcactttgggaggccaaggtgggtggatcacgaggttaggagatcgagaccatcctggctaacacggggaaaccccttctctactaaaaaatacaaaaaaaaattagccgggtgtggtggcaggtgactgtggtcccagctactagggaggctgatgcaggataatggtgtgaacctgagaggcagagcctgcagtgagctgagatcgcgccactgcactccagcctgggcaatagggtgagactccattaaaaaaaaaaaaaaaaaaaaagaaaaaaaaaaaagaatttttaataagagtatcaataagcattctttacaaaacataatttttgctctaatcaaattacatcattaaataattatagggccattctatggtgtgctatagagaggtgtttagatttcttgtaataaacaaacgtgggagaattttgtctcccatgcatatagtagagtaaggtgagggcagtaaacagtttttaaaaaaaaaacctgctcgactctgaaagacaaccaagacataagtattgaaattacgagattttttttaaggcaatgttggttgtattgaaattaccaatgatttgttaatgttatttgaatattttaatctctttcccattctagtattcaataatgtctcaatgcaaatggttgcactaaaacgagaacaaaggcaattttaaagatttcacaaaatatgaagtataaaattgtaaatgctgaaattaccactgataaactgcaaggaatgagtttgggacatgaaatttttcaccctaaaagaaggagaatggtaactttacatatttgtttattttgctatctctttaggatcaatttttaaatccaatgcctctttaatgatttgaaacaattatgatgtgaaaatgtaagtggtatgtgtatagccaaaggcagaagatcaaatttgaaagtaaaatgattagtacagccattttctttagtcatttccatgatttattgtatagatataactaagaaaataaacattcagacaatagatctacatttaactgcaaatgtataattggtttcattcattcaaattttagaatatgttattacctttagattcaaatttaaatttgtgaaactaattttcaaccctctcttattttaaactggtaattttataaatggcagccaagtgatttcctgattctatcacgaggactgtatcatatggattatctaaagattatataataattatgtaagaaatagataaaaactatattacatctaattttaaatatagtttgtctaaaattcaaacaaaattatatgaacaaagctagaggtaattctacagcccttctacttaactgactgtatatcttttaccttaaaaagaaaatatctttatatttatccacaaccataacactttccagaaattcaggataaatttcttcaaaggtttttcaaaagcgattgattaattatctttatttttctcccagaaaatattaaaatgttcctgacatagaaatttatcagtataaacacattattttctgcttcaagtttcctttccctgaacttttggccaagtagagagttaaagaaaaatatgctatattttaaagtcgaaagtttgcaaaaattctcaccctcagttttctttgctctgtgacctgcctctcttaactcttggcattttggaactagtgtttacctcactatgtatgaaaaccatattccttgaaacatttcatagtctattttatagtaaacctatctgtttgtgtaaaaagttttattttattgttttttaccaaacatagtaaggtttctaaacccaagagtatttttttagaaaatgttttgctgagtattctccatgtgtattgagcttgaagtggttaagaaagaaaatatttgtcttcaggatgtgagagatgatttaacataaaaatgcaaatacataaaaaagagaattggcacaagaaaattgatgataaatcatgattaaaaataatggttaaattctgttaaatgcatttgctatacatcagttacttttccaatttaatcctcagcaacactctgaggtaaatatattaatacctgtatttgacatatgaaagaacagaggcacagaaatatcttacagctatgagtttctggagcagaaggcaaacctagggactactcctcttgagtctatattcttaattgcatttctgcctttgactgatatgaaaaataggtactacagcttatcaaaggagaaggagtcacagcagcccctgaaatgtttagtcatagctgtgtgttggagctgggatttgagatgtcactatctgatgaatagttctaaatgattgctttgccaaaatctaaagtcttagacatcttctgataagtagagagttttaatgacatcctgaggttttaaattctattattttctaagatttttctttttggcagaggaagcaattttctctttgtcattcacatgccagaaacataaagcaacttttttttgttaactggaatatctcatgcatccgtacagccacacgatgctctgagaatattaaatattcctttccgcagcatacacaatgcagtgaattttattatttccatttttagccaaaaaataaagcataagaagacataaagagttatatattctagacagtgttgaataagtaatgaatctttctgggtttattttcacaatgtacaacccatcagtcatagattacaaatgttttcttttgattgttcttcagagggctttaataaaaaatgaaagtgtatcttaaaacaatcagttttcagtcttaaagctctttgttgaggataataaatttatagcatctgaaaagctggcttttcagtaaacatagaaaattgtagcctttaatttaatttttcccaatttaatttttttttgtaatgcagtaataaaaaggcttggtgaataattgtgcttttagttttataatatattttatttcatccaatgttaaagtaagagcatttagtctttcatcgaaaattgttatgtcagcttttgtttaatttcctgaagccttcctgctaagatttcatcatatgtgcataataatattttaactttctatttagtggcaattggaagggaaaatcatttacaaagcagtgaaaaataagtctaaactgtcaccaaatgaataaactaactccagctgtagccatgttttactcctttcttctttttaatgtgttgtttctgactttattttgtatttaatttttaaatttacaactgacacaatgttatggggtacaatgtgatgtttccatgcagaatacatagtataatgatcaaattgttgtaattatcacacttatcactttaaacatttattatttatctgcagtgacaacacgtaacataatctcttctggctatcttgaaatatacaccataacgttatttgctgtagtcactctaatctgtgacaatgcctttttccattatataatgtccctctttgtctcttttaactgctattattttaaagtttttttttttttgtctgaatagctgaatagctacccctgctcgtttttcgtgtccatttgtgtgaatgctttttcccatttctttaagtttatgtaagtccttatgtgttaggtgagtttcttgaaggcagcaaatagttggatggtgagttcttatccattctgcagttctgtatcttttaagtggagcatttaggccatttacattcaatgttagtattgaaatgtgaggtaccattgcattcatcctgctatttgttgcctgtgtaccttggtttttttgtttttgctttttaacttgtatttttgttgtataggtcctgtgtggtttatgctttaaaaaaggttctgttttgatgtgtttccagaatttgtttcaagatttagagcttcttttagcagttcttgtagtggtggcttggtagtgatgaattctctcagcatttgtttttctgaaaacaagtgtatctttccttcatatatgatacttagttttgctggacacaaaattcttggctgataattgctttgtttgaggaggctgaagatagggacccaatcccttatagcttgtagagtgtctgctgagaaatctgctgttaatctgataggttttccttttaggttaccaggtgcttttgtctcactgctctcaagattctttctttcatcttaactttagacaacctgatgacactgtgcctaggtgatgatctttttgtgatgaatttcccaggtgttctttgtgctccttgtatttggatgtctagatctctagcaaggctggggaagttttcctcattcattccctcaaatatgttttctgaacttttagatttctcttcttcctcaggaacattgattattcttaggtttggtcatttaacataatcccatacttcttggaggctttgtccatatttccttatttttttctttgtctttgttggattgggttaattcaaagaccttgtctttgagctctgaatttatttcttctacttgttcaattatattgctgagcattttgcatttctatatgtgtgtccgctgtttcctgaagctttgattgttttttattcatgctatctatttcattcttgtatcacttttggatttccttgcactggatttcacctttctctggtgcctcccagattagcttaataactaacctcctgagttctctcttaggtaaatcagggatttatttttggtttcgttccattgctggtgagccagtgtgattgttgtggggtgagggagggggtgttaaagagccttgctttatcatattaccagagttgtttttctggtttcttctcatttggatgggctctgtcagagggaaggtctagggctgaaggctattcagattcttttgtcccatggggtgttcctttggtgtagtactcgccccattttcctgtggctgtgccttcctgtgagctgaattgcagtgtttttattctctcttctgggtctagccacctagcaactctacctggctccagggtggtactgggggttgtctgtacagagttctgtgaagtgaaccatctatgggtctctcagtggtggataccagcacgtgttcagtggagggggccagggagtcaagtggactctgtgagggttcttagctctgatgatttaaagctctatttttgtgctggttggcctccttctgggaggtggcactttccagagagcatcagctgtggcagtatggagaggaactggcagtgggtgggactctagaactcccaagattatatggcctttgtcttcaccttccccgggtggataaggaaggcccatcaggtgggggcagggctaggcatgcctgagctcagactctccttgggcaggtcttgttgcggctgagtatttggggtgtttcccgggtcctgcaggagcagtccacttccttcagagggactgtgggtcctctcaggattcctggttcatttttgcagttgatgtggaactaatattcacagtgtgagcctctgtaccctactctgtctgtccgagtcagagctgcagtttagtcctgcctcctgtccgccatgactgtccaataaacctcagcctaatgtgtaacagaacaccgaaacttaattcttcttatctaactgtaactttgtatccattatcccagtcacctcctcctgcctattctccccagagtctggtaagcactattttactctctacttctataaaatcaactgttttaggttctatgtatttatctttctgtgtctggtttatttcacttaacataatatcctccaggttcatccatgttgccacaaaggacataatttcattcagttatatggctgaatagtattccgttcatgtctatctagctacctatcacattttcattattcattcatctgtatatagacatttatgttgtttccatatcttggctattgtgaataaaataggtgtgataaaaaagacattacaaccgataccacagaaatacaaaggatcatgacaattctatgaacaagtatatgccaacaaattagaaaacctagcaaaaaactagaaaaaaaattggtaaattcttggagatatacaacttaccaggattgaaccatgaagaaacagaaaacctgaacagatcagtactgtgcaaaacttaaataaatcttcctgttagtctgatggggaataaaaatataaaataaaatttaaatgaatttttttgttttaaaatttagtacccaagtcactttcagttcttagtaacttgtaactgggataatttctgaaatagtttttactggccaacagaaggttcatattctttctttgtatattgaagtaagttaactactctggttgcagctgttttagtatttaaaagtcatcaatattttcctgaagagttaattgaattttaaaaatatttgttacatagacacatttttttatagggattatacaggaattatatattatcttgacttaaatataagttagtagttttgtagatctggtcatgagttgatattttatacatatatatgtatgtatttcataaatcttgaaatatttgagattaaaatgtatgaacctaaatggcttgcatataaatcagatttcattcaagatttaaatcactgaaatataacatgaaataagcagaagcatgtaatttgctcagttgctcctcaaaattgttgagatttagatcttttccaaattcagctgttagaatacctatcaaagcttactattcaagaaccgtttatatgaagagataatttgatgatgttacacttactttgcagataaaatttagctttcatagagacagagaaaataagagtcaagcagttatctgtgcaatactcctagatcattactcttagctttgtgtcactgtgataccaaagttgaaaaatattgagcatttcaactggttgtattatactcttaaaataaaaaatagtgtttatcattctccttttaaaaattatgtaaacatgataatgtcaaagataaacaacatgaggaagggaatgctgagatttctactttcccctctggcatattgagtcaatcattatcattcatagagtgcattaaaaatacatccactcttgagtattctgacttttgcttttacagatgacactgggtctcaaaatagctcattgatgattactgcaaataagctaaaagacattatctcttttagtctcacagaatttttcatacagttttaatctcctgaggttgaaaaacttgaaaattgaaatgcatgtaagaacaaatcacataaggaaaacaaaaacaatacattgaaattggaatggctctcatttaaaatacatgaagtctaaaaagtctacaaattgctttatttcagtatgatgaaagactaatatttcctattttacatcaggaaatatttgaagtctaagagtccacagccttccttgtacgttatcacatttaaatctcacaataaccctacagggtagaaactattaataagggtacataccaatgaggaattcatagctcaaagaagttaaatagcatgtacaatgttagacaactgtattaaagtggtaacacaaataattcataaaatataccaaaccacaaaatatgctttgagtcacagttggttctaaataaataaatgcatttctttttttctttttacctcattcactgaacttaagaattttctaagttcataacaaatgttaaatacaaaggttttgtcatatttttactaagatggtgaacatgaaacatgcctatgtgtgacactgcaagtccccatgacttccaccctcttctccattctactatggaaatatgtccccaaatttgacctggttttaaagaactaggacagttctgggtttcttggagtcagggcatataggaaaacaaatgttgccttttcctatggcaatcttaatacaaatctttatgttgacacattttacttatgtctttcctttttatttcactttgccttaaggcaaagatgagacaacaaagacatggaaacagtttcattctttaaagtatttggtgctatacagaggcagaaatacaactttcagacttcttggttttctttccacctccttactctgagacagagatccagtttatatgtacattctatcttataaatcaacactgacagttgtataattttaaatgtaaacaaggacaaaaaagaatagaaaataagcacattttaggacacagaataatcaaagccaacatattataatatttagtttattgcaatattgtggagacaacatgtactctcccactactctgcccaacacaaaaaaacaacctagaaacagcaaatactattaaaatatgaatttaaaatattagatgtggcatgtgcttgtgtgtgtgtgtgtgtgtatgtgtgtatttggggaattgtaatgggaatggcatgctctaccctctagagtgatctctggcccccttcattccactttccataacaagcatgggcagagccatctggcttacatacattcacatgaagcattagctgaaagtagcaataatatattgaattatcaatgatacatatattataatgaatgagcttataatggaagaaatgaactctcctccacttagtgcaatattccttgcaatcttcatttattaacacttcctcacatcatgatggcagtattgcaaagatttatactagaggaatggcctggaaaagaggccaacagtattagtcagtctgattttaatctaagcctaatgcctgcctctagtttggcccaaaactgcttataaagctcttctgcagtctagttcaattaaccaggtgtctttaccatgcaaataaggtaaaggaaaaggaaaaggaaaaatcaagaacaactgatacatatttggctaaaaacactgcatgtaagtgatagtatttattgagcaggaaggaatactgcttgttgatgatggagagagttcttatttggccatgttaagttagaaatatcttagatcttcaataaaagtatcaagtgagaagttttataaaaattataacacattgatgaaagtgtatttgagagttttaatgggagtggcatgctctaccctctagagtgatctcacgtcctcttcattccattttccagaacaagcatgggtggagccatctggcttgcatatatccacatgaagcatcagctaaagtgtcaataatatagaattactaatgatacattatagtgggtatatatatgatattactgcagagaataatttggggctcattgacacatggccaacatttaaaataagagaattagataggctcccttagaagcaacaacatgtttgaagaaaaagaagcccaggacaagtctggacacaccccaacaatatcatatagagcagaggaggatgtgacaaaggaggcaaagttggtcaatgaaaaccagcagagatgcccttaaatcttgcagaagaaggtatttcaattacctgtattcatcataataaaaaatcattttgaaaaatcaaaatggtagctaaatgtgatatggaagaacatttaaacaattttttttctaaggtaggagctagtaagttcatatgctgccattcagaatgattcactagagacagaaattagtgttgcaggatataagggagataattgaaggagagatactgtgagaaaaaatgggattctaattagagaggatgtgtgggcctttgagaggagcaaaggccctgcactcatcaagatagcacagaagcacagctgttacagatgcagagatgcatatgagctgctagatgtgtgcttactagtagcagtgtctcttttttcttaataaagtaagaggcaaagccatttgctagctaggagggtttgagaggtagaattgtccacagaagagaaagtgtgaaataatcattttggacagtggaaaattaaacatattgatagggacaggaggcagggaaattctgggcagaagaaggcgggtccccatcaagggccccaccatcaatcctggagctatggccaaaagtgagaacatgcattcctgttttcctgatcaaatgttgccttttccaaaaccacccatggcccaccctgctgcacatcttgtgcccataaaaactccaggctccactggcagaaagaggagaagaggagaagcagctggatgttggagactacagttggatgtcaaagagaagcaacttgacttcagagggatggcatgacggtgtagctctaccttccagctcttccccttttcagctccctttccctctgagagccattttcatcagcaataaagtcccccacatttgccatatccaatttgttcatgcaaactcgttcctcttggacactggacaagaacttgcatgtaggtgcaaaaggctgtcacactgaccctccactgtgctgttaacacttaagccatacacagatgacaaagctaaaaaagcactgactgtaatactccttctggggctttaggggttgcggccaccccactagatactgttgtgggtctagtgtggaatttgttactgccatcaccctggcttccgtacctgctcacctatatgcttccttccacgaggggttgagcgcagcaggtcaaatgagtggagtttgcccctgctggcacctgtgtgctccaattcccacccacgaaggagtcagggaaaatttcctgcttcaatactaaggaaatacataagtttgctaggcaaagttgtataatctttggtaatctgtggacataaatggaagaacattttatcagtagtgaagaggtcaagaaaacaaggaccccactctgtttcctaagagacatgagtagatataaatgaaaaagtctgtgctgctttcctcatttactttctgttccccattgtaattaactatgagtatccactttctctgtctgccaatgtttggatctaaattcaccataaatttcctatatataggaattaatataagaaagatgttatatttataggtgggattaagggtcagggatattcctaacagtatagatggataggtacaaagatccaaagaggtaatacaccatgcccatcagaaggttttttattggaagaaaatccttgtgataaagaaactcagaggtctttgaaataactggaccaacacaaacaaaatgaaataaaacaaaaaaaaaatcattaaaattaaccaaataaattctgcaagtcaggaatttacttttattttccttttaattgctttatttacagaagtttctatgaaagattaaaggagaaccacaaaaaatttagggaattttaaacttctctcatattgtatatgcttacgttgtatacgtgtgtgcatatatctcttttttcttgaagaaaaaacgtgtatacaggactctgtaggagagagtcttgcagaggtggggaacccctttttattcagataccttgaatattttccatattagaagtaaatatgccaacttctcactgcaattttatcttcaagattaataaaataatgaaggcttcaaaaagtttaactatttccccaactcttaataggcatatctgagacattactacttcaactaatgacaaaatggtaagccaattttattgttgctgcttttttctctcccttttttgagtttcattgtttagaattccttccctgctgcttgttaaatcccattccctactttataaacatgtggaatatttttgagaaagggaataacaaataggtgaggagaaacttttcctgaaatctacagtgtaataactgcaattcctattctagttcccagtgtttccagaaatagtcttactctatctcctcttgtagaaatgctgtaatgaacatagagacttccaaagtattctaagtaaaatatatgtttgccttagtttttgcatgggctacaactctataaacaatctctctttacatatacgtcttctccacacattgctatatattctgctttaccctgagaaataacatacaaaatctcttttaaaaataacaaaagaaggccgggggcagcggctcatgcctgtattcccagcacttagggaggccgaggcgagtggatcacgaggtcaggagattgagaccatccaggccaacattgtgaaaccctgtctctactaaaaatacagaaacaaaaaaaaaattagctgagtgtggtggtgcatgcctgtaatcccagctactcaggaggctgaagcaggagaatcacttgaacccaggaggtggagattacagtgagccaagatcgcaccactgcactccagtctggcaacagagtgagactgcatctaaaaaaataaaaaataaaaaaaaaaacaggaggaacaaattaaattacaattaataagtaaaggaaatagttaaaatagttatactagccacttttcctgggtagtggcacctaaatccccagcttcagtttccactcatatgctgattactatctcatggaagtgtgccaggcttttggcttccctggtacctttgaaaactcatctttttgggggggatttctcgagccacttgtcggtgatttcccaaaatggatgccagaaacactttcccttctttactagcagttggggcacacgtttgtatgaactaggttgtatccatcagacacagccgtatgagacttgattaaaaagtgactgtagaaacaaatgtcctggaatccattcttctaggaccggccttagaaccatccagctttcagaggaaacccaagttataatattttttaaattttattttgtggcatagataaatattttattttttaataattatttattttattaacttttatttttaagttcagaggtacatgtgcaggtttgttatataggtaaacttgcgatgtggggtttctggtacagattatttcatcacccaggtattaagcatagtacccattagttatttttcatgatcctctccctcctcccaccctcttgtaggccccagtgtgtgttgttcccctctatgtatccatgttttctcataatttagctcccacttataagtgagaacacgtggtatttggctttctgttcctttgctagtttgctaaggataacagcccccagctcaatccgtgttcctgcaaaggacatgatatcattctttttatggctacacagtattctatggtgtatatgcattaaattttctttatccagtctaccattgatggacatttaggttgattccatgtctttgttattgtgaatagtactgcaatgaacatacatgtgcatatgtgcttatgacagaacattttatgttcctttgggtacatacccagtaatgggattgatgaattgagtggtagttctgtttttaggtctttgagtactgctatcacactgtcttctacaatggttgaactaattgacactctcaccaacagtgtataagcattcccttttctccacaaccttatcagcatctgttattttttgactttttaataatagttattctgactggtgtgagatggtatctcactgtggctttgatttgcatttctctagtgatctgtgatgttgagctttgtttcatatgattgttggccacatgtatgttttcttttcagaagtgtctgttcatgtcctttgcccactttttaatggggttgtttgttttgtttcttataagtttgtttaggttccttatatatgccgacttttttcagatgcatagtttgcaaaaattttctcccattctgtgggttgtctgtttactctgttgaaactcaaattataaggcaaggataacaagactggataaaaaaataagtattggttttctagagatgcatttatgaattcaaagacacaaatatgttaacgtgaaaagatataaaacctgtactattcaaaccttaaccataagacagctgtagcacatatgttaatgctggttaaaatgggaaatcaaactacaaagagaaattcatcagacacaacagagtggaaattttctaactcacttagcttggtgaatgattgaataaatagaaaaataatatagtaacaatactgaagttgggaacattaaagttatttagcaaatataaaaaataagaattttaatatatgtacacacagcattattacagttgactttgtagaggttacaaaacaaatttcgatacattccaaaacatttacatcattaggactgtattatactaaaagtatattaaacagaaattgtattcatttgttttcacactgctataaagaactacctgagactgggtaatttataaagaaatgaggtttagttgactcacagttctgcatgactggagaggcctcaggaaacttactatcatggtggaaggcggagaagcaagcaccttctttacaaggtggcaggagagagcaaaaaaaaggaggggaattgccacacatttttaaaccctcagatctcataaaaaactcacttactatcataaaaacaatatgtgggaaaccacctccatgatctaatcacctcccatcaggttcctcccttgacacatggggattacaatttgagatgtgggtggcaacacagagccaaaccatgtaatagatataagaaacaaagatggaggataagagattctaaactacttgttcagataatttacttgtgtcctctacacctacttagccacaatttcaaatgtaccattttttatcaggtgatagattactgctgtgactattttagaatttgttggatatagcaatacataggatatgatggacatttttggttgcattgtcaattgatgtctgctggggagtcactccagggctcaggaacgaaccatgaatagtttttcaaatggcaagtaattttctgctgtagaaggcatgacttgctctgcgatcctttgattttccttctggggcttgccagaggcttcacacagagttcttatttgccacatctatttctagcaccattaaacatatgggagattacaaagagaggaacagggcatcttattcttcagcttacatctgatacaaagccctatcttcatcaggtccccattcaaaactcttagccttctgaagcgcttggtaaatgagttggattggtaatcctgaggataaaatatattaccataggactcactgaacattttgacttgttccatatagtttctgtaaacatttcatttatacttgaacagaatgaatgactattttctaattacataggacaatcttgttaatagtattcttaccattctttatattcttattaaattttttgattgttctattacttatttataaaggtatctgagaaaccttactgacatgctggattagtttatttacttgtaattttataaaattccttttatcattttaggctcttactaaagaaacctgcttacatttattacattcctttatcgaatcaaaacatttctcaatgtagaatgacattcaatatcacataatgctttttgatatgaagtctgttctgtctgatacaaacatagcaatcccagttttcttttgttaaaatatttttatattgttttattttcaacctttcagtacatttatgtttgaggtgtgtctcttacaaatacatatagctgaattaatttttaaaaaccaatttgagaatctttgtatttatctagaaatttgttatttgtattaaatgtaatcactataatattacacatttcattttctttcacatgtggttctactttgtcttcctttccctaaatgtatttgttttcttttttgaaggaaatatttttattcctttttttcactttatgattttggagtttaataattaatttctgttattttagagctcacccatatgattttaatattttagctaacttgaaatctaaaaatatttttaaaaatatagtacttaatattccaattctaataattaatttttaatttacatatttatatcactcataaattattgcataataagcttcatggtaatattggatttttattgtaaagaataaaaaaactcattaagcatatacagtagaaattcatatttagtagcctattgatattcacatgtataaagttaatatttgtacgaataaaattgtattttattatgaaatctattttagtgaaggatcttaagctcaaattagcatattataaataagaacttaaagaaattacacaggctttggtatctatactgtttgaattaaaatcttatttattttatcacgtccataatctcagcactttgggaggccgaggagggtgcattgcttgaggtcaggagtttagaaccagcctggtcaacatggcaaaacctcatctctactaaaaatacaaaacttcactggctgtggtggtgcatgcctgtaatcccagagaccagggaggctgaggtaggaggattgcttgaacccggaggtgaaggttgcagtgagccgagatcacaccactgcactccatcctgggtgacagagcaagacactgtctcaaaaaatatatatattatttatttttttttccgtgactgtagacttaactgttaatgatgaatatacttcctttgtagctggttattattgactatcattaagtatgccaaatatattcagaaagaaacaactgcaaatgcccacttaatatctgtatttagataacttaaaatatgtccaaagatttatcttcaagttttagagtgcgtatttcatgaacaaaagctttcaaaaactgattcaattgaagttggagttaaacttattgtccgcagaaaaaatatgaatatttttatttctgattgtgagaaaatgtgttttgaaaggtgttttataccttccttatttgcttagtgtgaaaatttgagatggaattagaaaatgatctatgtggaatgtgttttctcaacatggccctgaaaaaactaaacatatgtttttaattataatactatctagtgtatgcaaaacattactgtttatttactataagatacaaaaagcttgcagaacttaattgaacagtagcagtctagtacaaaaccgaactgtttaaatgcattcaatagtttttctttttttaattttttttttaattatattttaagttttagggtacatgtgcacaacgtgcaggtttgttacatatgtatacatgtgccatgttggtgtgctgcacccattaactcgtcatttaacattaggtatatctcctaatgctatctctccccactccccccatcccacaacaggcccctgtatgtgatgttccccttcctgtgtccgtgtgttctcattgttcaattcccacctatgagtgagaacatgcagtgtttggttttttgtccttgcaatagtttgctgagaatgatggtttcaatattttaaagtttctgttcattttataatctttctaatatgacagggattcttagaagttaagtttattgattaaagatggattgcttcttttgtttttagtattctttatggtttaagagcagaggccctaaactttcctagagttaaatgtgcaagctttgtggttagagtatcagacgtctctgtagtctctcacacagcagagctgccgtggaacaactgccaaaggaccaggacactgcatagttaaatcatttccttcatccaatgggatcctgcattgaaaaatatcatgcagcaggcaggtgctgaacagttattaaaaatctcaatgaaagaggctagcctgactcgagaaaaattcaaaacctgcctttacacttatgattatgagatagtccatgatcagaggtgataaattacagaacagcatatttcaccccacattttattctacttttctctcaaactttatttatttctcttaaactttctggagtctgctcacttccctcgaaggtatcagtgacttgctgaaatatatcttacaatgtgttttcatagaaaaagtgagatagaggatacattaacaatacagataaattttgactatccacacattacattggggcataaagtgtttaattacccttttttctctcttttgcctttctaaaatctattgatccaattgaatttatcagcaaatatttactgattatggacaatgatggttaggtattacaaggagagaaataagaaatatattgttctaaagtaggcttcttgccagtaaaatatctaagaattcatttacaacttcctggccttcctcaaacttctgtgtgtaaaagactaagatactacaggacgatttcccatcattccccatctcacacacaataaagcttggacatacagtgaaaacaaccacctaaagttcccagacaatgagtggaaacagtcaggcactagtccagagtttatgctctcttgaaagagggaaggtgaaaatctacacaagtgtaaaatcaagattatatcaaatacctcctctgaccatattggaataaaactagaaaccaataaaaggaagaactttagaaattataaaatttatagaaacaaaacaacatacttctgcatgacatggggaaataaataaattagaaaaggaattaaaaattttttgagatagataaaaatggaaacacaacatactaaaacctatgggatacagcaaaagcacttcaaaaaggggagtttatagcaataaataaaaattagaaagatctcaaatagaccacctaatattgtatcttaaggaattagcaagaaaaaatccaactaactgagctcaaaattagcagtagaagaaaaataagtaaaaagttgataggtgcagcaaactactatggcacatgtttacctacgtaacaaacctgcacatcttgcacatttaccctggaacttaaaaaaaaattaaaagaaaaactacaaatatcatctggatagaaaaaaaatacaaaaaaaagcagcttggtttttcataatgctttgaaaagaactttgactaactgtatgatctttatagggacaataccaacatcagtgcatttcctgagcttgtgtttttatacacagaaaccatgagcaaaatgaacaaagctggaagttgcacactacctgacttcaaaatacactataaagctatagtaaccaaacagcatagcactggcataaaaacaatcacacataccaatggaacagaatagagaaaactgagataaatccacacatttaaaaccaactgatttttaacaaaggcaccaagaacatacactaaggaaaaagtctctccaataaatggtgctgggaaagaaaactggtaatccacatgcagaaaatgaaactagatgctcacctctcaccttatgcaaaaatcaattcaaaatggattaaacttaaatgtgagacctgaaacaataaaagtattagaagaaaatttaggggaaatgcttcataacgttgttctaggcaagaaatttttgggtaagaactcaaaagcacaggtaacagaagcaaaaatagacaaatggaatcaaaccaaaaagcttctgcatgacagaggaaataatcaacaaagtggagcaacacacagaatggaaaaaatattttcaaaccatgcatctgatggagggttaaaatccagaatatataaggaactcaaacaactcaataataaaataataataataatcatcatcatcattatctgataaaaagtggacaaaagatctaaatacattactcaagagaagatatacaaatggccaataggtagaggcccaccttgtttaactgcatttcacagatattgcattttttactaattgaattttcttgttagctctgcaataagcaagtctttggacaccattttttccaagagggtgcactcactttgtatctctacgtcacattttgataattctcacaatatttaaaactttaaaaaattattgctttatctgttatagtgatcagtgatcttcaatgttaatgttgtaattgtattggggtgccactaaccatatacatattggatgacaaaattattcaataaatattttgtgtgttttgactactccactgattgagtgcttctttgtctctctatctctccttgggcctccctattctctgagacacaacaatattgaaattaggcaaattaataaccctgcaatgtcctctaagtgttcaagagtgaaaagaagagtcacacggttttcactttacatcaaaatcaaggaatgataaagcttagtgaggaaggcttgttgaaaatggaaaaaggccaaatactaggcatcttgtgtcagctaggcaagctgtgaatgccaaagaaaagttcttgatggaaaacaaaaatgctacttcagtgaacacgtgaatgataagaaagtaaaacagccttattgatgacatggagaaagtctgagtggtttgggtaggagatcaaaccagctacaacatttccataagtcaaagcctaattcagagcaagatcctaactgtcttcaattctctgaaggctgagcaaagtgaggaagctacagaagaaaagtctgaaaccaacagaagttggttcatgaggtttaaggaaagaagctgtctttataacataaaaacgaaagatgaagcagcaagtgcagatataaaatctgtagcaagttatccagaagctctacctaagatatttaatgaaggtaggtccactaaacaaaagattcaatgtagatgaaagagctttatattgaaaaagatgccatctaagactttcacagctagaaaggtgaattcaatgcctggtttcaaagcttcaaatgacaggctgactctcttgttataggctaatgcagctggtgactttaggataaaaccaatgtggatttgccattccataaattctaggacccttaagaattatactaaatctactctacctattagctaaaaatggaacaaagcctgtgtgacagcatgtttgtttacagcatggtttactgaatattttaagttcattgtcaagacccactgctcagaaaaaaagaatacctttcaaaatattactgctcactaacagtgaacctggtcaccccagcgctccagttatgaagatatgcaaggagattaatgctgtttttatatatgttaactcaagatccattctgcagcctgtgaatcaaggagtaattttgaatatgtttcattaaggatatcactgtcacagatagtaattcttctgatggatgtggatgaagtaaattgaaaaactctggaaaggatttatcattctaggtaccattaagaacactggtgattcatggaaataagttaaaacattgattttagcaggattttggaagttgattccaaccctcatggatgactttgaggggttcaagatatcagtgtaggaagttactgtagatgtgatacaaatagcaagacaactaaaagtgaagcctaaagatgtgactgaattatgggaatctcataactaaattgaatgaatgaagagttgctttttatggataagcaaagaaatgtatcttgagatggaatccactcttggtgaagatgctgtgaacattattgagatgatgagaaaggttttagagtattctatagtcttagttcataaagcagcagcggggtttgagaagactgactccaattttgaaagaagttctactgtgagtaaaatgccatcaaacagcatcagatgctaagaattttttttgtgaaagaaagagtcaataaatttggcaaacttcattattatcttaagaaactgccacagccacctcaacttcagaaatcatcaccctgatcagtcagaagccatcaacatagaggcaagatcctccaccagcaaaaagattatgactaactgaaggttcaaatgatcattagcatgttttagcaaataagtatttttaaattatggcatgtacagttttaaagacataatgctatcatacagttaatagagtgcaatatagtgtaaacaaaagttttatattcactggaaaaccaaaaaaaattgttgattcactttattgccatatttggtttattgcagttgtctagaactgaatccacaatacctccaaagtatgcttgtatacaaaaaacattactaatcatcagggaaaagcaaatcaaaatcacaatgatatatcccctcacacttttcagaatggctattaccaaagtaacaatacatgctattgactgtctttttaataggcatggatgtggatgaggagaaataggtacccttctacagtgttggtagaaatttacattagtagaaactttatgaaaaaaaaagtctggaggaacctcaaaaaattacaaatgaaactagcatataatctggcaatcccactactagttttatttatccgaagaaaatgaaaccagtatgtcgaagcgatatctacattctcatgtttattccagtagtattcacagtagcgaagatatgaaatcaacctaagagttcatcatggataaatcaatttttgaaaatgtggtatttttacacagtggaataccatttagccttaaaaaagaaagaaatcctttgatttccaaaatccgatgaacctggctgacattatgtcaaatgaactaagccaggtgtagaaagacaaatgcgacatgttctcattcatttgcacaatctgaaatagttgatttcacagaaattcagagtagaatagtgtttattagagtctagaaagagaaagatggagagagattggtcaaaaagtgcaaagttacatttagataggataaataactttcggcattctgaaatatataatattgtattgtatatttcaaaataactagaagaaagtatttttgaatgttttcatcacaaagaataataaatgttggagatgatagataagctaaataccctgattaatcattacaaaatgtatacatatatcaaaacatcacaatgtaacccataaatatgtacaattattatgtataaatcaaaaataaaataaaactttaaaaataaattattatttttatctagctgactcagatattttaagttatatgtagaggcaaaaacagtgaactctattgctaggtcctgtgttctaggacagacctggaatttgaagccaaatattaaatgaaggaagacataatatatcaaagacatctaaagctttctgtatttggaataatataattattgtaaaatttacatagaacaaaatcaattcaaaaaaggcaattttttttctaatatgaggttactttgtcttaacaattaatatagttaattaataattattaataatgattaatgttctatagcatgtaaataatattacatttatgttttacatagtaagccattattttaagtagatttttacataagaattacctggattgaagagggccagagggaaaaactaatggtgaaaagtgacataaaacataattattattctaaaattaaactatattatgtcacaaaatagaaaaatgccattaccagctggttgctaacagccaggaattgcttttgtataacagttgaaatgcaaaagccagtcatttccattttattggataggggaagaagccataatgtaagtttttatagggatattcacagttactgctgttatccataattcctgtgtcctttccaaatgtaaccaactaatgtaaattgtttttggtcatactgatttatgtcataatgatagcaattacagcagggcaagttgtatttgacaagtcagttgagtacttttagcctggcactgttgaattacagctttcagaaggcacccctgggtccttaaaatgtctatcatcaagtcttgaatgaaatcaattttataaacatagcagaaattatgagtgctgtcatacttaaaagctttccctttcgaaatttgtgcatcaatctcaacacattattattgcctcaaaacttttatgacctttttgtaaagcattattgcaatagactttaaatattcttattagtggaaaatttattttttgtggattatcataatatataaaaacatatatatttatattgaagccaagataatggaatgaatatatgaatatgaattgattagtgtctgaatattcatatatgttcatctctataaactatctatctatccactgtatctctatgccatctggataaacaataaaaaaaatgagcttaacgataaccttgagccgtagtatataaataactcccacaagcttagtgttccaataacgtaacactaggcataaatgggttcataccttgagccagtgcttaaaattgtcacttgaattctgtaaatctgagatcttgaaatgctttaaagcaaaggttttcagacaaaggtaactttaaacttaattgtcattaacttgccataattcaaacatttctcattttgtaaaagaagccagaattcttagaagattcagtctgaaaaattctatgaaaaggaaaaaatgaaattctgttaacatgaaaaactctcttacttcaccacctccatgaagaatcattttggtggattggaatgatcagggtagaagagagaaaattgatttaattttaagaaatggagaacttggaaggtatgggcactaaaataaattaggtgaattttaaataacaagagattatcattagtgaactgtcaccttggcctatgacaggttcaaattagggaatagcttcctatgcacacataacttggtccaaggagtaaataaccacagaaacttctattttagagcatgtaactactctaaaatgaaagtatccaccccactagagtaatttcttcataatttcctgctttaagttccagagtgaatggaacataagttattccttaaagtaaaatgagtatcatttttaacgtaaatatatttgaaatacatagtaaggatgtagctctacaaatttagactattttaggagctgtagctctttatataaatacaattttattttcttcccagatcatagtttcagactttgtgagatatataagaatatatttcacaaaactatgaaagatagatagacttcttagatttaatgtgaaatgattacatattttatatatttcataaaggtattttttattatggtatgatttgcttataattcttagtagtggtgtggaacacatcagagtaccattcctatttgcaacttatgtaaagtactgaaccaagaagttgaaacaaatatctatatgttcagtgttattttggttgttgcctacaatgagctgcatttatattatattacaatataatataataatatatagtatagtatagtagtatactatactatctaattattttttatatttattaaataaaatataatgtatattattatattatatatatttatctgtttataattacataattatttctaatatgataatattatatactattattacaatatctaattagtattatatatcattgtatattaaaagttatattttagtatgtcattaataatgatacaataatgatattatattatatatttcatatatatcattaatattatgagtattataatataataatatatctataacatatagtatattatttatagatatcatattataacatttatattatggatattgcattgatatataatataatagcatatatattagtatgtagtataatattatatggtataaatattttatgctactaataatataacaaatgattgagagagagacagaaaacaatgttagaatttgaaattcatgagaccacagtaagtagaaaataaagccacagaccaaaaggtctatacatagaagtagggcttgggaagtaaaaataatatagatagtaatataatactaatatatactattatatatcatatattaatatcacatattatatattaataagatatataatatacataagtatattatatattaaatatataatggtgtgtaatacataaattataaatatatactataacataattattttatataatataaaataatatataattgtatataatacgtaagtatatattatataatatatcatactatatactatatatattatattaatatataatatatactactatatactattatactattattgtatatcttatgataaaatataagtagatacttttttcttttctttttttaattgtactttaagttctagggtacatgtgcacaacgtgcaggtttgttacatatgtatacatgtgccatgttggtgtgctgcacccattaactcgacatttacattaggtttatctcctaatgctatccctccccctccccccaccccacaacaggccctggtgtgtgatgttcctcttcctgtgtccatgtgttctcattgttcaattcccacctatgagtgagaatatgcggtgtttggttttttgtccttgcgatagtttgctgagaatgatggtttccagcttcatccatgtccctacaaaggacatgaactcatccatttttatggctgcatagtattccacggtgtatatgtgccatattttcttaatccagtctatcattgatggacatctggattggttccaagtctttgctattgtgaatagtgctgcaataaacatacatgtgcatgtgtcttcacagcagcatgatttgtaatcctttgggtatatacccagtaatgggatgactgggtcaaatggtatttctagttctagatccttgaggaattgccacactgtcttccacaatggttgaactattttacagttccaccaacagtgtaaaagtgttcctatttctccacatcctctccagcacctgttgtttcctgactttttaatgatcaccattctaactggtgtgagatggtatctcattgtggttttgatttggatttctctgaaggccattgatgatgagcattttttcatgtgtctgttggctgcataaatgtcttcttttgggaagtgtctgttcatatccttcacccgctttgtgatggggttggttttttcttgtaaatgtgtttgagttctttgtagattctggatattagccctttgtcagatgagtagattgcaaaaattttctcccattctgtaggtttcctgttcactctgatggtagtttcttttgctgtgcaggagctctttagtttaattagatcccatttgtcaattttggcttttgttgccactgcttttggtgttttagacatgaagtccttgccacgcctatgtcctgaatggtattgcctaggttttcttctaggattttgagggttttagatctaacatttaagtctttaatccatcttgaattaatttttgtataaggtgtaaggaagggatccagtttcagctttctacatatggctagccagttttcccagcaccatttattaaatagggtatcctttccccatttcttgtttttgtcaggtttgtcaaagatcagatggttgtagatgtgtggtattatttctgagggctctattctgttccattggtatatatctctgttttggtaccagtaccatgctgttttggttactgtagccttgtagtatagtttgaagtcaggtagcatgatgcctccagctttgttcttttggcttaggattgccttggcaatgcgggctctttttggttccatatgaactttaaagtaggtttttccaattctctgaagaaagtcattggtagcttgaaggggatagcattgaatatataaattactttgggcattatggccattttcacaatattgattcttcctatccatgagcatgaaatgttcttccatttgtttgtgttctcttttattttatcgagcagtggtttgtagttctccttgaagagttccttcacatcccttgtaagttggattcctaggtattttattctctttgaagcaattgtgaatgggagttcactcatgatttggctctctgtttgtctgttattggtgtataagaatgcttgtgatttttgcacattgattttgtatcctcagactttgctgaagttgcttatcagctcaaggagattttgggctgagatgatggggttttctagatatacaatcatgtcatctgcaaacaggggcaatttgacttcctcttttcctaattgaataccctttatttctttctcctgcctgattgccctggccagaacttccaccactatgctgaacaggagtggtgagagaaggcatccctgtcttgtgcccgttttcaaagggaatgcttccagtttttgcccatttggtatgatattggctgtgggtttgtcataaataactcttattattttgagatacatcccatcaataccgaatttattgagagtttttagcatgaagagttgttgaattttgtcaaaggccttttctgcatctattgagataatcatgtggtttttttctttggttctgtttatatgctggattacgtttattgatttgcgtgtgttaaaccagccttgcatcccagggatgaagcccacttgatcacggtggataagctttttgatgtgctgctggattcgttttgccagtattttattgagtatttttgcatcgatgttcatcagggctattggtctaaaattctttttttgttgtgtctctgccaggctttggtatcaggatgatgctggcctcataaaatgagttagggaggattccctctttttctattgattggaatagtttcagaaggaatggtaccagctcctccttgtacctctggtagaactcggctgtgaatccatctggtcctggactgtttttggtgggtaggctattgattattgcttcaatttcagagcctgtttttggtctattcagagattcaacttcttcctggtttagtcttgggatggtggatgtgtccaggaatttatccatttcttctggattttctagtttatttgtgtagaggtgtttatagtattatctgatggtagtttgtatttctgtgggattggtggtcatatcccctctatcattttttattgtgtctatttgattcttctctcttttcttctttattagtcttgctagtggtctatcaattttcttgatcttttccaaaaaagcagctcctggattcattgatttttttggaagggatttttgtctctatctccttcagttctgctctgatcttagttatttcttgccttctgctagctttgaatgtatttgctcttgcttctctggttcgtttaattgtgatgttagggtgtcaattttagatctttcctgctttctcttgtgggcagtttgtgctataaatttccttctacacacttctttaaatgtgtccctgagattctggtatgttgtgtctttgatctcattggtttcaaagaacatctttatttctgccttcatttcgttatgtacccagttgtcattcaggagcaggttgtttagtttccatgtagttgagcggtttttagtgagtttcttaatcctgagttctagtttgattgcactgtggtctgagacacagtttgttataatttctgttcttttatatttgctgaggagtgctttgcttcaaactatgtgttcgattttggaataagtgcgatgtggtgctgagaagaatgtatattctattgatttggggtggagagttctgtagatgtctattaggtccacttggtgcagagctgagttcaattcctgcacatccttgttaactttctgtctcgttgatctgtctaatgttgacagtggggtgttcaactctctcattattattgtgtgggagtctaagtctctttgtgggtctctaagacttgctttatgaatccgggtgttcctgtattgggtgcatacatatttgggatagttagctcttcttgttgaattgatccctttaccattatgtaatggccttctttgtctcttttgatctttgttggtttaaagtctgttttatcagagactaagattgcaacccctgcctttttttgttttccatttgcttggtagatcttcttccatccctttattttgagcctatgtgtgtctctgcacgtgagatgggtctcctgaatacagcacattgatgggtcttgactctttatcaaatttgccagtctgtgttttttaatcggagcatttagcccatttacatttaaggttaatattgttatgtgtgaatttgatcctgtcattatgatgttagctggttattttgctctttacttgatgcagtttcttcctagcctcaatggccattacaatttggcatgtttttgcagtggctggtaccggtttttcctttccatgtttagtgcttccttcaggagctcttatagagcaggcctggtggtgacaaaatctctcagcatttgcttgtctgtaaagggttttatttctccttcacttatgaagcttagtttggctggatatgaaattctgggttaaaaattcttttctttaagaaagttaaatatcggcccccactctcttctggcttgtagagtttctgccaagagatctgctgttagtctgatgggcttccttttatgggcaacccgacctttctctctggctgcccttaacattttttccttcattccaattttggtgaatctgacaattatgtgtcttggagttgctcttctcgaggagtatctttgcagcgttctctgtatttcctgaatttgaatgttggcctgtcttgctagattggggaagttctcctggataatatcctgcagaatgttttccaacttggtttcattctccctgtcactttcaggtacaccaatcagacgtaggtttggtcttttcacatagtcccatatttcttggaggctttgttcatttctttttactcttctttctctaaacttctcttctcacttcatttcattcctttgatcttcaatcactgatacccttttttccagttgattgaattggctaatgaagcttgtgcatttgtcatgtagttcccatgccatggttttcagctccatcaggtcatttaaggacttctctacactggttattctagttagccattcgtctaatcttttttcaaggtttttagcttctttgcgatgggttcaaacttcctactttagctcggagaagttcgatcatctgaagccttcttctctcaacatgtcaaagtcattctccgtacagctttgttcagtttctggcaaggagctgtgttcctttggaggagaagaggcactctgatttttagaattttcagcttttctgctctgttttttccccatctttgtgattttatctaccttttgtcttttatgatggtgacatacagatgagcttttggtgtggatatcctttccgtttgttagttttccttctaacagtgaggaccctcagctgcaagtctgttggagtttgctggagatccactccagaccctgttttcctgggtatcagcagcagaggctgcagagcagcgattattgctgaagagcaaatgctgctgcctgatcgctcctctggaaactttatctcagaggggtactggggcatgtgaggtgtcagtctgcccctgctggtgtgtccagaattggtgggttcttggtctcaccgacttcaagaatgaagccacggaccctcgtggtgactggtacagttcttaaaggtggcatgtccggagtttgttccttctgttgttcggataagttcggagtttcttccttctggtgggttcgtggtcttgctggctcaggagtgaagctgcagacctttgcagtgagtgttactgctcataaaggcagtgcggacccaaagagtgagcagcagcaaggtttattacaaagagcaaaagaacacaccttccatagtgtggaaggggaccctagtgggttgccactgctggctggggcagcctgcttttattcccttatctggccccatccacatcctgctgattggtcccttttacagagagctgattggcctgttttgacagggtgctgattggtgcgtttacaatccccgagctagacacaaaagtgttccaagtcctcactagattagctagatacagagtgctgattggtgtgtttacaaaccctgagctagacacagattgctgattggtgtattcacaatcccttagctggacataaaggttctccaagtccccactagactcaggagcccagctggcttcacccagtggatcccgcaccggggctgcaggtggagctgcctggcagtcctgcgccttgtgcctgcactcctcagcccttgggtggtcaatgggactaggcaccatggagcagggggcggcactcatcggggaggctcaggccatgcaggagcccatggcgcggggcaggaggctcaggcatggtgggctgcaagtcccaagccctgccctgtggggaggcagctaaggcctggcaagaaattgagcacaacgccagtgggcgggcactgctggggtacctggcacaccctctgcagctgctggcctgggtgctaagcccttcactgcccggggccggcagggccagccggctgctctgagtgcagggcccacggagcccacacccatccggaactcgtgctggcccacaagagctgcacgcagccacggttcctacccatgcctctccctccacacctccctgcaagctgagggagctggcttcagccttggccatcccaggaaggggctccgacagcacagcggcaggctgaagggctcctcaagcgtggccagagtggatgctgaggccgaggaggcgccaagagtgagtgagggctgtgaggactgccagcacactgtcacctctcacttggggggtgcctcccagttaggctactcgggggtcagggacccacttgaggaggcagtctgtctgttctcagatctcaaactccatgctgggtggaccactactctcttcgaagctgtcaggcagggacatttaagtctgcagaggtttctgctgccttttgtttggctatgccctgcccccagaggtggagtctacagaggcaggcaggcccccttgagcttcggtgggctccacccagctcaagcttcctggccgctttgtttacctactcaagcctcagcaatggctggcacccctccccaagccttgctgccgccttgcagttcgatctcagactgctgtgctagcaatgagtgaggctctgtgggcgtgggaccctctgagccaggcacgggatataatctcctggtgtgccatttgctaacaccattggaaaagtgcagtattagggtgggagtgacccgattttccaggtgctgtctgttaccgcttctcttagctaggaaagggaattccctgactccttgtgcttcccgggtgaggcgatgccttgccctgcttcggcccccactgtctaacaagccccagtgagatgaacctggtacctcagttggaaatgcagaaatcacccgtcttcctcattgctcatgctgggagctgtagactggagctgttcctattcagccatcttggaacctaagccaaatagatactttttaaaggtacgttttaacttgtaatttgccatgtgaccctcatttatagttttatgtatctgcgaggtgctcagaaagcttagggaagaccataagttccacaagaaaaatatcatgttgtatatgtaaatgcattatttataagacatcaagcaaaatattgataattttcatataactaattattttctaaaggtaacaatatcattagaaatcattaattggactcctactgaatcagaagtttaaattaaatgtcatgcagtatacagaatgaagaccatttagtgcccatgatggcagtctttatgcagtttgttagacgtgctttctatttcttgaaatgctgcactaactctttgaggtgtctatcctttgtgattctgttatttcttgtgatgtctttggagagatgtcaacatgtaatatgaagaaagcatcctgtatcttcaaaggacagtgagtgtttgacaatctgacccatgaaagacaggactctctaataagaatttgtttcagggataaaaaaactgtgaatttgttttaaaagcagcaagtccttcaggtcagaagccagcaaggcaaaagcagctttaaaaatatgtccataagatgaaaactggttataaacagcatatgaaaccaaggaaataacttccctttgacaaaacaaaatggtgatttcaccatagatatatttctgatatgtttgtctcatttcatagatttcaaggttatggcatgtcagcagcaccttcacagtcatttaagctggtgtctgctctctgtacagatgcagaatctgaggtaggactgttggaaccactagttgtccccaatgggctcatcctgccactattctgccacttctgaagatgttgcttgtagcaaactgaacatgttccattagtcctaggatttccataaaagtcacatcctgtttatatgctataaacatatgcagagtgattgttatggtacttctttttatagttcacataaaaaacaatttctacctaaatcatgaattttataagttttggttttaaaacatggccttctcaccttgatttttgtgttagaggttttcaaaacattaacagtttagtttctgtgctaagacattaactatgttaagaagctaaagttcatttgcctctgttttttatatttagcttgcaaaaaatgaccttctaaaaaataattcaggtcagtttctcctgcttattgggtcaacaaatgtcaagtgttgaaacagtgtcaagctgaagccaaaagcagagctccaaagaagtaacaaggtgatatttttaacaggtaattgccagcgattttgcctaagccacaaagatgcaatacacatttgacccaattcttaggttggggactttttttcccttcaacatataataaaatataataaaagtaataaaatggttttcatgaaccaccatttttctttcaacaaaatacttattttaatgagtcaggtaagaaggcagcatttgcttaattatcacagctgaaaaaataactcgaaccttgtaattgtgagagtactttgcaattccttgttacttgtgattcttttgcattcttaaaaataactaaggaataaccttagtaaaaagttaccatgggcagggcatttgattttgtgtcctttctcttcatctgtcctttgatgtcagtccatgtttgattggaaccccagaaagatgactttaaagtgattagattcaaatgattgagagagaataacgtcagaatttgaaagtcatgagaccagagtagaaaacaaaaaccatggaccaataggtctatacatagaagtggggcttgggaagtgaaaaaaataaaagaggattaaattaatgattttggggaaacaggaagatatgattaggatggtattgaaagtggggtagaaaaattttacatacttatgagaagcttatcagaacactgtaaaaattcctttctggaaaaggtctgacaacattcatgatgaacacccttactagcgtttaggcatagactagcatacagtctcttctgtatagttagtttgccctcaaggaagaaatgcatctttttagagtcaaagtgcttttaaggaaattgcatgttaaattttccttggtgggttttaaaggcatatgtcacctatttctaccacgttagttagacacaatctctttcactaaaatccatattcagagaggactgtttctgcaggggttatttgccatcactgggggtatatctgctggctgtgaaatcacacttattttaatgtccctagttgcttaaatcctaagtggatgactattttgtttgagactcacagaaaagagaaggtacattttagatcttaatccaatatacacatacatgcagatacacacatgtacatacatgtgaaaatttacacatttgattttaaaatttaaaagtaatgcttactctttgctcagtacatcttgatattttacattctattttatttctttaaaaattctctaaattgactccaacaacccctaatgtgtaggagtatggctgcaatttaaaatattgccctaatttgttatttaaataagtttttggttttctttaaagcattactgggtttgagccaggagttttgaatacaagtaaaaatgaatttccatggacactggaacaaagaacaaaagacacacaagaaaagtcatttcaggccaacaaggccaagaacgagtcagcttatttgacaaatgttttgggttactgttccaagacaggtactgctaggagctcagaattctgcaacaaataagttagagaaggtagctggtttcaaggaatccataatcttttagagaaaaagataacttaataatcaataaagttgtgcatgacaatttttactactagagaaataatattctcttattggaacagagcacaaagatttaattgaatataaacaaagggaaacttcctgtgggaaaaaagttttgattcataagtaggacaagaatagtatgtaggagtccctgtgtaggtgtgtagtaagggtaggcaggaggattagaaatgaagttttaagcaaataagaatattataatgccctgaggtaagattctgatttcaaagagtgatgggaggtggtaggagtatatgccttgaaaaaaatctccattgttgatacagaatgcaaagaaaagtcctaagtctggactaggaagtcatcgatagttaaggaaccctccatgtgaggtgggaaaagccaagagagtagaatgtcacagagttaaggggagaaaatgttggatagaagggaatgaataagagtgaatgaagaaaagagttaaacataataaggactaaaaaccatcactgaatttcagtaaactcaggtctttgctaagcttagaaacagcagtttaagtgtgatagtaacagtaaaagccaggtcatggtggcttgaagagagattgatggtaagaaaatgataatattagtctggataacatttgaaattttgttttgacaaaaaagggagggatataggacatttgctgaacatgtaaggggaaacaaggaaagattgttaaaaaatacaatatggaaaatttcaactataaaccaagaaggagaaaacaacataataaactccacatattcatcattcagcttaaacagttatcaagtttctgattttgtttcacttgtacccaaaccaattcctctcttcctccatattattttgcagcaaatcctaaataccacgcaaatttgtcaacatatattttaacatgtatccttaagaaataaatcttctttttaaactaatcacaataccattatcctagttacaaattaacaataatctttagcattactaaatacctagttagtatataaatttttactgttgttccatagatatttttaccattaatttattcaattcaggattgaaatacaacacaaacacaggaaaagtcacttctgtccagggccaacaaattgtcaaacaattcatttgacaaatatttttggatattgttccatgataggtagtactgctaggagctcaggttctgcaacacagaagatagagaaggttcctggtttcagagaattcatacacatttaatgaaaaatataattgaataagcaatatgagtatttaataagcctctaagtaaggtataggaagagtaggagggaaaattgaaaatagttttaagcaaagaagagagtatgataatgccctgagataagattctgatttcagactgatgggagggttaggagtatattccttgaaaaacctccatcgttgatacaaaatgcaaagagaagtcctaggtctggactaggaaggttactgttattcaattcaggattgaaataattgaaatcaattcattgtgattgaatgtcgtatctcacaatctcttttaaactacagtataggtttcctctttcctacccacttttttcctttatattgatttattcaaagaattggatcatttgccctgcagcgtttgttgtggtttgaattttactggttgctgaacagtactgtataatgtgttcctatatccttcatattttctgtaaattggtatttaaatctataatcttgattttagtgtagttccatttttttgaagactgctgtatagacagtggttcgttctttcatctgaaggcacaaagtgtctggttgtctatattattgggaaattagtagtgattaagaatcatttcctagatttgttaattcataaacagcttcaaaatgtaatattccaattctgtatttccattttcaatcattagctggagtaagtctataaagaaaggctttctctcattaactatttagttactcttaagtacaatttgtacagaagataaatgtttgattagtttcttttattaactgttgtcacaattatgagttaattgccagacatctttgaaagatgaccagagcatttttaatttttgtttttataaaatgatcattgtgagcacaataattaaaaattatttgacaaattttatccattgcagtggttattcctactgattctcaaattgtaccacgcctgactcatataaagcactttaagttactgagtcattctgacaaaagcctcaggagtctttgatgactcttgttttgagacttgtaaaatgttatagacacattttctgcactttccagcccagacctgtaataatttttttaaaataaaagatttatatttagcacataataaaaaataaataaaaagcccaaagagggagacattgaagatgtgaaagggaaaggagagacaataaataaaaggccttttcttttttttattgagacagagtttcgctcttgttgccgaggctggagtgcaatggcgcgatctctgctcactgcaacctccacctccggggttcaagcgattctcctgcctcagcctcctgaatagctgggattacaggcatgcaccataatgcccagctaattttgtatttttagtagagatgaggtttctccatgttggtcagtcaggtcctgatcacctgacctcaggtgatctgcccgcctcttcctcccaaagtgttgggattacaggtgtgagccaccgcgcccagccaataggaggccttttctgagaagagggctgtgtatcgaatcccagatcctgaaatgagggcttaactacagttaggaggcaagaaggaggaacgtgtggaagcagacaggttcaactgtataggcacaacagtgggaagttgaggaattttagtctattgatttcctttttctgttgaacaggtagtaaagtcatatgttgaatttgagggggaagagactatgaagcttgttgaagagaaaaggaggaagcttgtccatcttcatctttactttcctagacttttcaaattgaagcttctccactcactgatggcttgagttgctctactaattctcttgcattttcttttcttttcttttcttttctttttttttttttttttttttgagacagagtctcttctcttccattttctaaattgtctctgacatttgcctggaaccacacacaatattccaagcgtggtcacaaccattattctataccaaagtggccatgttgctgtttttacttaaatgtttctacaaatatttgtatgaacaaatgtaattttatatgaatgcacaattagtagcaggttttacctgttgtgatattgttattggtgcactttttcctttttcttttttgcttggctccttatgctccatctcctcccacccttcctccaactctccaacgctgtcacttatgttaacaatgcagcgtatattcctacatttttttctcattttaatgtaatcatgttattggtcaggtccaggtctgttctacccctgtgcaataattcaatcaccgtgacgtgggttttgcaaaagagaaaagatttattcacaagtccaccaagcaaggaggtgggaaaatgctttcaaatccacctccttgaagataggttgagggatatttatgtgttagagaaatggagtggtctaatgcgtgaggaaaagtgattggcagtacggagaaatgaagtaattggttcattctgaccaagtgtagtttgggtttgcagcattttataggacacatgtatagaaaatggcagcgttagtgtgatatgagggtggaattttgggccccctgacaacaaaaggccacctctccagcacttgcaccaccctagttgaacggtaggtggtccaaccaatttgaactggataggagctggcccaagttcctgaaaaacagcttgatcaactattactgtggtgacctatgaatgctgtctataaaagtagccagtgaaggtaaaatttcagcattcagtggggaagtcatcagctaccatggcctttagcttcatgaaaaaggaaacaaaagaattacacaatcaagcaaccagaagcaagcagggcaggcagatctgatcaaattaaccctttggtttcaatcacatggaaacatatgcatgaacatacataaatgcctatctatcaatcaatcatctatctctttatatatttgttatttttcaaaatgagatgatcatatttgttttttgtgaaattttttttctcagtgaaaaaattatagaaatccttctagttaaatttaaaaaattttaatttttttatagtgagctacatatttaaccaaccattttcctattgattgatattaaactttccccagtttgttgccactgagaacaatgttgccattaataattttgtagttatatctttgtatactaccacctttatttttatgggataggttcctaggaaggctatttctttggattttaaaggatgctgccagattgctttctgaaaaggttgtaaaacttgacatttctaccaccagaggaaaaatgtattattttccagggttctcatgataggagatatatttctctctctctctttagaaaatgttttcaagtctaataaatgtaaagtaataatttaattttaatctaatttgcattttgccaatgactagggaaactgaacatctttttatgtcattttgctctttcaatttattgttccaggaattattcaatgaatatactttgcctatttattcatttgggctttttatctttgttgtaaatttataaaaattctctgtgtgttgtgtatgtgtgcacatgcatgtgtgtattcacacacgtgtgttggtacatgtgtctatgcttactacctgcataacagaatttttttctgaatattttactcacttaagtctgcttgtggttcttttgtaaataaaatatattgttaagcaattttttcccctttattgtatacaattttccagtcttatgtaagaatgtgttaccagatccttaatgggcttgtaatatcctacatttttataagcttttattttagcttatattacatttaatgccttaatacacctagcttgtttttttatatgtggcagattctgtgggttggcttattctacaattgccccaaaccctgccctcctggtatttttctgttaacaagggtagaaactaacacatgagatctccgacttctttgcagttttgaggtcatctaaccctggttgggttatagggcaaacatccttttctaagtaaaaacaaaatcctgttaaaaacaaaggaaaaggctcatgagactccctttccctacaatcttttctcttctttatgaatgaaatatggacattatggcttcagtttttccatcaatcttgcagtgatgagaatgaaaatcacacactgaagacgatggagcagaaagatagaaagcggactgtgtcattgagcagttggctgggctgaatcacactccattagacttacatgaaaatacaaaccttcctatgtttaggctactatattacaaagtttttgtcacttaaaattgaaagcaatcctaacaggttcagggtcccacatatattttcttcttcataggaatatgactacttgtcctgtaatctatctttttccccaaattaaaatgccattcttaccatttattaaattagcatatatagaaagacctatttctggattctgttccactgagttgtctttctgtttccatgtcattagcatatttatttgattaaaattatttttatatatatgtatatatacgcacacacacacattcacacgtaatgttttcttaatttctttgctttagacatggcaagggtacttcaaatctattccttccttcaggagtctttcaaatatttcaagaaaatcgtttgctattgttcataatagtagaaggaggcaaattcctaggcagataggggcaggtccccggtgaaaccaaaccttcaagccaaaaacagcctgaagccttaaaaccaggctgccagttccagatggagtctgcaaccagagtgagaacttctattcctgtttgcccactctttcctgattggttctttctgaacaatgctttttaaccaattgaatgttgccttttccaaggttacctacagcccgcactttcttcattctgagcctatatgatccccagactcagccacactttgagactacccaatttcaggtcggggctactcacaatttattgagctcttctgtcactcaataaaactcttctccaccttgctcaccctccagttttccatgtaacctcattcttctggacatgggacaaaatcctgggactcaccaaacagccagtgtgaaagaagctgtaaagctgtagtcctcccgtactctgttggcaacaggtggctgccccacaagacaggaagtggcggtggctcttggccagcccaggtgctgcaggcctagtggggcaatgggatcgaacaagctggaacatgcccctgtttgccaaagaaaggctgtggatggcaggaacgaacgaactgcaacatgaacgagctgcagcccttctggggcccagacctcgggactgccctagctagaactgtaacacgctgtaacaccctctttggggctctggggtggctggcatatctcagttttttgggttccaccgcattcccctcgtttagatgctggcgcctaaagcagaagctgctttgcagtacacctggttcagccagacttgcacagagctggtgactggagcagccacaccaccacagcagttggcacaactggctgggcaccatggctgaaccctgcactgaatcactctcacacccctcactgctccacgccagggttgtctgtggtggatgtgagatctgggccagcgagcctggagctgagcacagcctgctggtcagattgggtggtcatgagcgaaactctagcagaggcacccctggtcacggaggtctccagctggtgaagcaccacctgaaagaatcctatgtaatttagactaaggcattaccagaatggcattcttgaagaagttaaaaaaggtagtataatgaaagcagcactgctttgtagccaagagattatcattttaatccttcctgtaaaattttttaccctacccatgttcttttacttcccctgtctctcactgacttatccatgaaattaggggttgacagaagataatccctgtggtcccatacagctctaattgtctatgattccatggatttctggactaggacacttgtctgtaactattacattatttctccttcaagtaatgaaaatatctgtaattagaatccatcattttttaaatgtttcttgtataattatattcaatgctaaaaataaaaatacatacatatatgaacttttattcttctttcattgtttgtaagagcacttggtgacctgtgaaaagagataaattgaattgcacttgactcattcacttatgggtagcttcatacaggccttagccttgatagtagaaaacaggcaggcagttatcaagagctattattctgagaacaaattattatattaaagaaaaagttaggttcatgtttaggtaagaataaactttgtccaggattagaaactgcactgctatgtagacagttggtaccactcaaagctattgacacttctttctagccgtcacatcatcctagtttcttcatgcatactgacaatcagattatattttgaacatataagaatgcagaaagtcatccaggcacagtggctcatgcctgtaatcccagcactttgggaggctgaggctggcagatcacctgaggtcaggagttcaaaaccagcctggccaacatggtgaaactctgtctctactaaaatacaaaaattagccaggtgtggtgatgtgcacctgtaatcccagctacttgggaggctaaggcaggagaattgcttgagcccgggaggcagagcttgcaatgagctgatatcgcaacactgcactccagcctgggtgacagagtgagactctgtctccaacaacaacaataacaaatagaatgcagaaagtcaaatcatatgcccttctaataggccttctcatccacagtatgggaataattagattcagataataattttatgcattttatacttcctattctgaaacatctcaagatactaatttaaaatgaatatgaaaaattattgaattaagggaggtattcattctccctcctttcagttaatgtcacaagttgattctagttttctaggtcatggttcttctccaggattaagacaaatggatcaaacagaaaattgagtcatctaaaatttatttccctttgtttaactttaggttagctaggaaatttgaatatcccaatttatattcaaatttaattttaaaaatgataactaatgaccccaattcaaataatttgcagaagcttatagccttataaatatggattataataagaataatggtttatagataatggactttttttctttttctggaatgttcttacagctgagagtatgaaagattgggcctactgcatcctattcctgtctctctctttccctgtaaccttatctgtgactttgtttaagttattaatattgctgccatcctaggaaaatgtaattcagaatagacagcatgaaaagtgggaatatcaggatacaaacttgactacatttttcttttattactgattttctacttttcttttctgagctccagtaaaggaaatagagattgtttgcctttccttctcttccaccaggtatgtgaaagtctgaaagagcctgctagtaaagtaccatttgaaaaggaggaagcaggaagctaggagtgaacaaagcatagggttgatggatacagtgctcacaaaattgccccaccgttgtcattgatatcacctttaaacaagttttagagaattgaaaccagatatgatgtgaagttatagaaacagtttaatggggccaatggacaggaccttctggcaggtaagaacgtcttggatatagaagctcctagactctacagtctcaatgctattaacttacttgatctgtgacattacgtaggtaaatgacatctcctgaagtgatttttctcatctgtaaaatgaggttaaaatgggaataataatgatgtctactttgggagcagcttacaaagggaagaaaagagtatatagcacaatgcctgtgcaaagctaacattcaataaatgttgactgccatcattagagccagatagactgatagcagtgagttgatagcagggccagtggaaaccaacaagaagctttctcattagcagtgagatcacagattctgcattctctctgtggaagcagtataatactccctaggtttcttgattcttgttggtctgtgaaaagtgaagaaggaaaataggatattacttgttctactgttttctccaactaaatgaggtgacaaaaagcacaagtgactgatgtaaggtacaggaaataattcataagttgcacctttccttcctttctaccccaagctctccaaagcttataaggaggattcaaaatgcatagaatatgtggaaacaaaaaaatgtaaagtatgttattgtaaatggcatgacctctaatttaatgtatcactcacaactcattcctagaaaaccaatacaaagtgctacactcttggaagatttttggaaacattgtatgtattatttatgtttaaggaaactgaggcagagaggtaatatatcttgcccaatcatacagaattattaaatgagactcaaacaacaattctattaatcaacactgcctctactgaaaagttaatgttttattttatatgctttatattgcttgtgggtaggaggtgttgtctaggaagtttatgtgtttacctttcattgtcttaaaaacattaatgatacagagaatgtttttaatatttcaggggcttaaaatgtataattgaacacttggagggcacagcataattttcctgttcttcatattctccactacactgattattctttcaaggttgtaacaggctgctgcttctacaaatgtagtaattacatgagcattgatacatttctagattttagtttattctaagaataaatttattctaataatgagatgctccaagttcattaattttaggaaaaaatgttgtaaattatattgcgggaattaggagactgtcagggatgtagggaagaatttgtaagtattttgagatattttaaaacattctaaaacattagtatatacttatattaatagcataaaatacaaaatattttcactattaaatactttaattgcttttaaaatcagcattagagaaatctgttttgtatttttttctctttttcttttggatagcagttttaggtagtttacaaagaggtgagttcattaacattccaattataatcaatcaataaatatctgtttatatatacctaatttttacttccagattggtatcatatatttactgaggtggattgaaccacttcaaaacaacgttaaaaatttaataacatctaagaattcatgaggaaaattgacatttgttcatgaaacatgatcaatgaaatgtgcagtgtttctgtggaactatttccaggcagctgttgcaaatgaccctgatttgagaaatgctgggttaacagcattgctgtggggaattaacttgatgaaagctctatatatcctgctaagtgctgcttaatagtgcctaactcctcaaataactgtattcaataatagctaaacaacaattaacagctaaaaatgatgtgcaagtatctaccatcttatgagatggcagaatgggtgaaagagaaataagtaagttgtttgaggaaaacaacaacaacaacaagaaacagaaccaacttcaatgaaataattcaaagtgaaccaatcactgctataaatggaccaagaggcagggcttggttaggtaaatggccagcttcttcatgaagtatgttctagtctcttaggatgaactaattcttcagttttgacctttcatagcactgcttgtacctttatgacttgattcatttggctttgaattttagttgtttatatattgggctctgtactagcctgtactcttgggaataggggcaatgacttatttgtctttgaatgcttcaactctcacaacaataagtatatggaatattgaaaatatttaataaaattaggtaaggaaataaataggtaatattttaactgtcagttttttgctctagtctatcaaattaaaaaaatacaacaggaaatcagcacaggaaagtatttttagcccatcttccaattaagagacaacggattatgatcaattaaattgatattcttcctcaatatacataaagttcaattgcttctcatgtgggctagaaagaatggtgtctgcatattccaagtgtgagtaataagaaatacacaatcaggcaatcaagaggaattaccaaaaagtaagtgagatgctcactgtgtaataaagcttactgagaaactgtgttaccaggactccctgtaaccaaagtactggtgtcagatgcagacgctgagcaaaagaatgcatcaaggatcttgccttttctctcaaggagctaacataggaaaggagactggtcataggccaatgagatattaatagtacagtaagggttgtaatcataataagttgatgaacttgaagaagaaaactgaaatgcattaattgtataaatgtcttcaaatcaacagaaagtttaatgaatcgccacagaaatacagagaaagaagttgtgaactatggccaagccaacaagttttggaaagtttcaatgaaaagaagaaatttgaattagggcttcaagggtgacacaagatttcattaagttagaaaaatggtatttttagaaagaataaattacatcaacaatggtgctgtgacacagatgtatcaaacatagtaagtagagatccggtgtggctggcaattaaaacctacagatgacttctgagcatgggatgatgtgaaaagaattataaaaatgcaattctggtcaatggggatggataccttggatttgaggaagacagaaagctgggtaagtgttgggagaaattgtcctggtgagaaattgctcaccaaagaagtagattagtattagtggaaaaaaaaaaaaaaaaaggaaagaagaagaaagaagagaacataaaaagggattaatcttcagtgcttcagtgctttagtggcaacaaaatcatgaccctttctatagctatagggagaacagaagagggaaagttctgaagggagtgggtgtcaccagtggagggtgtccaggttcttggtgtcatgaacaaagaattggacacaacacacaaacaaagcaaggaagaaatgaagggatttattgaaaatgaaaacacactctacagtgtgggagtgggcctgagcataggggatcaaaggccatgttacagaattttggggagtttaaataccctctagaggtatttaatattctctagaggattccattgcttatttgggatatgccctatgtaaatgaagaggatgaagtaaaattacaaagtcatttacttggcctatgccccatggagaggatatttcctgtcatagctgaggtgtgaattggccttaagttccctccctccagaccctattttactgcctcagtggggataaatattacagtttggtggaatttgacactgacatgacttttaagcttttgagaaagtgtctagaagacgtttaggggcctggaccttgatagagcttttggtaccgaagaaacatttgcaggctcctcaaggaggtggtagttgaatagttggtggtgattaagccctttgaggactgagaggggagagcctgaagacaagggatggaaaggaagaccttatttatggtctacataatcgggtctactctgaatatttactgcgtctcctgcccctcatatgttgaaattctaacccccaaggtgatagtattaggaggtagggcctttgggaggtaattaggttaaaggggcttctttgtcatgaataaaattagtgtcattacaaacaaaggcctgaagcagctcattcactcctgctaccatgtgaggacacaagaaggtgccatctatgaacaaagaaacaggctctcataagacccccaatctgctgttgcctttattttggactccccagcctccagaactgtgagacataaatttatattattcataaagtacccagtgtaaggtattttcttatagtagcctgaatggactaagacatagtacaggtgtcacagacacttcattgatgttatttaaacaagatgaagattggagtcctaaagaaaactcacatttgctgaatgaaatgagtgcagacagaagaagcatgtaggagaggacaacctctctgatgacaaagcaaaatgttttaatgcaaggagtatcaaatactgcattaggatgaagaccaagtatttattatttaggatggttagaaacatattctgtttttatgtgaaaacataggctaactatcctcttttatatctctgttgttctcctcatcagtctggaaccacgagatcatctttagtgctaaacagcccacacaggattggaaaagaatattttgttgattgcagcatcctgtgtcaactgattactttctcttctatgcagattagctgctggggatcccaattgctcacagtagcagctgttgtcactgattctgtcacaagcagtgctgagcaggagtcaagtcatgctggggagaaggtgaagggaaatgaaacctttctcatttagcagagtcgctgcctattagataagtagacctgaaaatccaaaaagtttgcctcttgctcttctctgagattcattatagtttgtgactatcaagagagttgatattcaagatatatttattgatcccattttaaatcatacttttgaaatattttaaaaggtcattgttgcgctgctctattataggtcctctctgttgggatgggggagtggacagtttgggatgaagcccatattcaagaatctcctgccttcttcaagaagtgaagttgtcagaaaggagggttgcaaatcccattatgttcccttcccttgaaataaatcagaaacaaacagaagaaacaaataaacaataaataagcaaataaactcctgcaggtttatgtaagtccagtctcttgtcatagagtcagtaaattggacttactaatttttccataaaaaatatttacttcccttaagaaccacatgtcccgttgtttatgataatttgtttatgttgtttatatactatcattactattactaattttgcttcagctgttagttactgtgagggtcgttgaaacttcagactataatgataaatttgttcatttttcttatatcttcattaattttttccacaaatattttgagaacaagtttgtaaaagcttaatcattcaaatttgttatacttttcacatgaattaaactatgtttttctaacaacagaaaagaatcacatgttctatttctgcctttggtgggttcattatgttgagtcattatccttgcctcaacaactatcctactgacctctgaaggttagcctttttctgtgtttcttggaaaataaaaagcaggagccttgttaagcaagttgtatttttcctttctcctaagagtaattacaaatagatgcagtcctttgctttgagccatcttgaactcctttacaagataaaagtagacagttaatcgtcttttaccaagccctatcaaattatttgttcatattgctaataccaatattttagctcacttttattagacattgtaaaacctaatgtttttaatcctaaaaaatagcaattttatttaagaagacaaaaataataaaatgataagataggactccctgtctcaaaacacaagacaaacataattgtcattgcccagtttcactaggaaagaaactctgaggcaagaacaaaaatgataatgcagcaatttgaagataaaactcagcaagcggccgggcgcactggctcacgcctgtaatcccagtactttgagaggccgaggcaggcggatcacgaggtcaggagatcaataacatcctggctaacacggtgaaatcccgtctctactaaaaatacaaaaattagtcccagctactcgggaggctgaggtaggagaatggcatgaacccaggaggcggagcttgcagtgagccgagattgcgccactgcactccagcctgggtgacaggacagggcgagactccatctcaaaaaaaaaaaaaaaaaaaaaaaaaaaaaacaaacaaaaaaaaaaaaacaaactcagcaagcataggtaaggaaaggaatagttgtgggagttaattccaatatattctgggatgtatcatttggctctttctgtagaaactcaagatgtaaaatcccttcctgtgacatgatatctcatctgaattggaaagtgggagaaggaggcagaaaatctggtcacgcagcacattggcccggctacgcacaggcaatcaagggtacaaacattggcatttccagagcaaggacctggctggccccagacagatgcgtcaaatgaccccagcatacttctttcacggcagtttcagacatgtaccagtatcaagggggctgctggaatcaagggaatttgggaaagtggttaaggtttgtgtttcataaaataatctgaattttacaaaataacaacaaagcaataagtaacaatgagtaacagatttgtcaggaattgtcaaatgcagatgaacacaaaaaacatggtgattttaagttggctgtaaaagacaggcatcgtcttttataatatgactctcaagatttggttttacactaatcaacattttatgcaacatgagacattgcaatgctattttgatcctattttctacattggcattcatatcacaggctctgcaattagcatagtgaagaattttatgcttcaagtgatgtactgaccacattctgggtgaaaaacgatagtcccaaaggacaaccagcagtgcttttacaactcagctggaaattttgcaggaaataatgtatacgattaatagttttttaatatttttttcttattcaaactaacaatcagcttaatttagatccttgagattctccaatgtgttcgctaaaaccagctttaaaatcctcatggttgtcaatgttaggaaaatatccttacaaaaacaaagaggtgtcataatttggagactccttatttcagctctttctgtgttagcaaacagagttcaattgtggaagaaagaaaaagagaagatgtgcttaaaaagaaagatttgtttttttcatttgacgcacaaagatgttgcagcaaagatagcagatttgtaaaaaatcctggtttaccaaagagtatgagagagtggaatattgtattttctcttgacttcacactatcaggatcttctggtgcagaaagaagcagaggagattccctgataatttcttattgatagagccaatccagttcctgttgttccagtctatcccatcacagaggagtagtacagttgcaacaaggatgttgtaaataaataaatcttctcctattcaatgggcacaaattaatggtaaatttacttaaacgctaagttgcctaacaaagttaatatttgggccagctttgattaaattgttaccacctactgagtgtttttacatgccagacactgttctaaatatttataaaaattttaatcctcacaataactgtaaaaggtaagtactactattaatccaattttatgaagaaggaaacttaagaacttatataactttctcagggtcacacaggcagagctgggatttgagcagtctggggccagcggtttcctcttagctaaaaccaatagtttcttctgtttttgtttttgttttttgtttttttgagacggagtctggctctgtcgcccaggctggagtgcagtggcacgatctcggctcactgcaagctctgcctcaggggttcacgccattctcctgcctcagtctcccgagtagctgggatacaggcgcccgccaccacacccggctaattttaagtatttttatagagacggggtttcactgtgttagtaggatggtcttgatctcctgacctcgtgatccgcccgcctcggcctcccaaaatgctgggattacatgcgtgagccaccgcgcccggccagtttcttcatttttaacacttcaaataaaatatgcatgcttgtgtgtgtgtgtaatagaaatgtgagtgcacgggaggctgaggcaggagaatggcgtgaacccaggaggcggagcttgtagtgagccaagatcacgccactgcactccagcctgggcgacagagcgagactccgtctcaaaaacaaaaataaaagacaataaaagaaatatgagtgtatatgatttcttattttccttatttgctcaatagccaatatgggacctattttctaaataggcctcatctctctctactttatcagagagtaaatgtaaatcaggaagagaacctgaggtaccctgtaattattctttactcagctctcaaaagccttatatcaaatatgttaaataatctacttccttgtctttcataaatgtgctccggcttcgtaaaccgtgaaaagtgacagattatttattaagtcacttaaccactagcacatcccctccctttctcaaagagtgagatatcactccagctgctgaaagttaataaactcatggctaggtgattgagaagagctgtgatacatctgtaactgtctcacaacacaaggtaaataaactaggaattatcttcttacactcacagggctgccaggagacagaaagcttttcctctagattccaccagatttatttcaagtaactttttgctggctcttgtaggaatgcaaatttacagggagaggaggtcagctgagggcttcattttactcttgggattctgtccctaggacaattccaatttaagatttaagatgggcacaaatttcacagtaatttcatctttgtcgtcttccattgggcattcagaagctatgccaatgcacatttaatttttaattcagtgtgaggacaaatggttgataatgggagttacaatgatacagtctcaagttacttacttcacttgattcaggtttaacctctttttttaaaaaacactgtttttttttctcttatttccattctcacctccagcatccagctagggattctctctctctcactccccacccccaactctgtctctgcaatttgtactgtgtacagtacttgaagttgcctagacttgtgcacaactgtacataatgaacttactcactcccagttactggcataggaggtccctgctttctcatcactcctattcaacgtagtactggaagttctagccagaacaatcaggcagcagagagaaataaaaggaatccaaattggaaaagaggaagttaaattatctctgtttgctgatgacatgatcttatacctagaaaatcctaaagcctcctccaaaagactcctagacttgataaatgacttcagtagtttcaggatacaaaatcaatgtgcagaaatcagtagccaataatgttcaagctgaaaatcaaatcaagaacacaattccgtgtacaatagccacacaaaaaataaaatacctagggatacatttaactaatgaggcaaaagatctctgcatgaagaagtacaaaacaccaatgaaagaaatcacagatgacacaaacaaatgagaaaaggtctcatgctcacagattagaagaatcaatatcattaaaatgaccatactgcacaaagcaatatacagattcaatttaattcctatcaaattaccaacctcatttttcacagaattagaaaaaacaatcctaaaattcaaatggaaacagaaaagtcttgaataaccagagcactcctaaggaaaaagaacaaagccagagccatcccttgacctggcttcgaattatactacaaggccaaaataaacgaacaattcatggaactgtagttcaactgcataataccagaatcaagctgattatttctgcctttatattttatcacaggagtaacttttgaccacacaatgctaatcctaacattttgattcacagtgataatactttccccacctattgaattttttttttaaattatactttaagtcctgggatacatgtgcaggacgtgcaggtttgttacataggtatacatgtgccatggtggtttgttgcacccatcaacccgtcatctgcattaggtatttctcctaatgctatactcccacaccccctcactccccgagaggccccggtgtgtgatgttcccctctgtgtccatgtgttctcattgttcaactcccacttatgagtgaaaacatgcgcatgcggtgtttggttttctgttcttgtgttagcttgctgagaattatggtttccagcttcatccatgtccctgcaaaggacatgaactcatcctttttttatggcgattcctcaaggatctagaactagaaataccatttgacccagcaatcccattactgggtatatacccaaaggtttataaatcattctactctaaagatacatgcacacatatgtttattgcgactctgttcacaatagcaaagacttggaaccaacctaaatgctcatcaatgatagactggataaataaaatgtggcacatatacaccatggaatactatgcacctattgcaattttttggtgtttgttgataaattatgaggattacgcactaggtgtgtacagggtttcataggtgctttgtaaacatcagagtcacttgggtccttttctccataagcctaaaatcaaattacgcaaccaatgaccactactttcccagacactgttcacaggctgcatgttgatgaagggcagagaaaaagtcctcataactgatgtttaggtgggaagcacctatggcatttttaagttctagttcaaaataagaagctcagctacatttcatgtccaaagtaaaataatctatttcacaacttttattgagcagttcctttgtgccaggtgctatgctggctctgatactaacacttgaagaaatacaaattattaattttgtacacaagacattcaatcctgaaaagaggcacccagggtattagaaatgctctctcagcaggtaggagtgttaatcttggttttgccattttgtttttttcctatttatttatttatttatgagacagagtctcactctgtcacccaggctggaatgtagtggcacaacctcagcccactgcaacctccacccactgggattctcctgcctcagcctcccgagtagctgggactacagacgcgtgacaccacacctggctaatttttttgcatttttagtagagacagggtttcaccatgctggccaggctggtctcaaatctctgacctgaagtgatcctcccacctcagcctccaaagtgttgggattacaggtgtgagccaccacgcctggctggttttgccatattattgaaattttaaacatccaaagggcttttgactttttgtttttgctttgatactcaatgtattttagctgaaattattcctgtaagtatttaatactgctggtataactaataaataaaaacaaatattttataaagttaaattactcaagaacttaaatattatcaacttgattagttaaatcttttaaaacatgtcaataaaattatgagcttttcctttttttaattgaagaaacagggtcttgctctgtacatccgatatgaagtgcagtggcgtgatcatagctcactgcagtctcaaattcctgggctgaagagatc

SEQ ID NO: 60110 - DNA, 421 bp, Homo Sapiens
  misc_feature (11)..(11): n is a, c, g, or t
  misc_feature (390)..(390): n is a, c, g, or t
  misc_feature (404)..(404): n is a, c, g, or t
ttgcccagacntggtctcaaacaccttggactcaagcaatcttgcccgccttggcatcccaaagtgctatgattatagtgtcagccaccacacccagcctatatttgtattcttaaaaaggtcatctaactttatatattctaatgcagattagcatatggattttaccccctctactgtatttgggagtttactatgatcttaaatatatgtatataagaaaactttaaaaatgcaattcaaatcatgacatggtaatacttttgaaaaggggactgattaaaaaagatccaaaccggcagcataaaaaaaactgggaagattattaggtttcagctatttattatctctccattacacataatcaacgataatctgggtactaagggnatataccaaatggncaattaaatttccctca

SEQ ID NO: 60111 - DNA, 2885 bp, Homo Sapiens
tttttttttttttttttctggccagtcacgtgaagcagtgggagtggaaaaggaacaaagaaatctgtaactggtggtgatcagttactgtaaacaccacttcacctagaccagcctgagtatttttctttcgggtttttttttttttttttttttgctagttgcaaaatgaacatatttattataaaaaagttgaaacatatttgttttttgaggcaggctctcgctctgtcacccaggctgaagtgcagcggcgtgatcatgctattgcagcctcatctcctgggctcaagcaatcctccaacctctcaacctcccaagtcgctgggacctgacctcaggtgcatgccaccatgcccagctaattctttttacttttagtagagacaacttctcaccatgttgcccctagactggtatgaactcctgggctcaagcagttctcccaccctggcctcccaaagtgttgggattacaggtgtgacccaccatgcctggctgaaacttatgttttcttttctcttctttttttttttttttttttgagacggagtttcgccatgttggccaggctggtcttgaacccctggcttcaggtgatccgcccgtcttggcctcccacagtgctgggattacaggcgcaagccaccacagccagccatggaaagcattctgctgcttgtggaagaattttccctgcgtaaagttgtcgagatgtttgaataagtggtagagagagaggtcaggtgaatgtggcagatgaggcaaaacttcatagcccaattcattcaatttttgaagcattggttgtgtgacacaggtgttgtcgtggagaattgggctatttctgttgaccagtgctggctgcaggcattgcagttttcagtgcatctcattcatttgctgagcatacttgtcatatgtaatggttttgccgggattcggaaagctgtagtggctcagactggcagcagaccacctttttttggtgcaagtttggctttgggaagtgttttggagctgcttctcagtccagccactgaggtggttgtcgctagtttttgtataaaatctacttttcatcggatgtcatgatccagttgagaaatggtttgttgttgcctagaataagagaagacacttcagaaagacagtttttaaaattttcgctcagctcatggggcacccatttactgagctttttcacctttccagtttgcttcaaatgccaaacaaccgtagaatggttgacgttgagttctttggcaacttctcgtgtagttgtaagaggatcagcatcaatgattgctctcaattggttgttgtcaacttccgatggccggccactatgctcctcatcttcaaggctcttgtttcctttgtaaaacttcttgaaccaccactgcactgtatgcttgttaacagttcctgggccaaatgcgttgttgatgttgtgaattgtctctgctgctttacaacccattttgaacttgaataagaaaatcacttgaatttgctttttgtataacataattttcatcgtctaaaataaatataaaacaccaagtaataagtcattaacaaaaaaagtgacaaatgcacattaaaatgatatattgcgtaactacattcagaagaaaacaagaacttaaccacatttatttaagaatgtattccagtatcaaacggcaaatttcaacaacgcaaaaactgcaattacatttgcaacaacctaataaaagctgttacatttacttgattttagtccttaagagaaacttctgagagttaaatcctgtaatagagtcctcacatgaaggtgagagcaaagttgattcacctaatgtacgtgtcataattttaagtgttatgtggctgagttgaaggatgaaggtacaggatgtcttcatgttgataaaaattcaatgtctaatttcctttcatgtatgtgtgctttcttctttgaagctatagattagcctgactctgtcataggttaaattttctgagcatcttgtgttttccctaaactcgagtgactcctctgctatttatgcttgatttgatggcagggcaccccggctctgccccagactggcataccaacagaggctttggtgaaggggtccatttcgagaatgcccattgaagacagcagtcctgagaaaggcagagaggaagctgcatccagaggccatgttatttatgaaggcaaaagtggacatatcttgtcatatgatagtaagtattgtatgtatgcaccaaagccagtattacaatatgtgctaaaaacataggcttgggttttcccgcatttctgctctctgggagtcagtttatctttgctgagcctatgttttctctcagtaaatggggttagtaatacttgtctcatgagaattttgtgaataacagcttagtcgataaaaagtaattaacaacgcagagctcatattaaatgtcccataggtggtagctaagattgtcgactgtggtcagtcagtttagcttaggtaaagagcctttgttgaactttaatggaatacttttattttgaagagattcatgttttatgaattaagaattagagggtagataggctgggcgcggtggttcacgcctatctactatctaatcccagtactttgggaggccaaggcaggtggatcgcctggggtcgggagttcaagaccggcctgaccaacatggagaaaccccatctctactagaaatacaaagttagccaggcatggtggtgcatgcctgtaatcccagctactcgggaggctgaagcaggagaatcgcttgaatccgggaggcggaggttgctgtgagccgagatcgcgccatttccagcctgggcaacaagagggaaactccgtctc

SEQ ID NO: 60112 - DNA, 1378 bp, Homo Sapiens
ggctgcaatgagctgagatcacactccagcctgggtgaaggagactctgtctcaaaaaaaaaaagtatgcactgggaccctagcgtggcacctgtcccaccacgcctgctcctgagttgtccattctgtctctgcaggtacaagaagaacatcaaggccttgtacatcgtgcatccaaccatgttcatcaaaactctgctcatcctcttcaagcccctcatcagcttcaagttcgggcagaagatcttctatgtgaattacctgagcgagctgagcgagcacgtgaagctggagcagctggggatccctcgccaagtgctcaaatatgacgacttcctgaaatccacacagaagagccccgcgacagcccccaagcccatgcccccacggccccccctgcccaaccagcagtttggagtctcgctgcagcacctccaggagaagaatccagagcaggagcccattcccattgtactcagggagactgttgcctacttacaggcccacgctctcaccaccgagggcatcttccggaggtcggccaacacccaagtggtccgggaagtgcagcagaagtacaacatggatgggtgctgcccttcaggctgtgccgagcttctctcacgctgcccccaccccagggctgcctgtggatttcgaccagtacaatgagctgcacctgccagcagtcatcctcaagaccttcctccgggagcttcctgagcccctgctcacctttgacctctacccccatgtggtgggcttcctcaacattgatgaaagccagagggtgccagcgacactgcaggtcctccagacgctgcccgaggagaactaccaggtgcttcgtttcctgactgctttcctggtgcagatttctgcacacagtgaccagaacaagatgaccaacactaacctggctgttgttttcggccctaacctgctgtggcccaaggatgcggccatcaccctcaaggccattaatcccatcaacaccttcaccaagttccttctggatcaccaaggggagctgttcccaagcccggaccccagcgggctctgaacctggcccctgccccaccagccccttctctggtagcccgggtttggactcttcctcctggcatcaggggccatgaagccccctggagagagatgttggagccacccatcaggcatgctctcccccacctctgtccagcccgcctcacggccctggcggcctcgctgttaccagaagacgtttttctctgccttacacttctcactgcctctctggacaccgggcttttgctgggctctccagagctgggcttggctcttccagctggagaaggactgagccccagtaacccctttcctgctttttcctgtctca

SEQ ID NO: 60113 - DNA, 484 bp, Homo Sapiens
aatcttttatttttttttttttctttttttttggttttttgtaaagaccaggtctcgctacattgcccacgctagtttcgaactcctgagttcaagcaatcctcctgcctcggcctcccaaatataggcttgagccactgcacccagcctaaagttaatttctatataacgaaacctacttttccactgatatttattataatataaaaaataagttcttttggaaaaagacatggaaacaaaataagtaacatgaaactttccttggaaatactcttaactagaagtaataacacacaaatgcaaatagacaagttttttttaaactgacagtagaaaaatcaccccaaaatccaaagccattatatctttaatatgaccacagaaaaatagttattattttctatagtattcagatcttgttttccaaccttgaggaagctaccagtattaaaaaaaagcatagtgagctgagccataaaag

SEQ ID NO: 60114 - DNA, 562 bp, Homo Sapiens
tttgccagctacatttcttatctctattgataataactataccacctatgtctctgctttttcatgcttgagggatctctgatcaatcaacgtgcatgatggcctgaaaaagcccaatttatgggcaataaagtgaatcatcttattatcaggaacgaatatatgtttcctttattgactgctgactatgtagagcataccaacaaaattgccattcatctatccattcaacaatatttattagctattccgcactgggcagtgctctaggcttggggatagaacagtgaacaaacaaaatccttagcctaatggatattacctggaagtgtgccaggaagaataaactcacttgtgaattacaacaataagtggtttattcaggttaaaatcttgttttgtctcctgggaatttcactgaattgcatcatgtaggaggcaaactataccccaagaattaagagcaattgtgaataaatgataaaccacagagtttacatttacctcctaatacatttaactcctaatatatatatatacatatattacgaggtaaatgtaa

SEQ ID NO: 60115 - DNA, 442 bp, Homo Sapiens
  misc_feature (301)..(301): n is a, c, g, or t
  misc_feature (433)..(433): n is a, c, g, or t
  misc_feature (442)..(442): n is a, c, g, or t
ttttttttacaaaacaatttctgaaactttattgtgaattttaaggtacatttagtaaagaatgttatccttaatataattaattaaaaataaattggaaagaaatgcacatactacttttttaaagcaagaataagtacagacttttgaagccacaatatatacaattttatgagtgcaataagctttcaaatacattaggtatatatccgtttaaataaatagtaggaatacttgatttgacatatgtgatagtcatactgattacaccaaaaatgttttacaaaatataggccaaaantgggaacgttatacattttgatattacaactcttttaaatactttatatattccattacttacttccaaattataggtggtaccaaaggtcccttttaatgaggggccagtttttattgtgtgtttaccccngttggagtn

SEQ ID NO: 60116 - DNA, 559 bp, Homo Sapiens
ttttttactttttcctaaccgaatttattttaaaagtaaaacccaaaggaggaaacaaactcttcagttgtttcaataaattgttccttaaatatccccaattcacaaacaaaaccccacaagtagcaccgatttacaacaggatgtggcccaaaaagcaggaagggggccaagagcgctccagcaggaagcttaataggtggtccatggagaaaaacacgatgggtgcatcacaaataggtgtaaacagtacacttttgtaatgtgtagacaccagtttctgcaacccccatgccacgcaaagtttcagggaaagtctttgaaagtacaatccggaaaactcagcaattcttaaaaaaaaatggctttccgctgttataagcctccttcctaagactcagggtccgcagcagaataccctgacccaaaataaaaatactatgacaaaaatactccaggaggcagccggctttacttcgtttaaagccggatttcgcttagtcccgtgaaagcgaagtagcaccagcgcttcctgattccgcacagttctctcggcaga

SEQ ID NO: 60117 - DNA, 2063 bp, Homo Sapiens
acatttttaatatgttaattggagatgtctgtgatatgtccaggtttgagtagacagttggatacttccctggagatcagggaggaggtttggggaggagagttttcagcatacatctggtatctaaagccaacagacaggatgcgatcaccatagaaagattatagatagagaagctgcccctttgggccctctttaagaagtgaggacccccaactggctgctctgaaaagccatctttgcattgttcctggttcggtgtcctgctcaccacagccacctccgccatgcacttcctctgctgcctcagagtctggcagcttaatcgacatagtccccaaactctcactttcttcttaatcccttgcatcggatcaccgctgtgccccaccatgtcagaggcagttgtggacacaagctccgtgatcaccaccaaggacttcaaggagaagttgtggaggaggcagaaagtggaagagacgcccatgctaacgggaacgctaatgaggaaaatggggagcaggaggctgacaacgaggtagatgaagaagaggaacagggtggggagaaagaggagaaggaagaggaaggtgatggtgaagaaaagaacggagatgaaaacgaagcagctgaggcggtatggacaaatgggcagctgatgatgatgaagatgacgatgttgataccaagcagcagaaggccagtgaggatgattagacagcaaaaaaagaaaagttaaactttaaattaaggccaccgtgacctattcaccctccacttcccatctcagaatctaaacatggttgccctcgagaggcctgcttgccctccacagacagtgccactgcagatgacaggcactcaccaccacccaacccaaaccagagaatttgcaacagaggaggaaaaaagaaccaaaacttccaaggtcttgctcttttaaaagtactttaaaaaggaagtttgtttgtattttttatttacattttatatttttgtacatattgttagggtcattttttttttctttgagacggagtctagctctgtcgccaggctcaagtgcagtggtgcgatcttggctcaccgcaagctccacctcctgggttcaagtgattctcctgcctcagcctcctgagtagcggggattacaggcgcccgccaccacacccagctaatttttgtatttttagcagagacaggctttcaccaggttggccaggatggtttctatctcctgaccttgtgatccacctacctcggcctcccaaagtgctcgaattacaggcgtgagcaccggcgccaggttcagtcatttttaatgatctcagatgaccaagccagcctttggagggttctctgtcttacttctgactttacttgtggtgtgaccatattcattataatctcaaaggaggaaaaaaaaaaaaaaaaaaaccttgtttaaaaaaaaaaaaaaagcctgggcgcggtggctcgcgtgtaatcccagcactttgggaggccgaggtgggtggatcacgaggtcagaagatcgagaccatcctggctaacatggtgaaaccccctgtctactaaaaatacaaaaaattagccaggcgtggtggcgggagcctgtagtcccagctacttgggaggctgaggcaggagaatggcgtgaacccgggaggcagagcttgcagtgagccaagatttgccactgcactccagcctgggcaacagagcgagactacatctcaaaaacaacaacaacaacaaaaagtctcgttctgagcattccagtagcttctttagtgtatgtagttagttgtaccataagtagttggtttgtgtgagatggttaaaaaggccaaagataaatgtttcatttatttgccttttttgtctatgaaatggctgcttatttatttaggcctatttgatgtatgtgtgaaacaatattgtgcaacaataaacccaaattttattttgctgagttgttctaacagcaacaaaaagaagttaaggaagagaagaagaccagcaaatgcaaccacagagtgactagtgaagtagatgaaact

SEQ ID NO: 60118 - DNA, 542 bp, Homo Sapiens
ctctgggcgacgttgctggcagaggaaatgagaagaagcccagtagcgtgagggctctgtccattgtcctccccatcgccacggagctgggtctctggtctcgggggcagctgtgtgacagagcgtgcctctccctacggtgctcctcgtcttcctttgcctgggggtcttccttctatggaagaactggcggcttaagaacatcaacagcatcaactttgacaaccccgtctatcagaagaccacagaggatgaggtccacatttgccacaaccaggacggctacagctacccctcgagacagatggtcagtctggaggatgacgtggcgtgaacatctgcctggagtcccgcccctgcccagaacccttcctgagacctcgccggccttgttttattcaaagacagagaagaccaaagcattgcctgccagagctttgttttatatatttattcatctgggaggcagaacaggcttcggacagtgcccatgcaatggcttgggttgggattttggtttcttcctttcctgtgaaggataa

SEQ ID NO: 60119 - DNA, 539 bp, Homo Sapiens
  misc_feature (344)..(344): n is a, c, g, or t
ttctttttcttttttcttttaaagggggagggcataacaaagaatgacaaaaacaaaaaaactgaacccaaaaggcatggctggggtctgtgtctttgtcagctgcagtttcaaaactaaaagataaatttgatgccaggtaaaggtggcagggctgctatgaccgagtctgagagggacttctttgcccgctgctttggggcccacaatttttctctgccgagagtggggccacaaatactgcgaaactatctccgtggtggtcaatgtgagtaataagagggcctctggctgcttctggaaaaataatgggggcaaagggggttaaaaacatcattttatgngggggggggggagggctctcccccccccccacgggttttaaaaagaggtggggggccgggggagcctggttttagggggtcaatccgggggccactttttgaattcctgaacaaatcccagtgcttgtagttaagaccatttacaaaccccaacagcccacaattttggtggctccttggggctcccaagctccc

SEQ ID NO: 60120 - DNA, 1255 bp, Homo Sapiens
ctctctttttgaaattttttatttttttgtggagaggaatctcgctatgttgcccaggctggtcttaagctcctggtctcccacctcagcctcccgaagtgctgggatcacaggagtgagccactgtgctcggctgcaacatatattatagtgtggaaattggcaactattctctactcagttattagcaaacaacatatatgccaaccccgatgctaaattaaaacatggactatgattagtgattgctgtctagtttatttcttataaactatatggccttctaatattaaaacaatctgtacacattaaggacactgagtaaacattcatcatgctttttgtaatgaatgttttacttattaatcattcatccttatcttccttccctaccaaatcagagtttctacctgattttgacttccccctctccgccttctaggatgtgctttcagcacagtctttggtggctgctgtgcattctgacccccctctctcctccctcacactgactgtaagtagaagagcagcaaaatgtcgccgtatttaccaggaggcaggggctgtgtgactgggccaacctcagccctccttaccttgcacagccatgctggatgacctggctcctgacgcacacctgggccatggctgccccactctcaagctttctccatctatgagtccctgcagcttcactaccctggctggccacccaactctaactgcttcttcagccttcttcatgagcttttgctcctcttcctacctccttgaccaatcggcacccacctctgcctgcaagctctcatcatgcctatgactgcacagatcacaggggcagggctcatttgggaatcgtttgtccatctctcttattaggtcataaactcctgagggcaagaactgtgtcctgttcatgactcaacagtagacagtcaattaatgcaatcaacctcactgattatatgaactcaaaaagttacgctagactctgccttctctgttcgtccctgtgtcactgattgagtctactccactgactgactatcgcgcccaggcagaaaaccctcagttcctcctttctagcggacaatattcatcccaagtgcaaagaatttcagtaagaacatttaacatagcctgaatcagacctatgaatactttttattccaaaccttcaggaaagttaaacttcctgcctcctgaagccaccctgcttcctgaagcaccatctcatctgtgatctggtccaagg

SEQ ID NO: 60121 - DNA, 506 bp, Homo Sapiens
tttaacttttttttttaaataatttcagattgacaaatattacatacaaataattcctatacattcttcacccagatttcccaaatgttaacattttatcacattctttatcaagcaaacattgggtactaacttatttatgaacatgtcaaaatctgcacaatgaatagtatattcatttataatgataaaaacacttcacatatttttgctggcagtaggaataagaacacaagttaaaatccaaatgtaatcttaattttattccctttattatctctttagtaaaaagttaggtcagttgtttccgtttatttatgtccctaccaaagtagaaacaaagtccaatcttgggaggatgtagcttgaataactggtttagaaatgtacttattaggggtacttattagggattagtggataagtgcttaaatggttgtggataacagtgcatataggactctcaagtatttctataacagacacttgtgcgttctactctatat

SEQ ID NO: 60122 - DNA, 313 bp, Homo Sapiens
ttttttttttttttttttttttgaggtttatgctcattttattataaaaaaatacagaatccaaagttgattgtgacgggaagagggaggcccggtcgccagctccaggcctggcaacgcggcccgccccgccgaccccctacaaaagccctctgcccaccccccaccaccgggcgtgcctcgagccgccggccggcggtacaacaatatatatttatatataatatatataaaacacagagtcaggaaaggcgggtagaaatatgaaatccgtataaatgtgttgtttccttcattaaagtgtcttcgggga

SEQ ID NO: 60123 - DNA, 2643 bp, Homo Sapiens
cgcatctcaggcgcagtctctaggggctgtgcgcatcctagggggggacatgtgcatctcaggggggctgctcgcatctggggggtgctgtgtgcatctcgggggggctgtgcatctagcggggtggctgtgtccgcatctggagggggctgtgcgcaacccggggggggtgttgcgcgcatctagcaggggcggctgtgcgcatttcgggggggggctgtgcatatctggggggaccgtgcttatctctgggggcggctgtgcgcatcttgaggggtgtgtacatctcggggggcctgtgcgcatcttggggggctgtgtgcatccgcgggggctgtgcgcatctcgggtgctgtgcgctgctcctctgagctctgctctttcttgcagcgtttgcctcagccatggagggcggggccgcggcagccacccccacagcactgccttactacgtggccttctcccagctgctgggcctgaccttggtggccatgaccggcgcgtggctcgggctgtaccgaggcggcattgcctgggagagcgacctgcagttcaacgcgcaccccctctgcatggtcataggcctgatcttcctgcagggaaatgccctgctggtttaccgtgtcttcaggaacgaagctaaacgcaccaccaaggtcctgcacgggctgctgcacatctttgcgctcgtcatcgccctggttggcttggtggcggtgttcgactaccacaggaagaagggctacgctgacctgtacagcctacacagctggtgcgggatccttgtctttgtcctgtactttgtgcagtggctggtgggcttcagcttcttcctgttccccggagcttcattctccctgcggagccgctaccgcccacagcacatcttctttggtgctaccatcttcctccttcccgtgggcaccgccctgctgggcctgaaggaggcactgctgttcaacctcgggggcaagtatagcgcatttgagcccgagggtgtcctggccaacgtgctgggcctgctgctggcctgcttcggtggggcggtgctctacatcttgacccgggccgactggaagcggccttcccaggcggaagagcaggccctctccatggacttcaagacgctgaggcagggagatagccccggctcccagtgatgcgcccggccggccctgggggttcgcggggtgtcttcttgcctgcccctgctgaggcgtcttcaggactgcaggctccggagagtggctctggcagcaggcgggcgggtgggtgcagggggatccgtttgatgcgtcgtttctggggcaggtctccgcctcctctgcttctcgtttctccgctgctatagaccagttcattgtgtgtggctcccgtgtctctgttgcccccttcagtgcagaaggctttgggtagacttcgggtgttcggtcctggtcgcagagcacagatctttaaagaagcgttagagaggtaggttctaccctcttggtagtagatgcctggggcaaggcccaggggaaactgggggggcctcagggacaggcctggaaaggccacgatggcctgctgaattcaaacaaggagtccctccagcctgaataacacgtggcacaaatgggcccggcctttggcagaggagcaagtgatatgatgtgtaaagtatgttggtggtgaaagcaaggttccccaggagaggggagggactggcccctgggaagctctgagatgaggctgtggcccagctgtagtcctgaccttactcttctttaaaaccctttagccctaggatggctttggtgggagaggggatagaagcccatgacttcagacagactttctcttggcagatgcaggcaggcctcctcccaggctgctccagacatgggggttggggatggggggtaccttgcagccccttcctgctggggctccctccttgtagcacccccttgcggctcagctctggtttcctctcccaggctcacccaggctctgctcaggctgggaggcagagggcacaaaccttataattttttaaatgaaaaaccgctgctgctggctgtggctagagccccctggggctgctggagctgctgcctctgttctggaggacgagccttctccttatctgctgcccatctttccaggaagtcaggatggagtcagacaactaacgatcatcccccgtggtgtctgcacatcactccagccccataaagagtgtcatgttagctgagtcaccatttggcttcggcctggaaatagtgtgttagaacactgatcgtgtgcgaggccaggagatcaagaccatcctgactaacaaacacagtgaaaccccgtctctacggaattccctgtattagtctatatggttctccaagaaactgaatgaatccattggagaagcggtggataactagccagacaaaatttgagaatacataaacaacgcattccgcaggaaacatacagaggatgccttttctgtgattgggtgggattttttccctttttatgtggatatagtagttacttgtgacaagaataattttggaataatttctattaatatcaactctgaagctaattgtacataatctcgagattgtgtttgttcataataaaagtgaagtgaatctg

SEQ ID NO: 60124 - DNA, 1092 bp, Homo Sapiens
gaggaatcacaggtgccacacagggcaatcttctctctgttttctgcacagcggagctgcccaagccctccatctccagcaacaactccaaccccaaggaggacaaggatgctgtggccttcacctgtgaacctgagattcacagcacaacctgcctgtagtgggtaaatggtcagagcctcccggtcagttccaggctgcagctgtccaatgacaagaggaccctcactctactcagtgtcacaaggaatgacacaggaccctatgagtgtgaaataccgaacccagtgggtgccagctacagtgacccagtcacgctgaatgtcctctgtatcttctgttcctctgtggcccaggcttccagcccaaattcacacagccagaggccaggcctctcagtccctctcaagtccagggactcagactctcacccaggctggccatcacttcctgtcccaaggaaacctgggcagacccagccttgaccaagaataggaggggagaggctgctcctgtcctgggaggctcagggtccacagcctgtgatgggagaaacaggtgaatatctagacccagactcagtggacagattgggtttcgttaggacttcaaggttgtgacttggctcacagggacactgtggctcttccacagaccaggagcttccccttccctttgatgatatcatctatgactttattctcgctactccagatggaccgggcattcccaccatttcccccccagactcctattaccatccaggggcaaatctcaacctctcctgccacatggcctctaacccacctgcacagtactcctggtttgtcagtggaatgctccagcaacacacacaaaagctctttatccccaacatcgcagtggataagagtggatcctatgcttgcctcgcccataactcagccactggcctcagtacaatcacagtcaagacaatcacagtctctgctaagtggatccctggagcataggccctgagccctgggtaaagccactcagttttctgaaagagcctagaagtttatttcccagcccatgtcttggacacaagcaaatcccaaactctaccct
